United States Patent Application Publication US 2006/0134663 A1 - sequence listing, part 112

SEQ ID NO: 348763 - DNA, 448 bp, Homo Sapiens
  misc_feature (11)..(11): n is a, c, g, or t
  misc_feature (25)..(25): n is a, c, g, or t
ccctcaaaaanggtgcccccctagnggccccaggatttaaaaataatttttaattaaccccattttggaaaaagggaagaaagcccattcctgccatatgccctttgaaaatccctgcccccctctttaacccacctccttccctcccccctcaaaggaaaaacatttccatcccaagtaagttaacggcattttcctgtaggattttccttatgcactgcacactctggacctcacctgcagatacagttccccccttgcccaggagcatctgcatgtggtacttctcttttccctcagttgatatttcttatatgatattctagatactatagaactcaatttgtcagattcagtataacctcagattttgttacctgtcttttaaaaatgcagattttgtcaaatcaaataaagatcaatggatgttgggtataatcaaaaaaaa

SEQ ID NO: 348764 - DNA, 1246 bp, Homo Sapiens
  misc_feature (24)..(24): n is a, c, g, or t
  misc_feature (30)..(30): n is a, c, g, or t
  misc_feature (37)..(37): n is a, c, g, or t
  misc_feature (748)..(748): n is a, c, g, or t
taacagatgtgtgatgaagatggnaccatncactgtnccttgggatcaacaactgttgtggttaccaaaatcatgcttcgttcacactgtttctcctttaggcaccactgggttgtatccatgctgctttcatttttgtgatgactatgtacacacaggctttatcatcggatgaaaataattctcaggaaacaaaacttctattgagtcatgggattgaagagaagggctaaagatcgaattcagtattatcaactaggatgaagtctttgtttttccatatggatatgggaaggaggatggaggaactttaaacaggtatttacgtggtcaggggtccctgaaggagatggacttgagtggccagtaagagaaggctgtcaccaatacagcttaacaatagaacagttgaaacaaaaagcagaaaagagagtcagaagtgttcgctataaagtaatagaagattatagtggtgcctgctgccctctgaataaaggaatcaaaaccttcttcacaagtccctgcaccgaagagcctcgaatacagctgcaaaaaggggaattcattttagccacaagaggtttacgatactggttatatggagacaaaattcttgatgattcctttatagaaggtgtttcaagaataaggggttggttccctagaaaatgtgtggaaaagtgtccctgtgatgctgaaacagatcaagccccagagggggagaagaaaaatagatagctgctgttanaacaacattatcctttaagtctgcttaattactggaaaatggtacatattactaaagaattatgcaatgagcctactctggttaagatgttcttttcctcaaaggtgccctagtgccatgatttaaatatttttattaccattttgaaatggagaagccattctgcatatgcctttgaattcctgcccctctttaccacctcttcctccccctcaaaggaaaaacatttcatccaagtaagttaacggcattttctgtaggattttcttatgcactgcacactctggacctcacctgcagatacagttccccccttgccaggagcatctgcatgtggtacttctcttttccctcagttgatatttcttatatgatattctagatactatagaactcaatttgtcagattcagtataacctcagattttgttacctgtcttttaaaaatgcagattttgtcaaatcaaataaagatcaatggatgttgggtataaaaaa

SEQ ID NO: 348765 - DNA, 618 bp, Homo Sapiens
  misc_feature (382)..(382): n is a, c, g, or t
  misc_feature (384)..(491): n is a, c, g, or t
  misc_feature (533)..(544): n is a, c, g, or t
  misc_feature (576)..(577): n is a, c, g, or t
cagtgttaacaacaatcatgataattaaaattaaaacactagtttgttcacttgtaggactgcagttctgaattttgggttaaaggttttggctgctgtaagaatgtgaatttgaatgtattttgaattgtaagagcaaaagaacgtttttgtacaattttttttcatttaattggaatgatcttcaggtttctacaaatagggtaattgtaaatttaaagcattagcatttattggtgaataatgtatatatccccattccaagaaatataagtgagtgaagttgaaataaaatctttaaaatttactatattgccagtggtttcacaacagttctcttgtatttatttatcaattaaatcaaataaaaatgattatgtcncnnnnnnnnnnnnnnnnnnnnnnnnnnnnnnnnnnnnnnnnnnnnnnnnnnnnnnnnnnnnnnnnnnnnnnnnnnnnnnnnnnnnnnnnnnnnnnnnnnnnnnnnnnnntaaaacaaaccccaccaccaacacaccacgacacacactgannnnnnnnnnnnacccaccacaacacaaaaaaaacacccccggnnaggggggcgccgcccccccgcccaaaagaaattttttctac

SEQ ID NO: 348766 - DNA, 1355 bp, Homo Sapiens
  misc_feature (13)..(13): n is a, c, g, or t
  misc_feature (15)..(15): n is a, c, g, or t
  misc_feature (40)..(40): n is a, c, g, or t
  misc_feature (45)..(45): n is a, c, g, or t
  misc_feature (54)..(54): n is a, c, g, or t
  misc_feature (58)..(58): n is a, c, g, or t
gggattgcaaatntncttccgtcggtccgctcagaatcanctgtnctctcaaantgtntgggtggtttccccggccgcagctccgtacgggcttggattgctgggcctcggtgcaccccagcctcccccactcgggttctgagcttgaactggcggctctttaactctgcttcactgttgctcttggcaacatccacttccgggagcgagtgccgtttcccccgctcaccgcgggctagggagcgtgggattccggactgtgagcggctgttagtgcgtcgcagctgctggcgatccggcgaccctcggccggcaggacctcggcgggaccgccatggttctgctgcacgtgaagcggggcgacgagagccagttcctgctgcaggcgcctgggagtaccgagctggaggagctcacggtgcaggtggcccgggtctataatgggcggctcaaggtgcagcgcctctgctcagaaatggcaagaattagccgaacatggcatatttctccctcctaatatgcaaggactgaccgatgatcagattgaagaattgaaattgaaggatgaatggggtgaaaaatgcgtacccagcggaggtgcagtgtttaaaaaggatgatattggacgaaggaatgggcaagctccaaatgagaagatgaagcaagtgttaaagaagactatagaagaagccaaagcaataatatctaagaaacaagtggaagccggtgtctgtgttaccatggagatggtgaaagatgccttggaccagcttcgaggcgcggtgatgattgtttaccccatggggttgccaccgtatgatcccatccgcatggagtttgaaaataaggaagacttgtcgggaacacaggcagggctcaacgtcattaaagaggcagaggcgcagctgttggtgggcagccaaggagctgagaagaacgaagaagctttcagactacgtggggaagaatgaaaaaaccaaaattatcgccaagattcagcaagtaagtactttttgctttaatgtgtcagtagtttttgttatttcccttcaaactgataaaaatgtacagtgaatccgaaagattttaaactactggtacaaatatttttaatcttattggctcgggtttaaactaaaaatatcctcttcctgcacaccaacaaaaactggaaggaaaatatggattgagtaccaaatctctagagttagtgtgaataatgtggggggagaggcacatattctatgtgaagttccaggcgtaaacattgggctggaggtaaccgatatgtccttgaaatgttaaatttcgccggcactgatttcagggtttatacaatgggtgatgctgtgtcc

SEQ ID NO: 348767 - DNA, 1993 bp, Homo Sapiens
  misc_feature (1317)..(1317): n is a, c, g, or t
  misc_feature (1333)..(1334): n is a, c, g, or t
  misc_feature (1349)..(1349): n is a, c, g, or t
  misc_feature (1379)..(1379): n is a, c, g, or t
  misc_feature (1387)..(1387): n is a, c, g, or t
  misc_feature (1405)..(1405): n is a, c, g, or t
  misc_feature (1414)..(1414): n is a, c, g, or t
  misc_feature (1428)..(1428): n is a, c, g, or t
  misc_feature (1869)..(1880): n is a, c, g, or t
cggtccggaattcccgggatggagcggttgtggggcggcagctgcggaactgcgcgattgtggttcccgccgtatttcccgttccccatctagtaactcccatctcagcccacgtatctccctgagtggaaatctcgggccccagaccagtcgattgggaggtccgccctccccttcagcgacttggtctgtgttttggcagttgccgcgacaacagtcacttccgggaaggggctctgcgaatctccttccgtcggtccgctcagaatcagctgtcctctcagactgtgtgggtggtttccccggccgcagctccgtacgggcttggattgctgggcctcggtgcaccccagcctcccccactcgggttctgagcttgagctggcggctctttaactctgcttcactgttgctcttggcaacatccacttccgggagcgagtgccgtttcccccgctcaccgcgggctagggagcgtgggattccggactgtgagcggctgttagtgcgtcgcagctgctggcgatccggcgaccctcggccggcaggacccgcgggccacgcagccggggccttctcaacgcctcagtacctcggcgggaccgccatggttctgctgcacgtgaagcggggcgacgagagccagttcctgctgcaggcgcctgggagtaccgagctggaggagctcacggtgcaggtggcccgggtctataatgggcggctcaaggtgcagcgcctctgctcagaaatggaagaattagccgaacatggcatatttctccctcctaatatgcaaggactgaccgatgatcagattgaagaattgaaattgaaggatgaatggggtgaaaaatgcgtacccagcggaggtgcagtgtttaaaaaggatgatattggacgaaggaatgggcaagctccaaatgagaagatgaagcaagtgttaaagaagactatagaagaagccaaagcaataatatctaagaaacaagtggaagccggtgtctgtgttaccatggagatggtgaaagatgccttggaccagcttcgaggcgcggtgatgattgtttaccccatggggttgccaccgtatgatcccatccgcatggagtttgaaaataaggaagacttgtcgggaacacaggcagggctcaacgtcatttaaagaggcagaggcgcagctgtggtgggcagccaaggagctgagaagaacgaagaagctttcagactacgtggggaagaatgaaaaaacaaaattatcgccaagatacagcaaaggggacagggagctccagcccgagagcctaattattagcagtngaggagcagaagcagnnctgatgctgtactanccacagaaagacaagaggagcttcaaggtngcaggggncagatgggctttctgcangtgctggcncccacccatagccngcgggcaatacctgagactgctcgggaacacagagcagggctcaacgtcattaaagaggcagaggcgcagctgtcgtgggcagccaaggagctgacgaagaacgaacaagctgtcacactacgtgggaaacaatgaaaaaaccaaaattatcgccaagattcagcaaaggggacagggagctccagcccgagagcctattattagcagtgaggagcagaagcagctgatgctgtactatcacagaagacaagaggagctcaagagattggaagaaaatgatgatgatgcctatttaaactcaccatgggcggataacactgctttgaaaagacattttcatggagtgaaagacataaagtggagaccaagatgaagttcaccagctgatgacacttccaaagagattagctcacctttctcctaggcaattataatttaannnnnnnnnnnnggccacttactgccctctgtaaaagatgttaacatttctagttttcttttagtgtgaatttttaaaatagcagttattcaaggttttagaacttaataaatacctagtcaaaa

SEQ ID NO: 348768 - DNA, 314 bp, Homo Sapiens
tatccacggctcatttgagatcttctcagctccttggctgcccaccacagcagcgcctctgctcagaaatggaagaattagccgaacatgggtatttctccctcctaatatgcaaggactgaccgatgatcagattgaagaattgaaattgaaggatgaatggggtgaaaaatgcgtacccagcggaggtgcagtgtttaaaaaggatgatattggacgaaggaatgggcaagctccaaatgagaagatgaagcaagtgttaaagaagactatagaagaagccaaagcaatgatatctaagaaactgaaatgag

SEQ ID NO: 348769 - DNA, 466 bp, Homo Sapiens
  misc_feature (278)..(400): n is a, c, g, or t
cacactattcaaaagcgtagactattttttcgcatgttcaagatatttgttttggtcttatgtgtgtgtgagagagagagatccctttgacattaaggagcatcaatgagaaaagatgatgaggcaggaattaataaagaaatgaagtcgtgtgtgtttggttgcctgtcagagggcacacaatttcataaacaccatgcctggacaatttgatattaatatttaacacctctgcatcttttcttaaaaaagaatatgggccagatacagtggctcannnnnnnnnnnnnnnnnnnnnnnnnnnnnnnnnnnnnnnnnnnnnnnnnnnnnnnnnnnnnnnnnnnnnnnnnnnnnnnnnnnnnnnnnnnnnnnnnnnnnnnnnnnnnnnnnnnnnnnnnnncatgatggcacattcctgtagtcctagctactcaggaggctaaggtaggaggattgcctgagccca

SEQ ID NO: 348770 - DNA, 756 bp, Homo Sapiens
aatctatccaagattcccaatttacctctgtttctcttcccattcattcttacatgcctttattcaaaaactactgaatgtcttttattccctgaactggcttaagtacattaaagccccttaattactagtgcattgctgagttggcaggctatcacaaggaatgaaatcttaatggagtccacctatctgattttccttgcctctgcccatatacttagcctgacacctgttttgggagtgtttttatcttgttagtaggtgtgcatttaagctggtaaaacattgagatggctaaggccgatagtggcgtcacatgtggtacattagatccaaaagaaagcaataaaagcattttgtcatttttggagaagatctagaatatgttagagtagctatcagccccaagggagacagtaatttaggctcctggtgcttgactcttaaaaagtagcttaatcatgaacagaagaaaatgatctgaagatcagatcctcagagccaatgtttcaactgtgttcctcagacatgcctcagaggccagttctacattgcaggtgggaggaggggctgagggagggagtcaatgaatgaaaacattttttccacttttagtttttcttaagtcttcctctgccacaataggaaatgaatagatactgtttaaaattgattaatcaagaagtagcatggtaaacatagtattttaaaagtggatataagaagaaaatgtgtagaaacctagaagaaaatgct

SEQ ID NO: 348771 - DNA, 490 bp, Homo Sapiens
  misc_feature (48)..(73): n is a, c, g, or t
cccactgcaatccagcctggtgacagagtgagactctgtatcaaaagnnnnnnnnnnnnnnnnnnnnnnnnnntatatgatgaaaaacataattagaaagccgaatagtactattcagtttccttataaggaaataacttttactcagatctttttcttaaagtaatttttaaacttgagtcagtcaactgagactatgcaagctgcagagggctcatgtagggagtgtataataaataacttctggagttctggtataatattatctcttgatcttgatgctaacagtgttttcatgtgaaaaattcatcaaattatacacttatgattcatgtacttttctgtgggtatgttatacttgaataaggtttgcacaaaataaaatacaagtaaatattaaaacacataatttagaagaaaacaaaagaatattatcatgattttttggtaggtgaagactttttatcagggcacaaaatctgagagccat

SEQ ID NO: 348772 - DNA, 1394 bp, Homo Sapiens
ttcccgtacccttcaagttgactccgccggtacgcagcctccgcaaagttgccaggattacatggcattgaagccaccgtggtcccagcgctactttcttgaacttactaaaacaattatacaaatcaaaaaacctcatggtcatataatgaaatcctgcatacactcaagtctgctatgaatgcataaggccaaactggaaagtgggcatttgaacaaccctcttcctgctcccttcccctaactaagatgggcttctgggcctatcaaccattctttggtaaagtgcagcaattccccataggctctttaacaacagcattggtgtttgaggttgcatctttaaaacatctatttcaggattaggaagcttctggaaccataactttaacccagccttccataacagtctttttactttctattacagaacatgacactgcaataatagcaatgaaccgcttcagctttttcacttctgcagaagctaaaacaacttctccaatatataaaggggctggaaagctaatttcctgggaaagaaatacacagcctggccccggcattttagttcctaggagagctgagataagtccgttgatcaaaactccatgtacaattgtatttccaaacttggtgtgttttgcaaagtcttcattcaaatgcaaaggattgacatcccctgttaattctgagaaggtagccacatcagtctgtgtgaaggccctcctaagttcagcgcggtctccaactttgatgtgcatatgctgaaagtgctgcagggtcagcactggcaggttcagacagactgtcctccgaagcccaccccaccaaaggtgatggctggaaattagtgggaacatcttcagcaccctcaaatttcatcaagagcttttagcctgcttcagtcttcaaacatgcaggcaccaaaaaataaatatgagagtggatgaacgtttccaaaatggaagactattcattcaatccaatactagttccctactattaccagataatgcaagaagaaatggagaaacctgaatcacccggaaagcacatttttttgcctttataggatcctaacagggtcaaagagctccacaatttgacaagaccactgctacatattctcaagatggctgacaaggtcttctcttcataggttaggatgtccaaaggtaaggcggcatcaacctccccaaacaggtccttcacagccgaaataagcagctgtttgaactgtgcagcattcagtccaactccacaatcttgaaattctctcgcgccgggcgcatggagagcgctcaggacacggtcccgaagtctcgcccgggcctctcggccacgttctgcggccgagaccctacgcggcgccgtacagaggccctcccgct

SEQ ID NO: 348773 - DNA, 1125 bp, Homo Sapiens
agcgggctcgtggggcgggacgaggagaagccaaacgtaaagacaccaggagtttctcgggcccagctgtggctgctgccggggagccccaagccttggcgggtccttgcggcgaataggagtctggtcaggcgtcaggctagtccgacgaagagtgggtaggtggaagccttccaaagagcggcggttgtctgggagccgtctcagttggccgcgacccgggcgcatgcgcggggcgggcggtgcgccttgggtagcttgtcctctccgatccctgggcgctgagggcctctgtacaggctgccgacgtagggtctcggccgcagaacgtggccgagaggcccgggcgagacttcgggaccgtgtcctgagcgctctccatgcgcccggcgcgaggtgtgatcagcactggaaaagatgcctgcccctgctgccacatatgaaagagtagtttacaaaaacccttccgagtaccactacatgaaagtctgcctagaatttcaagattgtggagttggactgaatgctgcacagttcaaacagctgcttatttcggctgtgaaggacctgtttggggaggttgatgccgccttacctttggacatcctaacctatgaagagaagaccttgtcaggccatcttgagaatatgtagcagtggtcttgtcaaattgtggagcctctttgaccctgttaggatcctataaaggccaaaaaatgtgctttccgggtgattcaggtttctccatttcttcttgcattatctggtaatagtagggaactagtattggattgaatgaatagtcttccattttggaaacgttcatccactctcatatttatattgtggtgcctgcatgtttgaagactgaagcaggctaaaagctcttgatgaaacttgagggtgctgaagatgttcccactaatttccagccatcacctttggtgggggtgggcttcggaggacagtctgtctgaacctgccagttgctgaccctgcagcactttcagcatatgcacatcaaaagtggagaaccggctgaaccttaggaggggccttcaacacagactgatgtggctacttctcagaattaacaggggatgtccatcctttgcattgactgaa

SEQ ID NO: 348774 - DNA, 2157 bp, Homo Sapiens
ggaagctagtagcggagccggaagtgaggcaccctcgggctcgagacagcggcgacgtttaaagctgagcgacccagtgccactggagacggtcagcttctccactcaggctcctccagcccgagccagaagaccccctcccccagaattctgggggccgatggaagggagccgagtcagatcgcgaggtacccagagccgacagaccggagcgacagggagttgccagaagccccgcccctaggagtgatcggaaagcctcacccatccgggtgaggaacccggagggaccgcctccgggcggagcccgccgaccatggctacgcccctggtggcgggtcccgcagctctacgcttcgccgccgcggctagctggcaggttgtgcgcggacgctgcgtggaacattttccgcgagtactggagtttctgcgatctctgcgcgctgttgcccctggcttggttcgctaccggcaccacgaacgcctttgtatgggcctaaaggccaaggtggtggtggagctgatcctgcagggccggccttgggcccaagtcctgaaagccctgaatcaccactttccagaatctggacctatagtgcgggatcccaaggctacaaagcaggatctgaggaagattttggaggcacaggaaactttttaccagcaggtgaagcagctgtcagaggctcctgtggatttggcctcgaagctgcaggaacttgaacaagagtatggggaaccctttctggctgccatggaaaagctgctttttgagtacttgtgtcagctggagaaagcactgcctacaccgcaggcacagcagcttcaggatgtgctgagttggatgcagcctggagtctctatcacctcttctcttgcctggagacaatatggtgtggacatggggtggctgcttccagagtgctctgttactgactcagtgaacctggctgagcccatggaacagaatcctcctcagcaacaaagactagcactccacaatcccctgccaaaagccaagcctggcacacatcttcctcagggaccatcttcaaggacgcacccagaacctctagctggccgacacttcaatctggcccctctaggccgacgaagagttcagtcccaatgggcctccactaggggaggccataaggagcgccccacagtcatgctgtttccctttaggaatctcggctcaccaacccaggtcatatctaagcctgagagcaaggaagaacatgcgatatacacagcagacctagccatgggcacaagagcagcctccactgggaagtctaagagtccatgccagaccctggggggaagggctctgaaggagaacccagttgacttgcctgccacagagcaaaaggagtgagtggaacagagttgcttcttactaggagcacattctttgcctgccttcccttcatcctatcctctttgcttgctctcacctcaggaattgcttggattgctacatggaccccctgagactatcattattacctcctagggccaggaagccaggtaggtagtctgagtcaggattggatcaacagcctcctctcttggggactctcaagagcctgtgttcatctagaagtagtagtttgattctggtttccctcctacagtgtgtcctccgtctctgtgcagctccgtcattaccataggggacttggttttagactctgatgaggaagaaaatggccagggggaaggaaaggtgagtgggaaggagcagaaagctgggaaaggggatgggtagaacaagactgagaaatccacatgcttcagaattcagagggttcagggaatggtttcggatagtaggctctccctgctcccttctctacaggaatctctggaaaactatcagaagacaaagtttgacaccttgatacccactctctgtgaatacctacccccttctggccacggtgccatacctgtttcttcctgtgactgtagagacagttctagacctttgtgatagaactaaaatgctctctgtactctagtctcctgcctcctcagctctgcaagtagtttagtaggaatgaagtggaagtccaggcttggattgcctaactacactgctaaaaatatttgtaatccttaataattaaactttggatttgttaaaaaaaa

SEQ ID NO: 348775 - DNA, 726 bp, Homo Sapiens
aaaaggttaaatttttccgggaaaaagggaaaaaggggggattgataaaaagcaagtgaggtggtcggtttttggggtccttgatttttcttaaaaccaacatatggttgagggactaaccattagacacctgtgtgtagtggcctctgattgcttggggttgaaataagctgtctcttcaatcattgcatgcattttttagtatataggtactctagcaaaatatgtattcttttagaatgcacacatttttagtttacatacatagcatggtattatatatcacattctgttctgtactttccattgaccattatgactttaaaatcaatttacattgcaatgcataattgaatctgcagcatctacctgctccacaatctccataaagcgcatcctttacattgtacctatttgttctccaagagatgaaggggtttccaggttccctccaattcctcaccagcaaaaaagatgctaagatgaacatcctcttacatatctcctgatggacctgcacacatcaatttccaggcatataaaaacaaactttaacaaagagaaatctattggggtttcaaattttctgtgtctcttagaaacactgaaaagtcgatttatgataaccttatggaaaatgtagcttactccttgaaataattggtattaatagaattcacccattctcccctgtagcactttctagagtcagaacctgatttaaac

SEQ ID NO: 348776 - DNA, 280 bp, Homo Sapiens
cctctgggaaagagacatttttactgagtcagatgggggaaagacagatgtctttatatttttttaacaagccacttttcccataacatgcacttggaatctctcctaagttccagaggcccccactgttccagttccaagccttcattttggagtctgtttgggaacttttaagacttcaaagcaaagttagctaccagcaatttctgtaaaccaagagaagattgtcacaaagattcactactttccaactgaagctatgcagtagaaaaatcattag

SEQ ID NO: 348777 - DNA, 389 bp, Homo Sapiens
  misc_feature (186)..(240): n is a, c, g, or t
cggctccgagaagacgacagaagggtacggctgcgagaagacgacagaaggggatcctagagagtaccctgtttcctgcaccctaacactaggtatcatcacttatcaaatctttcccaatttggtagctgggataatagtatgtcaatgttattttaactttctttgattcttcgcgaataacannnnnnnnnnnnnnnnnnnnnnnnnnnnnnnnnnnnnnnnnnnnnnnnnnnnnnnttgatattggtatgtttattatcaatttgtaattttattaagaatattatttttgtcaagaaatgctgcaaatatgctttccaagtgctttgctttcaaattttgtttatggtgctttttgacatacataaattcttaattctgcaatt

SEQ ID NO: 348778 - DNA, 1187 bp, Homo Sapiens
  misc_feature (7)..(7): n is a, c, g, or t
  misc_feature (125)..(179): n is a, c, g, or t
  misc_feature (360)..(360): n is a, c, g, or t
  misc_feature (625)..(625): n is a, c, g, or t
  misc_feature (632)..(632): n is a, c, g, or t
  misc_feature (678)..(679): n is a, c, g, or t
  misc_feature (681)..(681): n is a, c, g, or t
  misc_feature (683)..(683): n is a, c, g, or t
gtatgtnaaaagcccataaacaaaatttgagagcaagcacttggaaagcatatttgcagcatttcttgacaaaaataatattcttaataaaattacaaattgataataaacataccaatatcaannnnnnnnnnnnnnnnnnnnnnnnnnnnnnnnnnnnnnnnnnnnnnnnnnnnnnntgttattcgcgaagaatcaaagaaagttaaaataacattgacatactattatcccagctaccaaattgggaaagatttgataagtgatgatacctagtgttagggtgcaggaaacagggtactctctaggatccaaataggagagcgttttggtacaaactttctggagggtggttggcancacgatgtatcaaaattcttaaaaatagccaagcaagtctcttcttggagtttatcctaaggaaatcgttatagacatgtgcaaaatttagctacaagaatgtcagttgcaacactatttacaatgaagattgggaacaaatgaaataatcactatttgaggattgatgataaaaaaagggtccatccatacaatgaagatgctgttgagaaagtttgatatgccgaaaatgttcgtgatattattaagtgaaggaacagaaggngcaaaanacaaaaagtgtccaatatgctgccatttgtgtgtgataaaagaatnngngnatatgtttgacaatgtgtaagcatctccactaggatgcaaaataaattagagggaaactagatgctggcagacggggtagggacaacattaacttataactacagaacagatttgaactttttaaattctgaatctgtgtaggatcacatattctaaaatataaatacacacttgaaaagttattaaagagtatattcagtgtatccagtttatgtttaaaaaaatccacaactgtgtgtgcgtgtgtacatttacaccaaaaagaactaaaaggtatattcaaaagaatacacgtttgtcttgggtggtaagcttatggattggattttgtcctttttttcctaaaacttctgcaatacacacatgatgctttcgcaataattaaaaagcgttagtttttcccccaaagagtccatcgcaaaagtccaggcaggggatgacagtgcaggtcagatgcctgattagtactccagctacataggtcagcagtgtcatccgcaacg

SEQ ID NO: 348779 - DNA, 1261 bp, Homo Sapiens
  misc_feature (202)..(204): n is a, c, g, or t
  misc_feature (228)..(230): n is a, c, g, or t
  misc_feature (234)..(251): n is a, c, g, or t
  misc_feature (282)..(282): n is a, c, g, or t
aaggctttcaacgggggctacaggaaggtgctagaaatattgaggggcctgccattactcacctagagctcactctctggagaagaggaaaaggaagaagctatttcagctgccacattctccccaatccctactatattatgctgtctttcctcttcctcctagctggctttacatgaccctaacccaaaactaccctatnnncccacacgggaatgtgttcaaacnnnccgnnnnnnnnnnnnnnnnnnattcccaagcctccaacttagaacgtttgtnatttggcagatggtttgttaggatctgaaggatgaagagaagggtagaggtcacctggagaatgagttcaaactgccagggtcttcccttggtctttgtgcgtcaggaaggactccgagtaattattccctatgcagagacaggagagaggtcttgtttacatgagtgtgctggggcagggctggacaatccaggatatgattgtagccatcccatgtagaaagatcaaaaaccagaacgaaatgaagacagcctctcagaacctcatagaacaagcgtccaggtcatctgcttgtttggtgacttagatatacaggcttactggaactccattcactgtgacctgaagttaaataatcccaaagagaaaaagctacctggggtattggttgatgtttggggtgatagggctgaattttctgtgcatttgtccaacaaaggctttagagcacaaaaccaggttcattctccctaccaaatcttcagcttccttctcctcatccctccccaaaacaagaactgtgatttaattccgtacgttgcggatgtcactgctgacctatgtagctggagtactaatcaggcatctgacctgcactgtcatcccctgcctggacttttgcgatggactcttcgggggaaaaactaacgctttttaattattgtgaaagcatcatgtgtgtattgtagaagttttaggaaaaaaaggacaaaatccaatccataagcttaccacccaagacaaacgtgtattcttttgaatataccttttagttctttttggtgtaaatgtacacacgcacacacagttgtgggatttttttaaacaaaaactgggatacactggaatatactctttaataacttttccaagtgtgtatttataattttaggatatggtaatccctacacgggtaccaaatttccaaaaggtaccaactgctccgttggtcggaggtaatcttctccctaccccgtt

SEQ ID NO: 348780 - DNA, 367 bp, Homo Sapiens
tgcaggtgtgattcatggcacccagactttgctgcctttcttacatgatccaggcccagaacccaaactcaggcactgtatagatgaccactttcgtaaactactgacctagcttgttgccaattgttgattgaacttcccataactccacttcgtgtctgttcctctgtatacagccaccttctgttcccgtcatgagcctttaggtctccatttgcatattgcaaatactatgttccatgtaggtagctcattcagggccttgctcttcacttcaaaaaaggttcccttgaggactggctgtcaatttgtgttgctgtgttggttgttgatgaaaataataaaatgattgattacataaaaaaaa

SEQ ID NO: 348781 - DNA, 563 bp, Homo Sapiens
cagcacacaggcaccaaggaactgtccggaactaacagcaagggccggcgatgggagtcaaacccaggcacgcggcctggcctgcatgctgagccacatggtgctgtccggacagatggacagacactcggtggagtctgcctttctcaggccctaaaccctctccaaagggtacttgcgatgccggatttaaaacttgctcagagccacttagccacttgagaaccagacagtaaggtgttactcccaggtttgtttttccaaagtaacagatgacatgtggaataaagtaatagagtaacaagtggcagggccagaaccagggtccccaaagtcctggtgttggcacatttgtacttcttgtaagaccatctttaatttttctgggaacacacctgccttttgtgtaatgcggggaagactaatgcatggtgacacctagttttcctcaacaggacacttgatcccaaaacccctttaagaccttaggtttcctcagcggaaaactgtactttaatcccaaaccccctttaagacatattggggctgggcgcagtggctca

SEQ ID NO: 348782 - DNA, 1078 bp, Homo Sapiens
  misc_feature (51)..(87): n is a, c, g, or t
  misc_feature (515)..(515): n is a, c, g, or t
ttgtatacgactcactatagggcgacctgggattcaacgcggtggcggcgnnnnnnnnnnnnnnnnnnnnnnnnnnnnnnnnnnnnnatcaggccaaatcggccgagctcgaattcgtcgagagcgggttgatcgccgcgctcgccccggccacggcgccgcccctgttctcccggccccgctccaccggggctgacggactgacggccaacacagccggctccgggatgagcgcacggacggtattctgaagtctcaggaaactggaccatttaaatgtgcatggcccatgagaaaggcttataagaagccatggcactcccctttcaaaaagagctggagaaatacaagaacattgatgaagatgagcttcttggcaaactctcagaagaggaactgaaacagttggaaaatgttctagatgacctagatcctgagagtgccatgctgccagctggattttgacagaaagaccagacacagaaggcagccaccggcccctttgaccgcgagcncctcctcatgtatgctgccagctggatttcgacagaaagaccagacacagaaggcagccaccggcccctttgaccgcgagcacctcctcatgtacctggagaaggaggctttggaacagaaagacagagaggactttgtgcccttcactggagaaaagaaagggagagtctttatccctaaagaaaagcctatagaaactcgtaaagaagaaaaagtgacccttgacccagaactggaagaagctttggccagtgcctctgacaccgaactctatgatcttgcagctgtccttggagtacacaatttgctcaacaatccaaagttcgatgaagaaacagccaacaataaaggtggcaaaggacctgtcagaaatgttgtcaaaggtgaaaaagtaaagccagtatttgaggaaccaccaaatcccacaaatgtggaaataagcctgcagcagatgaaagccaatgatcctagcttgcaagaagtcaacctcaacaacattaagaacattccaattccaaacttgtaaaaaagtaacctcgccagcgcacgtctgggatcctct

SEQ ID NO: 348783 - DNA, 1194 bp, Homo Sapiens
  misc_feature (946)..(956): n is a, c, g, or t
  misc_feature (1134)..(1146): n is a, c, g, or t
gcaaccaaccccaacaacaaaaaagaatgttttggtattggagaagggatggtcagttagcctgtctgtcacacgacggaatggatactgggcccggggaccactttcatactcacgtcctcatccttggatacccaggggagggcgaaccgttttcgctcgtgtgtctgtacgcagcatgttgggatcgggagtttcggcacagactatcccatcaagccgttggctcctttcagctactacgttaccacgttcctaaaacgcaagctctccggaccagacggacacagggagaagctagtttctttcatgtgattgaaatgatgactctactcctaaaagggaaaaaacaatatccttgtttacagaagagaaaaaaacaacccccactcagctcagtcacaggagagaacacagaaagtcttaggatcatgaactctgaaaaaaagagaaaccttatctttgctttgtggttcctttaaacacactcacacacacttggtcagagatgctgtgcttcttggaagcaaggactcaaaggcaaggtgcacgcagaggacgtttgagtctgggatgaagcatgtacgtattatttatatgatggaatttcacgtttttatgtaagcatgaaacacaggcagtatgagagaaagcaaggcccgtcatgctgtccgtacactacgtatgctgtagagccattttgtatgttgtgtaaaacaaaaagcattgatgaaaaagcaaaaggtgatgtatgtatatgagaaaattaattgtacgatatcattccagtacgttttgttgtacattttagtcttgtttactttctcttcattgttaagaggatgcgaactgtacagtttccagctagttacccatattagagaagaaataagagagtattagaagaaaacaggagagaaagaacatttgtgaattgcagttgtcnnnnnnnnnnntagcctagctggcccttatttgtgaagcataattgcttttagcatatggaagtattttttcacattttctttgtataaaatttgtattaaacttaaatatctttttgatggtggtgtttctttgtgactgagccagtagactcacactatatgcttttttgggtttgcccgttccttnnnnnnnnnnnnnagttttttcagatttctttacctttttttaattaaactatttggaaaa

SEQ ID NO: 348784 - DNA, 628 bp, Homo Sapiens
agctgttataaccataaccatttcatagataagaagactgatgtttggagaggttaagtaactttcccaagctacttccacccttgtcactcaggatctatgcctgagcacatcaatccctcctctaaggaatactgatgttcctgtaggtcctctggtgcttccccaagaagggtaacagaagacctggaatagcaaccaattacaggtcagacactgagttctacacgaccagtttggtgctactactggatgccatgttgacaactgatctgcccaccactctctctacaaaaatggtacatggcttgattctactttttactattaatcaatgtatcaattcattgactatgtattatttctttttttgacactctgctagaatcattctaatcaaactcaccctagtagcactccttcagtgttgaagtgtcaaaagtggtgtgatgacaccgtaagaaccttcccccaccaacccctgcagctatccattcatccttagccttgacacttacagttggctccaaaaagttgcattacaaagaaaaattcaacaggctctttggcagatctgttttagtagtgtcaatatatacgccacctttttatagctcttccttatgag

SEQ ID NO: 348785 - DNA, 684 bp, Homo Sapiens
ccttggaaacaaatggactgggaagaaacacagcatggctttgctctgagtttcaatctgatgattatgaccatggaagatagtcttatgtaaaggttaaatggtgtttacaagtggatagataaggcggagatggtgagaagccgggttttctctatgctaaatgtgtctactaagagcagcacttcctactagctaagcacaatcatagccccaccgtgatgagctgctagtctgaataacattccctgacttagggaaaggcacacaaaaacatataaagaatatgtctattttcatatgtgtgatactgacagagccatggtattcctaaaatataggtttctcttttttcttgtattcttagcaaattgcatttattcactacattacaaaccatcactgatgtatccaaaatagcacacatagttcagtatgaaaataagagaataaaatctgttataagcaagtgatttaggtattttcttttgtgtttatgcattatctgactatattaaaacctgtttttctatttaccttctatcagttttctctaccaattatgttttttcaatgctctataagaatgaatatggaaattatatttcttttttctgtaaaagagttgcaactactttattatatttagaaatccaataaacttcttattacatttaaaaaaaa

SEQ ID NO: 348786 - DNA, 2086 bp, Homo Sapiens
  misc_feature (47)..(83): n is a, c, g, or t
  misc_feature (1838)..(1985): n is a, c, g, or t
gatgatacactcactatagggcgactggagttcacgcggggcggcgnnnnnnnnnnnnnnnnnnnnnnnnnnnnnnnnnnnnnatcaggccaaatcggccgagctcgaattcgtcgagagcggactctcgactgctctggaggtagcggccgcggtgaggagagccatgggacgggcagtcaaggttttacagctctttaaaacactgcacaggaccagacaacaagtttttaaaaatgatgccagagcattagaagcagccagaataaagataaatgaagaattcaaaaataataaaagtgaaacttcttctaagaaaatagaagagaactggtccctaggaaagaccttcttgtagaaaatgtgccatattgtgatgcaccaactcagaagcaatgagttttctagaatacaacaagtctttgtactttttaactttaaaatctacaactctggcaaaagtcctggaaatgcagacattttccctgaactggcatattgaaaatgaatgaattaccagaatagccttcatatttaaatttcatgttaaaaggtcattacctgagaactaaagaacataattaagtatttctaaaggaaattagataagaaaacatttcattttcattgaaaatcaaatttcataaagcaaagtaaatgcttagggagatatattcaatctttgaccttgatgagtatttgatcttaccatagctatttgagaatgtggtgcttttacaaattggtgagttttcctgccatgtgaaatgcaattattacatttaaattgttagattaaaatgatatttagtcctgaaaaatattaaattggtcaaaaaaatcacagtgtatgccagctctctacagaaagtggcctttgttttctaaagcactgggattatttctgtagctaatatataattgtacagtttctttttagagatagagagtatctctgtgttcttatgaagacattttttatcagttttctgaaaatagatgaataaaatattatagtcacctagggtcactatggaataaagaaatcctagtttaaagaggaaatagtggcccttgatcaaactatttaatatggccttagtagaattagctgtatttagacaaagttagactttagtgtgaaatgtaatcggtggctacattctcatcgttttaattaatgaaacttaaatggcttctcttcttccacatgtcctgtccttgacaagatgggcagtatcacaaaaggtcctggcattctaccatctaacactaggaactgtaaaatactgtttaatattcttcttgtttctcttttatctgtgtatctttgccattctattttctcagtgaatagtatgttttctcccattcactgataaattctctcatttgatgatgatacagggtttttaatttttgcaagattctcaatgcaagcattgttatgtatctagaaattatacctagagaaaaatgaaagtcgtttcaaatttgaaatttgcccttttaagagaatgctgaatgtcatcgcagtatataatcactatataaatgtgctgacttacagttattttagtgtctatatgacatattttgaggaaagttggctgacgttatttaaatttaatatatattctatattttagtgttattgaatattttatcactgagcttttttctttaacctgaattccctgttccatttttcattcatattaatttaaataactccagatttctttcttatagtcattattagtagcagatgagattaataattcacatgtttattaaagatagtggcttagaaattttaagatatattgatataggcnnnnnnnnnnnnnnnnnnnnnnnnnnnnnnnnnnnnnnnnnnnnnnnnnnnnnnnnnnnnnnnnnnnnnnnnnnnnnnnnnnnnnnnnnnnnnnnnnnnnnnnnnnnnnnnnnnnnnnnnnnnnnnnnnnnnnnnnnnnnnnnnnnnncggggcgccctggtaattcccaggcttactcgggaaagcctggagggcaaggaaaaatcactttggaaaaccccgggaaggttggaaagttttgccaattg

SEQ ID NO: 348787 - DNA, 887 bp, Homo Sapiens
atcaggccaaatcggccgagctcgaattcgtcgagagcggagtccagtctttgattggttgctgagaggcggggctactcgactgctctggaggtagcggccgcggtgaggagagccatgggacgggcagtcaaggttttacagctctttaaaacactgcacaggaccagacaacaagtttttaaaaatgatgccagagcattagaagcagccagaataaagataaatgaagaattcaaaaataataaaagtgaaacttcttctaagaaaatagaagagctaatgaaaataggttctgatgttgaattattactcagaacatctgttatacaaggtattcacacagaccacaatacactgaaactggtccctaggaaagaccttcttgtagaaaatgtgccatattgtgatgcaccaactcagaagcaatgagttttctagaatacaacaagtctttgtactttttaactttaaaatctacaactctggcaaaagtcctggaaatgcagacattttccctgaactggcatattgaaaatgaatgaattacagaatagcttcatatttaaatttcatgttaaaaggtcattactgagaactaaagaacataattaagtatttctaaaggaaattagataagaaaacatttcgttttcattgaaaatcaaatttcataaagcaaagtaaatgcttagggagatatattcaatctttgaccttgatgagtatttgatcttaccatagctatttgagaatgtggtgcttttacaaattgggtgagttttcctgccatgtgaaatgccattattacatttcaattgttagattaccatgatatttagtcctgacaaatcttcacttggtcaaaaaaatcacagtgtatgcca

SEQ ID NO: 348788 - DNA, 3225 bp, Homo Sapiens
  misc_feature (2135)..(2135): n is a, c, g, or t
  misc_feature (2491)..(2583): n is a, c, g, or t
  misc_feature (2754)..(2763): n is a, c, g, or t
  misc_feature (2929)..(2941): n is a, c, g, or t
ggcagagtgatggggaggagagccctgctgctgaagagcagctcttgggagagcacattaaagaggaaaaagaagaatctgaatttctaccctcatctggaggaacatttaatatctctgtcagtggggacattgatggtttaattactcaggctttgctgacgggcaattttgagagtgctgttgacctttgtttacatgataaccgcatggccgatgccattatattggccatagcaggtggacaagaactcttggctcgaacccagaaaaaatacttcgcaaaatcccaaagcaaaattaccaggctcatcactgcagtggtgatgaagaactggaaagagattgttgagtcttgtgatcttaaaaattggagagaggctttagctgcagtattgacttatgcaaagccggatgaattttcagccctttgtgatcttttgggaaccaggcttgaaaatgaaggagatagcctcctgcagactcaagcatgtctctgctatatttgtgcagggaatgtagagaaattagttgcatgttggactaaagctcaagatggaagccaccctttgtcacttcaggatctgattgagaaagttgtcatcctgcgaaaagctgtgcaactcactcaagccatggacactagtactgtaggagttctcttggctgcgaagatgagtcagtatgccaatttgttggcagctcagggcagtattgctgcagccttggcttttcttcctgacaacaccaaccagccaaatatcatgcagcttcgtgacagactttgtagagcacaaggagagcctgtagcaggacatgaatcacctaaaattccgtacgagaaacagcagctccccaagggcaggcctggaccagttgctggccaccaccagatgccaagagttcaaactcaacaatattatccccatggagaaaatcctccacctccgggtttcataatgcatggaaatgttaatccaaatgctgctggtcagcttcccacatctccaggtcatatgcacacccaggtaccaccttatccacagccacagccttatcaaccagcccagccgtatcccttcggaacaggggggtcagcaatgtatcgacctcagcagcctgttgctcctcctacttcaaacgcttaccctaacaccccttacatatcttctgcttcttcctatactgggcagtctcagctgtacgcagcacagcaccaggcctcttcacctacctccagccctgctacttctttccctccatcccccttcctctggagcatccttccagcatggcggaccaggagctccaccatcatcttcagcttatgcactgcctcctggaacaacaggtcagcttgcatgctcctggaaaacaggtcctcagaatggttggaatgaccctccagctttgaacagagtacccaaaaagaagaagatgcctgaaaacttcatgcctcctgttcccatcacatcaccaatcatgaacccgttgggtgacccccagtcacaaatgctgcagcaacagccttcagctccagtaccactgtcaagccagtcttcattcccacagccacatcttccaggtggccagcccttccatggcgtacagcaacctcttggtcaaacaggcatgccaccatctttttcaaagcccaatattgaaggtgccccaggggctcctattggaaataccttccagcatgtgcagtctttgccaacaaaaaaaattaccaagaaacctattccagatgagcacctcattctaaagaccacatttgaggatcttattcagcgctgcctttcttcagcaacagaccctcaaaccaagaggaagctagatgatgccagcaaacgtttggagtttctgtatgataaacttagggaacagacactttcaccaacaatcaccagtggtttacacaacattgcaaggagcattgaaactcgaaactactcagaaggattgaccatgcatacccacatagttagcaccagcaacttcagtgagacctctgctttcatgccagttctcaaagttgttctcacccaggccaataagctgggtgtctaaaaggacagcttctcttccactcaatattgccatttttccaaagaaacatgtttaattataanattataagacatggactagtcctcattagcatgtttgcatagcaaccagtcaagagcatttacactatttctgctgatatactcaccttagaactgctcagaaccctggtgctttatttttgttttaatcttttgttgccagtgatgattttcctattctgcaaatagtgtatttcctggattacacatagtatggtttcctgaagtattctgataaatgtgttttttaaaacctcaatatactttttagaaaaggagcatctggttatgcataaagcagagctaaaactaaatttctttcatgtcctccctacttcctcagtgtcaatcagattaaagtgtgtaatcctaaaaannnnnnnnnnnnnnnnnnnnnnnnnnnnnnnnnnnnnnnnnnnnnnnnnnnnnnnnnnnnnnnnnnnnnnnnnnnnnnnnnnnnnnnnnnnnnaaccctgggcggcccccctcgggcctcttaaaaaaatttttcaaaaacctttccttttgggggccccggcccccccaaggggtaaaggggcccttgggccccaatcgtttctcccaagaaaaaaacctcgggctattggaacaacggcggttgggacttccccccccaatnnnnnnnnnnccgccccggggcgggtacacccagggcctgtttcttgataacaaaatccccccaaaaaggggggcctctcttcaggggcctccctttcccggggaagtcccccctcacacgcgggggggtgtttccctgcgggggcggcccttcctattattttaccatcattttnnnnnnnnnnnnntccctcggtgggtcccctatacccttcaccaaaaaaagtggcgtggggggaattcccttatttcgcaccactatatcttctcgcccccccctgttgtgggggaaaaacctttccccttcaaccaccaggcggtgtgtactgtataaagcacaccacatccatatcttcctctgcccccgccgtgcgtataataactacaaacacactggatcctcagggtagcttcatgcgtaaacgaataaataatattttccaccccccctgtgtcggctatgacacaaaca

SEQ ID NO: 348789 - DNA, 542 bp, Homo Sapiens
  misc_feature (67)..(75): n is a, c, g, or t
ggttcctcagccgatcagaccaacttcagcaggctgtgcagtcacaaggatttatcaattattgccnnnnnnnnnttgatgcttctcagactgaatttgagaaaaatgtgtggtcctttttgaaggtaaactttgaggatgattctcgtggaaaataccttgaacttctaggatacagaaaagaagatctaggaaagaagattgctttggccttgaacaaagtggatggagccaatgtgcacattaaagaggaaaaagaagaatctgaatttctaccctcatctggaggaacatttaatatctctgtcagtggggacattgatggtttaattactcaggctttgctgacgggcaattttgagagtgctgttgacctttgtttacatgataaccgcatggccgatgccattatattggccatagcaggtggacaagaactcttggctcgaacccaagaaaaaatacttcgcaaaatcccaaagcaaaattaccaggctcatcactgcagtggtgatgaagaactggaaagagattgttgagtc

SEQ ID NO: 348790 - DNA, 2043 bp, Homo Sapiens
  misc_feature (1409)..(1418): n is a, c, g, or t
  misc_feature (1480)..(1539): n is a, c, g, or t
  misc_feature (1636)..(1636): n is a, c, g, or t
  misc_feature (1667)..(1667): n is a, c, g, or t
  misc_feature (1886)..(1886): n is a, c, g, or t
agcggaagtgttgggcgcagggcgtggctgcggctgcggctgccacgttggaacggaacgtggaggtggccctggccggggaggaggggcggcggcgaatgctgggagagtccgacgagcgctgcactaacgcaggatccggctgccgaaggtcctcgccagcaggatgaagttaaaggaagtagatcgtacagccatgcaggcatggagccctgcccagaatcaccccatttacctagcaacaggaacatctgctcagcaattggatgcaacatttagtacgaatgcttcccttgagatatttgaattagacctctctgatccatccttggatatgaaatcttgtgccacattctcctcttctcacaggtaccacaagttgatttgggggccttataaaatggattccaaaggagatgtctctggagttctgattgcaggtggtgaaaatggaaatattattctctatgatccttctaaaattatagctggagacaaggaagttgtgattgcccagaatgacaagcatactggcccagtgagagccttggatgtgaacattttccagactaatctggtagcttctggtgctaatgaatctgaaatctacatatgggatctaaataattttgcaaccccaatgacaccaggagccaaaacacagccgccagaagatatcagctgcattgcatggaacagacaagttcagcatattttagcatcagccagtcccagtggccgggccactgtatgggatcttaggaaaaatgagccaatcatcaaagtcagtgaccatagtaacagaatgcattgttctggggttggcatggcatcctgatgtttgctactcagataggtccttgcctccgaggatgaccggttaccagtgatccagatgtgggatcttcgatttgcttcctctccacttcgtgtcctggaaaaccatgccagggggattttggcaattgcttggagcatggcagatcctgaattgttactgagctgtggaaaagaagctaaaattctctgctccaatccaaacacaggagaggtgtgatatggaacttccacaccaacacacggtggtgcttcgatattcagcggagtccccgaaatcctgctgacttatacagctgcttcgttcgacgggcgaataacggcctattctatacagcgaggaatcacagatgggtctcagaccgaacctcgatcaacctgctgtttctcatctcgctgcgcatcctttggaacggctaacgggacgaccagaggaccccttccctacactacgccatatatctccctattatgtgtgcgccttgtctctactcaccccagccttacccctcgcacaaacaaacgccgcagtcaagctcggctccgctcccaccaccagacgccgccgtggnnnnnnnnnnaccctccaccctcccctggacacattcctcctatggcccttatgcgcccagttgtatgcagnnnnnnnnnnnnnnnnnnnnnnnnnnnnnnnnnnnnnnnnnnnnnnnnnnnnnnnnnnnntctctcgccgcctacaagccgctgtcggccccgtgaaaacctctccacacaaaccgactttgacgcacctactcatattgcttatctacatcccctnatgttctactcccatctaatccaacataaantagatatgaagcacccaccccgcgcgcccacccatccgcctccttcttctgcgcacctcgtaccgaaccgaccccactgcaacccgcgcgactctatcacctacgtgtaacgtgattccggccactcctagatcgccgtggcaacagcgagcgatcctctctccacgccgtccagtgtatctcgcgcccccactttcacaacgcggccgtggatcacgntcctcacgactaaggtcctcgcgtcaactctcgcaccgccgtcccatatctataaatttactcctctgagcattacgccacatcatcgagcgcttaattacgttgcctcgcctgctcgtgcactccgcgccctccgcgttcaggtgtagtacgacgt

SEQ ID NO: 348791 - DNA, 635 bp, Homo Sapiens
  misc_feature (334)..(369): n is a, c, g, or t
ctttgcatctgtcgttcccttggcctggaaggctttttccttcttgatgaagttaattcctgcttgtccttcagatcacgtgtcaaaagtctacatgcttgggcagtttttcctgatccatctgaccaggtcacacctttctattaaaggttctgatagcaccttatatttttccttctcagcactttatgaaatatgttgtcagttgtttttgttgttgctgttgtttcttgaggaacaataataccattattatgtcatttgattcaaaaatatacttcattttgctgctgcatttggcatgaaatacttgacacaattaattagtcagaannnnnnnnnnnnnnnnnnnnnnnnnnnnnnnnnnnntcctttgttttcgtttctcaagctcatcactgcagtggtgatgaagaactggaaagagattgttgagtcttgtgatcttaaaaattggagagaggctttagctgcagtattgacttatgcaaagccggatgaattttcagccctttgtggtaagagatgtgctttatatttaactgcatttacatacgtggcagggtatattgtaaataaacttaaatgacaaattttattagaaactttttaaaatctacaaatcacaaaaaaaa

SEQ ID NO: 348792 - DNA, 771 bp, Homo Sapiens
  misc_feature (709)..(709): n is a, c, g, or t
tgtaggaggggggccctcccctgcccagcctgcaggtaaagtgctggaccctcggggtcctccacctgagtaccccttcaagaccaagcaaatgatgtccccagtcagcaagacccaggagcacggacttttttatggtgaccagcaccccgggatgctccacgagatggtcaagccctaccctgctcctcagcctgtgagaacagatgtggccgtctgcggtaccagccaccccctgagtatggggtaacgagccgcccatgccaacttccgttcccatcaaccatgcagcagcacagccccatgtcctcccagacctcttccgccagcgggccactgcactctgtctccctgccgcttccactcccgatggccctgggtgctccacagcccccgcctgccgcctcccccagccagcagcttggtccagatgcctttgcgattgtggagcgagcccagcaaatggtggagatattaacagaggagaaccgggtgcttcaccaggaacttcagggttactacgacaatgccgacaagctccacaagtttgaaaaagaacttcagagaatttcggaagcctatgaaagtctggtcaagtctaccaccaagcgagaatcgctggacaaggccatgagaaacaaattggaaggcgagattagaagacttcatgatttcaacagagacctccgagatcgactagagactgctnacaggcaactatccagcagggaatacgaagggcatgaagacaaagctgcagaggggcattat

SEQ ID NO: 348793 - DNA, 1076 bp, Homo Sapiens
aaaaaaatggctagaaacattatttatacagggttgattgctttcatgttgttattctgtaccctatagtagcctccatgagaatctggtatttcttgctgcttggaactactttgcagtgattacttggttgcagtccaagtactctcgtttagtctgagcctggagatgttctagacttgcttctcccacctctgagattaggacaggaaaaatgtgaaatttcccaattacaggattatacggtaccatcacatcatttgtggaaattggggtgactgtatagctgggattgggctaaggactgtggtcttatctgtccacatacagccaaaatgcctatccagaaatccagttcgttggaaaggaaaattggtactcctgtgccacaggggttccagaaaagggaagtcactttaccttgcggtggtgggatcctgatgtctttcatccatttgtagtaaaagctggtaaagcttttcttactcctggttccctaccagtatttctaaacatgtcgcactttctccacaggcatgtggttttgacctttttttcaatcttctagaaagggaacggaagcagaagtgggacatcgagggctctgctgtcctctgcgctgggtgtggaatgctgctgcacctgtcccttctgctggctcagggaagtgtcttcttgcccacatttctgtggggaaaggtttttaatcctctgatgcttccatcttcctgtttaggccatgtgcccagaaacctggactgatctttctttaatagtgaacccctgggccactgaagagtaacatggctccactggacacaaaagagggatggaatcaacaggcagggggccttttataagccttaggaaaagaaaatgaaactatttcatctttggacttttcaatactattggagtgatttttttctttctaaacagggaaaataatgttacaaaagcatcttttttgttatttgtttgcatccctcccccacaccctggtgttttaaaatgaagaaaaaaaaccatcaccttttgtacaaaaactcttaatgattaaaaaacaaacaaaacat

SEQ ID NO: 348794 - DNA, 428 bp, Homo Sapiens
  misc_feature (154)..(180): n is a, c, g, or t
  misc_feature (372)..(373): n is a, c, g, or t
  misc_feature (377)..(377): n is a, c, g, or t
  misc_feature (384)..(385): n is a, c, g, or t
  misc_feature (397)..(398): n is a, c, g, or t
agtccaaaagccaaaaatatttatcttggttttacattttaatttccattcttaattgtaatttttttctttaaataaggaaaccaatataatctcatgtataaaaacttaaatattttacaagttacatatagcatcattctaaaataagaannnnnnnnnnnnnnnnnnnnnnnnnnncttatgtctcttgttgagttttatattttcagtggttatttttgcttgtgttagatcattattaaaatatatccaatgtccctttgatacttgtgctctgctgagaatgtacggtttgcattaaacatcccaggtcccatcccttcaggaattttgcagttcaatgagaagagggagacaaatataaagatnngganagaagcnnctctacagatgnnaattacataaataaaacattctccatcaac

SEQ ID NO: 348795 - DNA, 696 bp, Homo Sapiens
  misc_feature (77)..(77): n is a, c, g, or t
  misc_feature (108)..(108): n is a, c, g, or t
  misc_feature (112)..(112): n is a, c, g, or t
  misc_feature (621)..(621): n is a, c, g, or t
acacggattctgggagggctgcctatcttagcgagtgagggaggagtggagcatgggggtctctccatttctccccnggggagagagatggtagagctcctggttggnaggnaggaccgctggggttgtggacagcgataaaagagggctctctttcccctaggcgagactttttccccccaacacccacctgggagggagggcgagacccgaggtcagacgcccctggagcaggtgagcactgcgagggaactgagatgaaagatcctcctgcctgaactcacaccccgcgtgctgctcccccaaactcgcctcttggaatctcagaccagaagcttcctttcctcaaaatccttctatgttctccaacggtctttgggacagagctccttggcagggtttacaaagcttaggtggccctacccacttctccagcctcatctgctgcctcacccctataccacagctctgcacctttgctgaaactggtactcggcgcttggggtgtcctcatctttcccctacctatggcagcctgcccgaagagtgcctgctccttcaggtccgctctcggcttagccccttcttggaacgtccccgcacctcaccgccgacgccttncaggggcagaccctggcagccttccctcgtcctcagcagccattacgtgttgctgtcataaagttatcactctgt

SEQ ID NO: 348796 - DNA, 491 bp, Homo Sapiens
  misc_feature (377)..(425): n is a, c, g, or t
catcataatactgcactatcctggttcttctcttacctggctgatcactccttatttgctgttatttttgttctcttaaccatacattccccaatgtttaaagggtggtattttgagaaagttaatgggttttgtaagtgccagctctttatataagcaggtagactagctttttcccagcagacgcttgtctgtttagacttccttaaaataattatcttcaaataaagcaaaatctccatacaccacatagtattgaattgttataactacgtgttaagaagaatgttgagtaaacaagatagcttccataagagggtgattaatatagtgagaattctagaaaccagatcataggaagaatgattgaaagaatnnnnnnnnnnnnnnnnnnnnnnnnnnnnnnnnnnnnnnnnnnnnnnnnnacttctattgtttatagagatatttattgagaacttactctgtacctgctactgcctgcggtaagc

SEQ ID NO: 348797 - DNA, 847 bp, Homo Sapiens
gagtcagagcgccccactcatctccctcctgctgagctgcgaaccagcaccctccgagacaagcgtgtttgcagtgccagctctgcccttgctggactccaagtctcctctctgggcagccaggacccacccatgggacagccctatttagcttctgctctgggaacagcaaaaatcaggatggtgggaggggccgagtcttgtcttgtcctttcatcatcatgactgttgagttcttggctgtgcccatcacgccacagcacgacgcctgccaaaatgcccccaacctactgcctgatgcaggtgccattgccattagcggtcatcgacagcttagggcagcactttccaacgggtgcccatgggacaccagcctgcgagatgcttttgtgggaaaggggttttgtggttcaataactttcggaagtgctgcacactctgtccccaagttggacattcacaaaggccgttattgccgtaaaggctctgacaagccctatagaaaagcttcttgctaaaccttctttaacccatgttttctaaacttatttgaccacagaacccttttcttggggaacagctattaacccccaaggaattattggttcctcaagtgcgttttgggagctgctgccagagagctaaagggcctggggtgtgagctgactctccgctggggaggccgggtgcacacgccacagcccgaggaaagtgctggccaccgcccgtgggcatcgatgaggctttgcccccaggggccggactccgtgtgacctaataggtcgtttccaagtcacccgttttggatgtgcatttcatgtgacaatacagatgacatgcaaatggc

SEQ ID NO: 348798 - DNA, 551 bp, Homo Sapiens
  misc_feature (418)..(426): n is a, c, g, or t
cgagcactttaattagagaactggaggaaccacatataacacttaacttcccctaccctgcccctccccaaaagaaaccatgacaaacctagcttttaaaaaatatttaaagaaagagaatgaactgtggaatttattggcagccaaggaatgtgtccaagacacatgctgaggtattgaataaaaagtgaacttttgtaatttgaattgggccccgcttagttcttgaattgttatgaaaatcctatatctgtttgtatatttgcaaaccctttgtattataattgttgatattttccctttttaaaaaataccattgaaatcagcatgacaaaaataacactgttggcacttataggtaacgtgattgattcagtatcttagagtttacagtttgtgttttaaaaaaaccgaaggnnnnnnnnnaagtgcaacatttctgtatactgtaaaagttataataactgaactgtttggtcgagtctttgtgtgttatattccaaggaaaattgaaagtattcagaaattaaaatattatttgatatctgaaa

SEQ ID NO: 348799 - DNA, 2564 bp, Homo Sapiens
  misc_feature (2038)..(2097): n is a, c, g, or t
  misc_feature (2267)..(2307): n is a, c, g, or t
ccgggtttgggcggttgggacctccggctgcaggtccgcctgggccagacgcgcgagcgcaagcagcgggttagtggtcgcgcgcccgacctccgcagtcccagccgagccgcgacccttccggccgtccccaccccacctcgccgccatgcgcctccgccgcctagcgctgttcccgggtgtggcgctgcttcttgccgcggcccgcctcgccgctgcctccgacgtgctagaactcacggacgacaacttcgagagtcgcatctccgacacgggctctgcgggcctcatgctcgtcgagttcttcgccccctggtgtggacactgcaagagacttgcacctgagtatgaagctgcagctaccagattaaaaggaatagtcccattagcaaaggttgattgcactgccaacactaacacctgtaataaatatggagtcagtggatatccaaccctgaagatatttagagatggtgaagaagcaggtgcttatgatggacctaggactgctgatggaattgtcagccacttgaagaagcaggcaggaccagcttcagtgcctctcaggactgaggaagaatttaagaaattcattagtgataaagatgcctctatagtaggttttttcgatgattcattcagtgaggctcactccgagttcctaaaagcagccagcaacttgagggataactaccgatttgcacatacgaatgttgagtctctggtgaacgagtatgatgataatggagagggtatcatcttatttcgtccttcacatctcactaacaagtttgaggacaagactgtggcatatacagagcaaaaaatgaccagtggcaaaattaaaaagtttatccaggaaaacatttttggtatctgccctcacatgacagaagacaataaagatttgatacagggcaaggacttacttattgcttactatgatgtggactatgaaaagaacgctaaaggttccaactactggagaaacagggtaatgatggtggcaaagaaattcctggatgctgggcacaaactcaactttgctgtagctagccgcaaaacctttagccatgaactttctgattttggcttggagagcactgctggagagattcctgttgttgctatcagaactgctaaaggagagaagtttgtcatgcaggaggagttctcgcgtgatgggaaggctctggagaggttcctgcaggattactttgatggcaatctgaagagatacctgaagtctgaacctatcccagagagcaatgatgggcctgtgaaggtagtggtagcagagaattttgatgaaatagtgaataatgaaaataaagatgtgctgattgaattttatgccccttggtgtggtcactgtaagaacctggagcccaagtataaagaacttggcgagaagctcagcaaagacccaaatatcgtcatagccaagatggatgccacagccaatgatgtgccttctccatatgaagtcagaggttttcctaccatatacttctctccagccaacaagaagctaaatccaaagaaatatgaaggtggccgtgaattaagtgattttattagctatctacaaagagaagctacaaacccccctgtaattcaagaagaaaaacccaagaagaagaagaaggcacaggaggatctctaaagcagtagccaaacaccactttgtaaaaggactcttccatcagagatgggaaaaccattggggaggactaggacccatatgggaattattacctctcagggccgagaggacagaatggatataatctgaatcctgttaaattttctctaaactgtttcttagctgcactgtttatggaaataccaggaccagtttatgtttgtggttttgggaaaaattatttgtgttgggggaaatgttgtgggggtggggttgagttgggggtattttctaattttttttgtacatttggaacagtgacaataaatgagacccctttaaactgtcttattttccaccagattgagaaccatatgttctctacacactatnnnnnnnnnnnnnnnnnnnnnnnnnnnnnnnnnnnnnnnnnnnnnnnnnnnnnnnnnnnnaaggtagctacagaacatctgaaatatggctaaacactaccttttaggttttgatcaatttaaatagccatacagccgatacccatactgggtcccggaacatgtcaaactgacctgggtccatagaccctccctcttcaaacctccctccccactgcatagtccctttnnnnnnnnnnnnnnnnnnnnnnnnnnnnnnnnnnnnnnnnngtataattcgaacaaaccctgaaggcccctttccttgggccggcgtcgccgctaaccctacggaaggcgccccagccccccaccgatgtgtcatacctcgctacttataccttaacgtactcacagactcccacaggacttccttccctcccaaatagccctcccccgcgtcaaagccagcacgatgtttcaccgcccgcactcgccaacccgaaccacaacgccatatcaccccgcacactcctcaggtaacatca

SEQ ID NO: 348800 - DNA, 968 bp, Homo Sapiens
  misc_feature (157)..(202): n is a, c, g, or t
  misc_feature (370)..(386): n is a, c, g, or t
  misc_feature (751)..(802): n is a, c, g, or t
cacatacaatttatgttttcctgttgaatgtatttttatgagattttaaccagaacaaaggcagataaacaggcattccatagcagtgcttttgatcacttacaaattttttgaataacacaaaatctcattctacctgcagtttaattggaaagannnnnnnnnnnnnnnnnnnnnnnnnnnnnnnnnnnnnnnnnnnnnncgcgcgcacgcacgccttgagcagtcagcattgcacctgctatggagaagggtattcctttattaaaatcttcctcatttggatttgctttcagttggttttcaatttgctcactggccagagacattgatggcagttcttatctgcatcactaatcagctcctggannnnnnnnnnnnnnnnncaaacaatggtttgaaacaactactggaatattgtccacaataagctggaagtttgttgtagtatgcctcaaatataactgactgtatactatagtggtaacttttcaaacagcccttagcacttttatactaattaacccatttgtgcattgagttttcttttaaaaatgcttgttgtgaaagacacagatacccagtatgcttaacgtgaaaagaaaatgtgttctgttttgtaaaggaactttcaagtattgttgtaaatacttggacagaggttgctgaactttaaaaaaaattaatttattattataatgacctaatttattaatctgaagattaaccatttttttgtcttagaatatcnnnnnnnnnnnnnnnnnnnnnnnnnnnnnnnnnnnnnnnnnnnnnnnnnnnntttattatcaaggggcaatatttttatcttttccaaaataaatttgttaatgatacattacaaaaatagattgacatcagcctgattagtataaattttgttggtaattaatccattcctggcataaaaagtctttatcaaaaaaaatgtagatgctgcttttgtt

SEQ ID NO: 348801 - DNA, 487 bp, Homo Sapiens
  misc_feature (19)..(19): n is a, c, g, or t
  misc_feature (32)..(32): n is a, c, g, or t
ccaaaacctttaccagctngaaatctgcatangtttcctgcccagttagaataaattcgtaccattcattcgttgattccaaagtatttcccaaagaactgtttatgtgcaaaatcctgacgcaggtactttcatgcagtctgcttcatttaaatcttcaaaaaccactgttaaagtagataggattggggggaaatgaagagaagttggttgataggtaaaaaaatacaattgatagaaggagtaagttctaatattggatagtatattagagaaattgtagttaacaataatttattgtgtatttcaaaataactagaagagaagaattgcaatgttcccaacataaagaaaagataaatgttttagatgatggatatccccattaccctgatttgatcattgtatatcacacacatgtatcaaagtatcacatgtactccaaatgtttgtacaactatgatatatcaataaaaaaatacaaaat

SEQ ID NO: 348802 - DNA, 727 bp, Homo Sapiens
  misc_feature (92)..(92): n is a, c, g, or t
cggttgtgaggtactgatgaggtgtaaggggagctgttaaaaaacagcagtgctgtattgtagttatgtatattcgtgtacagtatgtttanaccccaggtaaacatattcttttctgagaggataaatccctgcattcagatattccaggtaaatataattgagtcagggagtagtaaatctgatggagaattcacttgggggaggggaaaaagaatagtatgcaagacccttattggcttttaattatacctgaaaccaaaatggatatttttagtctctctgcatgtgagatttggtgtaacaagatagaactataatatatacagtatatggaaggatagatatagtgctttgttcattttaattgcaaagctgccaaaatagttgaagcttaattacttgacttgccttgatttataggactggggcttggagaaaatgagcagatgttcctctaagacatcgattacagaagccttatatacatggatttgattttgtatttgtagctgaaagtcactgttgtctaaaactaacttttctaagttatcaaaacaacctaatttcttttccaacaaggagaacttaatggcatgaaggattgtgtgacacattggaaaagccagcttactgccactctcttcctttggccattagagggaggtgttgcctttcattgacgcttagaagcaaattgttcacttgttaagaaaagtaaatcctt

SEQ ID NO: 348803 - DNA, 1792 bp, Homo Sapiens
  misc_feature (1562)..(1562): n is a, c, g, or t
  misc_feature (1575)..(1575): n is a, c, g, or t
gcggccgcgggcccggcagaaggccgagtaggagggaccacgcgccgggggccgcgatctctggcagggggcggtgtgccagcggagcaccatgcacataggcgcccagcgccccgactacccctcccgaggaaaagaggccggggccgcgctggggcggcggagagcatgagggaggccggggggcggctcggcttggagcgctgctagggagcggtgcgcgccgcacacccgcctgggcgcggcggagggcggggagccgggcaggtcgcgcctgcgggcggcagccgaccgccgggagctgttctgatttccgacgcgcacgctaggggcccggagcagcccccggccccggcgcgccgccgacatgggcaacgcagggagcatggattcgcagcagaccgatttcagggcgcacaacgtgcctttgaagctgccgatgccagagccaggtgaactggaggagcgatttgccatcgtgctgaatgctatgaacctacctcctgacaaagccaggttactgccgcagtatgataatgagaaaaaatgggaactgatttgtgatcaggaacgattccaggtgaagaatcctccccattacatacatttcaaaagctcaaagggctatctgggatccagctgttaaccaggaagaaatttcagacggcgtgttcaagaatctacacaagtgctaagagaactggaaatttctttgagaactaaccacattggatgggtcagagaatttctgaatgaagaaaacaaaggtcttgatgttctagtggaatatctctcatttgcacagtacgcggtaacttttgactttgaaagtgtggagagtactgtggagagctcggtggacaaatcaaagccctggagtaggtccatcgaggacctgcacagagggagcaacctgccctcacctgtgggcaacagggtctcccgcctctggaagacattctgcactgcgatataatacattgcccaagcagaaaaactctgaaaaattcaagattagtgagttaagaaagatgatgtgcatgtctgtatcatgtgtttacgtgccatcatgaattatcagtatggtttcaacatggtcatgtctcatccacacgctgtcaatgagattgcactaagcctgaacaacaagaatcccagaacaaaagcccttgtcttagaactgttggcagccgtttgtcttgtcagaggcgggcatgaaatcattttatcagcatttgataactttaaagaggtttgtggagaaaaacagcgcttggaggaagttgatggaacatttcaggaatgaagacaataacatagattttatggtggcttctatgcagtttattaatattgtagtccattcagtagaagatatgaatttcagagttcacctgcagtatgaatttaccaaattaggcctggacgaatacttggacaagctgaaacacactgagagtgacaagcttcaagtccagatccaggcttacctggacaatgtttttgatgtaggagctctactggaagatgctgaaactaagaatgctgccttggagagggtnggaagaacctggnaagaaaacatttctcatttatctgaaaaactgcaagacacagagaatgaagccatgtccaagattgtggaactggaaaagcaactcatgcagaggaacaaggagctggatgtcgttcgggaaatctacaaagatgcaaatactcaagttcacacattaagaaaagtggtcaaagaaaaagaagaaacaattcaaagacagtctaccctggaaaaaaa

SEQ ID NO: 348804 - DNA, 754 bp, Homo Sapiens
  misc_feature (72)..(115): n is a, c, g, or t
  misc_feature (117)..(181): n is a, c, g, or t
gctaaagcaattagtgtgcctcagccttccaagtagcttgtaccacaggcatgtgccaccatgttcagctannnnnnnnnnnnnnnnnnnnnnnnnnnnnnnnnnnnnnnnnnnnannnnnnnnnnnnnnnnnnnnnnnnnnnnnnnnnnnnnnnnnnnnnnnnnnnnnnnnnnnnnnnnntgagacatcgtgcccagcctatgatattttctagtttatttcatcttgttttaaatgctgataattgcctaatttcataacccactagtgggttatgacctgtagtttaaaaactactgtaggaaagaatatagacaaaccaatgattagagcacagtttaatagcctctatgatagatgaaatgcagaacacttagtactaagagagaataaaggaataaccaagccagttctaagcagttagaagtagtgctcagaaaaaaacttcttggaggacatgctatcaaagttgagttaaagtttgaacaaaaaattttaaaatactttatccattatacaaaaaaaatgtttattttgcatctctttatgaagacacaatgaagggacaaaagtagtaggtgcaataaagaataagcctagagaaaagcttcaatatatagaatagcggtcagcaaactttttttaaaggaccagatagtaatatttttggcttgagtgcccaagttgcctttgtagtagtcacagacaataagtaaaagaatgagcatggctgtgttctaataaaactttgtt

SEQ ID NO: 348805 - DNA, 829 bp, Homo Sapiens
catggcatgctccctagcacttgacatgggtgtcttgttcatggtgggcactcaaattttttgaattcatattttccagaatatcacatctcatggttatgtttttctgaaaacaactcttttgcaatgattccaaaaactctacccactgatagggaagcaaaggaaagcccaagttgtttaaaagttttgtattatgtcatacaaactgtcttcacatacaagtgcattaaaaaaattatccccccctcctcctccccaaacatcacagtacaccaagtctttctcagacacgacaaagttaaaacatatgtcccctctgaattctaaacagctaattctagacactaacatctggatcttataatttaccggtctggtatggacatgaacagttccagtgcctttcaacttatccctgaatttttctcttctcaaagttctaggcagtaattttaatgccctcaaattagataaagctgattacttagagcttataaattagctacactttatgacactaagaatagagctatgacttatgcatatcatacctgtcaagctacctagcaccacgaatagaactaatattaatggatggactaatacaaggatctaatatatgtcagtgatagtcttaaaaacaccgatttgttattttccttatatataatccaaattcctttctatccttctggcaatgtttctactgcctgactaccttaaataactatatagtgtcaatttcttgcttgggccaggtggtggctcatgcctgtaatcccagcatattgggaggattgcttgagcctaggagttcgagatcagc

SEQ ID NO: 348806 - DNA, 1599 bp, Homo Sapiens
agcggagtcctgaccgcacgggggccgcggccacggggcgcaggggccatggtgcgcggcaggatcttccggctctcggtccgggacgtgcgcttccccacgtcgcttgggggccacggcgcggacgccatgattggtccagaaaagggcgtggtgcacctggcgacagcggccgtcctaaacgcggtgtgggacttgtgggccaagcaggagggaaagcctgtctggaagttacttgtggacatggatcccaggacgctggtatcctgcatagatttcaggtacatcactgatgtcctgactgaggaggatgccctagaaatactgcagaaaggtcaaattggtaaaaaagaaagagagaagcaaatgctggcacaaggataccctgcttacacgacatcgtgcgcctggctggggtactcagatgacacgttgaagcagctctgtgcccaggcgctgaaggatggctggaccaggtttaaagtaaaggtgggtgctgatctccaggatgacatgcgaagatgccaaatcatccgagacatgattggaccggaaaagactttgatgatggatgccaaccagcgctgggatgtgcctgaggcggtggagtggatgtccaagctggccaagttcaagccattgtggattgaggagccaacctcccctgatgacattctggggcacgccaccatttccaaggcactggtccccattaggaattggcatttgccacaggagaaccagtgccacaatagagtgatatttaagcaaactcctacaggcgaaggccctgcagttcctccagattgacagttgcagactgggcagtgtcaatgagaacctctcagtattgctgatggccaaaaagtttgaaattcctgtttgcccccatgctggtggagttggcctctgtgaactggtgcagcacctgattatatttgactacacatcagtttctgcaagccttgaaaatagggtgtgtgagtatgttgaccacctgcatgagcatttcaagtatcccgtgatgatccagcgggcttcctacatgcctcccaaggatcccggctactcaacagaaatgaaggaggaatctgtaaagaaacaccagtatccagatggtgaagtttggaagaaactccttcctgctcaagaaaattaagtgctcagccccaacaacttttttctttctgaagtgaaagggcttaaaatttcttggaaatagttttacaaaaatggatttaaaaaatcctaccgatcaagatgagttcagctagaagtcataccaccctcaggaatcagctaagtaattattacttgattcttttagcaaatcaatgcacgttatcctacttaatccttaaataagtttagatttaactaacccaaagtccaggaggatgttcttacaaaaatagctatatcaagggctggcacctagacattaaactgtaatttgaaaataagcaacatgttgcataacttgttggaataattccttgttctgtttaacacttgtcataaattagcagaataaaaatagtcgtgcaacaccgggggtatctggtatgcaacgaagggaaaaatatttcactgattaaa

SEQ ID NO: 348807 - DNA, 784 bp, Homo Sapiens
agcgggaccggtcctgaccgcacgggggccgcggccacggggcgcaggggccatggtgcgcggcaggatcttccggctctcggtccgggacgtgcgcttccccacgtcgcttgggggccacggcgcggacgccatgcacacggaccctgactactcagctgcctatgtcgtcatagaaactgatgcagaagatggaatcaaggggtgtggaattaccttcactctgggaaaaggcactgaagttgttgtctgtgctgtgaatgccctcgcccaccatgtgctcaacaaggacctcaaggacattgttggtgacttcagaggcttctataggcagctcacaagtgatgggcagctcagatggattggtccagaaaagggcgtggtgcacctggcgacagcggccgtcctaaacgcggtgtgggacttgtgggccaagcaggagggaaagcctgtctggaagttacttgtggacatggatcccaggacgctggtatcctgcatagatttcaggtacatcactgatgtcctgactgaggaggatgccctaggaaatactgcagaaaggtcaaattggtaaaaaagaaagagagaagcaaatgctggcacaaggatacccctgcttacacgacatcgtgcgccctggctgggggtactcaagatgacacgttgaagcagctctgtgcccaggcgctgaaggatggctggaccacggttcacagtaaggtgggtgctgatctccaggatgacatgcgaagatgccaaatcatccgagacatgatggacc

SEQ ID NO: 348808 - DNA, 739 bp, Homo Sapiens
agctttgatgaagtgcatttactttgacattgatatagcttgtaactacttttggaatttttttcccctaacactttgatctcattaagggtattacaccttttccaccagaaaatgcagaggtatcatctttcttggaaaccaattgaaagcgtcccattttaacaaaatgacataaaattacaaacatttacatgattaaattcaaagcctgatccatctggtggtaagaaatgttaacttattttaaaagatgtatttgcattattaaaatatagtaacgacttccatctttacatcaaaagaaacgggcttgcataagcaatggctcccagctctggggagggtttgagccacgcccttgcgggggccgctccaagctctgacttcaaaagttggagtttcccagctgcgaacagctggtcaaaggcactctcaaaagttcaaggaaatgcccgtttgcggatggccgcagcaggcctgtggggctggggacagcgccaaggagctggccgttggttcccgagatgctcctgctctgccgtgttctaaggacctgcgagctggagctcttctcgggaaaaagaaaacgctggggaggcctccgtgtgggcgggtcaagccagataaccaggcttgtactggcttcagcagaagccgcgctgtttcctccttccccctctatctccttctttcccttctgtcgtcttctcgcagcatagtaggagtggtctaacaa

SEQ ID NO: 348809 - DNA, 254 bp, Homo Sapiens
  misc_feature (170)..(170): n is a, c, g, or t
aggaaaccactgcttagagacactaggtacagggcatcaagagggtgcagcccagccccgccaggacgaggcgccgacttctcattcagggttgacggagccaagagtttgtgcaaaatgtatgcatggtggttgctgccagcctccctcatgactaaatgcatatctantcctgtcaaaacgtgtatcacaatgtacttgaaactgttatctttgtgctctattgtttgaataattaaagaaattacagagac

SEQ ID NO: 348810 - DNA, 899 bp, Homo Sapiens
  misc_feature (417)..(417): n is a, c, g, or t
  misc_feature (563)..(563): n is a, c, g, or t
  misc_feature (608)..(608): n is a, c, g, or t
  misc_feature (741)..(741): n is a, c, g, or t
  misc_feature (785)..(810): n is a, c, g, or t
gggaggatcctgggataatggcagagcaggaagctgtgtccccacctagaccacagttgcaccagaaggacctgtctgatgtaaccattttggaactctggaagctactgaaggcttgcaactcccaggggaggcttggatggcaaattggggttaattttggtttcagctcttggcacagcagcggctacccatgccccacagacagccatgcacatgttcttggagcacctcgcacacagcttgaggggttcagggtgagcaagaaggatccttttctccaaatagtgggtatctgtgctcaggatccctgattgctgcttctgatcacagaggtgcagacaaagaggtgcgctgcgctgccgttgttatcacacctccctcagtcgttacaggcccctccccctccagctgaangtatcttccaagagtatttaaagggccagcaccaattgcccccctctttcatttttctctttttccccttttgggaagccagacattaaaagactaggaaattcaaaaacaactatggggaaaataagaaaatttagaaaattagnacagtgactgcatgctcagggaaaggtacagctcaaaaaagatcntggaaagaccttaaatttccatcttgggttgatcctctgcacagaaacagcctgcaacaatcaaaacaagaacaataaataaaaataacaaaaacagcaaacctagggcaaggggaggaagaatctaatttcntagagttaccacattattagacttaacatgtccagtgttcagcnnnnnnnnnnnnnnnnnnnnnnnnnngcctacaaagagacaggaaaatatggccatttaaagggaaaacaaaatcagcagaaactatccctaaaagaaaggccagatgatagatc

SEQ ID NO: 348811 - DNA, 951 bp, Homo Sapiens
ggcgggggcggagggggaggctggcagcggagctttgaatagggaagttttgcaggggttacgtttgcagtcagtccggtgtttgcaaatattgtgtgggctccgcgcgctgcgggctgcgggagggtccggccgggcgtctctgcgagcctggagtttgcatgaaactttcacctgcgctccggggagactttcggctccggctcccaccgcgcgcctcgccgccctcgcgaccgcgggctccgtccaacccggcccgacatggacgtgctccccatgtgcagcatcttccaggagctccagatcgtgcacgagaccggctacttctcggcgctgccgtctctggaggagtactggcaacagacctgcctagagctggaacgttacctccagagcgagccctgctatgtttcagcctcagaaatcaaatttgacagccaggaagatctgtggaccaaaatcattctggctcgggagaaaaaggaggaatccgaactgaagatatcttccagtcctccagaggacactctcatcagcccgagcttttgttacaacttagagaccaacagcctgaactcagatgtcagcagcgaatcctctgacagctccgaggaactttctcccacggccaagtttacctccgaccccattggcgaagttttggtcagctcgggaaaattgagctcctctgtcacctccacgcctccatcttctccggaactgagcagggaaccttctcaactgtggggttgcgtgcccggggagctgccctcgccagggaaggtgcgcagcgggacttcggggaagccaggtgacaagggaaatggcgatgccctcccccgacggcaagaaggagggtgcaccgggtgccactttaacggctgcaggaaagtttacacccaaaagcctccccactttgaaaagccacacccaggcggggacggcaccact

SEQ ID NO: 348812 - DNA, 1311 bp, Homo Sapiens
tgcagcatcttccaggagctccagatcgtgcacgagaccggctacttctcggcgctgccgtctctggaggagtactggcaacagacctgcctagagctggaacgttacctccagagcgagccctgctatgtttcagcctcagaaatcaaatttgacagccaggaagatctgtggaccaaaatcattctggctcgggagaaaaaggaggaatccgaactgaagatatcttccagtcctccagaggacactctcatcagcccgagcttttgttacaacttagagaccaacagcctgaactcagatgtcagcagcgaatcctctgacagctccgaggaactttctcccacggccaagtttacctccgaccccattggcgaagttttggtcagctcgggaaaattgagctcctctgtcacctccacgcctccatcttctccggaactgagcagggaaccttctcaactgtggggttgcgtgcccggggagctgccctcgccagggaaggtgcgcagcgggacttcggggaagccaggtgacaagggaaatggcgatgcctcccccgacggcaggaggagggtgcaccggtgccactttaacggctgcaggaaagtttacaccaaaagctcccacttgaaagcacaccagcggacgcacacaggagaaaagccttacagatgctcatgggaagggtgtgagtggcgttttgcaagaagtgatgagttaaccaggcacttccgaaagcacaccggggccaagccttttaaatgctcccactgtgacaggtgtttttccaggtctgaccacctggccctgcacatgaagaggcacctctgagggagcagagaggtggatcctgtaggctaaaaggcttccaggctgagagccggccgtggaaggagggatgcgtgttccagccaaagcatgccgttctgcaccctacccagttgcctccagggcctctccttggaaggtcttttgagggctaaaaaggtcctgtaagaagcggcatagcacccgtggtgcatggtatgtgggtgaccctggactcgccactggtacccgcccttccgagcggcgcctaagcctttgccgtgagcatgcacactgagaatgctaatggttgggttgattgtatgttgaggatctattactgaccgtatgatgaggccaactttttttccttgtggttagcaagactgcaagagatggaaaaaaagtagtttgaatgttttgtgtgtaaggagtataccatgagatgagatgaccaccaatcatttccttggggggagggggtgtctgcaccttagaaaa

SEQ ID NO: 348813 - DNA, 1052 bp, Homo Sapiens
  misc_feature (526)..(558): n is a, c, g, or t
  misc_feature (575)..(595): n is a, c, g, or t
  misc_feature (950)..(972): n is a, c, g, or t
  misc_feature (978)..(979): n is a, c, g, or t
  misc_feature (981)..(981): n is a, c, g, or t
  misc_feature (1004)..(1004): n is a, c, g, or t
gcataccccaccccttacctgctctcatactgcagttacatttacaccaaaaccccatgcagggttctttgtggtgagtgttccatacgtgctaaggaccttagttgcagattgttactttctggtgacctatgttgaattgaaacccccaaaacttgaaattgtgaacatttgacatgcagtaaaggccacctcatcacccagagaaatctttggctgctgcagctagccgcttcttggctgtgatgtagtatagcttcgatctcattttgtgtttgagagaatgttctgggcaagttctgtgtgtggtgggttggggcgggtagagtcatgagttttccacatccctgtgtggtggttttgctgactgtcgctccgtgggactggctcccgtttctccttggtgagcccggggagccggcgcatcttgtgagtcgcgtctgtgcatggcgatccgctcctccggctctcatggcattgtgccacaggcagaggccaggaggagcagtatgtgcacagccgaaannnnnnnnnnnnnnnnnnnnnnnnnnnnnnnnnaaccaactcattgtttnnnnnnnnnnnnnnnnnnnnncctaatctgtgaaatcagcgtagcatgcctggagcatcaggaatggcagaaaagtctgatgcgctctagacagcttcaccactcatttgggcaggcagtaaacacacatataatttattagctgggagctgaactggctgtgaaatctatgatttgctttgaacatttgggttttgttgccctttttccttaattgataacacagaaaagaaagtaccatcaaagactgtgggagtcattgagggtctgtgtgtcctcaccgagagggacctggtgtgccccgccgggtcgatcttcccacgtgttagggtttatttttatacaacacatcttttgacactttaaggtgggtggnnnnnnnnnnnnnnnnnnnnnnngcgcgnncnatggttggtaaggttttatgttnctgttatttatttacgaacttcagatcgttttatgtatttcatctctg

SEQ ID NO: 348814 - DNA, 1089 bp, Homo Sapiens
tatcctgttttccattatttttcccagctgttaaattcttggctatttgaaatagactagattgtgttgtcaaatcaagaatgggtgtgcatgtgcttgtcttagaagtatcactgctttttgcatcttaactgcagttaattttccttccgactgcggctatatcactatgaccttactagcattgcagtgtcaacaaccacttctgctcttcagagacttcagctttggagcatttaggctttgttctccaagaactgggatatccattcttaccctacagtggcttgatgcctttctgaaggcgagagggaagcctgggtgactcagcggtggtctccattcagcaaaatctcatgtacatttccagtaggaaccgcagaggtgtgcttttcaagactcaccaaatactgtgttttctctcttaggatttcttttcccctaaagtatcacggaagatactatggttcgtgactttcttgctaactgaagaagccaaggatttggggtgtggggtcgtatgcgagacacagtggggtaagggtgcataccccaccccttacctgctctcatactgcagttacatttacaccaaaaccccatgcacccttctttgtgggtgaccgttccataccctccctaagggatctctctttgcacatctgtacttttcctgggagacctaaggttgaatttgaacccccccaaaactttccaacttgtgaaacttttcgacatgtcagcaaaaggccattcttcttcctcccacaagaaaatcctttctccttgcgctgaatgcttaagcccgctttcttgggctgcgcactcttacccacaccctttctacaccccatttttcgtgctttttaaacaaaatgcctcttgagctaactcctcccttcccctaccacacgactttgccgtccccaactcatattcgctctgcaccttctttccacctcccttttttgcacatcgctccctctatgcccttgttattttatccatcagcaccccttcttcgggctccatccacacatattttcgcgctcccctcctccccctacatattgagcctttctttcctac

SEQ ID NO: 348815 - DNA, 569 bp, Homo Sapiens
tgatccgttgggcctactactactatgctgcgagaagacgacagcaggggattcagataaaaatacccaggtccatagtgaaagatgtttttcagtatgttacttatggtttagctactagccagggaggtggtagcccagagaaggcaaaccacatacagatcacctggagttgattatatgagtctatgcttttgagctctttaggcaacacattctcattcctgtcattatcagttgaacctccatgccacacatttctaagaattaaatgcctagatggattaaatgtagtatgtgaatgttctatgtaaaagccaatagagtatacaagtgacttgaatgatttttcctaacttgtttgcaactgatagctcatattgaatgtttttatgtaaactttgtatcgttgggaagaattacccaatcagagatttatattttcataaatgttacatttagttaaattttgttacagagttgttacactagaaaattatttcagtcttcaaacaatatacagtcttgtgtatgtattatttgtatgaataaaagataaactacttaaa

SEQ ID NO: 348816 - DNA, 396 bp, Homo Sapiens
  misc_feature (38)..(38): n is a, c, g, or t
  misc_feature (43)..(43): n is a, c, g, or t
gcctttggagcccctttggggccaacaccattcctcanccccngtccattatccagttgaacccccccaggcccacacatttcctaagaattaaatgccctagagggattaaatgtagtatgtgaatgtccctatgtaaaagcccaatagagtatacaagtgacttgaatgatttttccctaacttgtttgcaactgatagcctcatattgaatgtttttatgtaaactttgtatcgttgggaagaattacccaatcagagatttatattttcataaatgttacatttagttaaattttgttacagagttgttacactagaaaattatttcagtcttcaaacaatatacagtcttgtgtatgtattatttgtatgaataaaagataaactacttag

SEQ ID NO: 348817 - DNA, 1130 bp, Homo Sapiens
  misc_feature (1030)..(1030): n is a, c, g, or t
  misc_feature (1041)..(1043): n is a, c, g, or t
  misc_feature (1048)..(1048): n is a, c, g, or t
  misc_feature (1060)..(1060): n is a, c, g, or t
  misc_feature (1063)..(1063): n is a, c, g, or t
  misc_feature (1067)..(1067): n is a, c, g, or t
  misc_feature (1079)..(1080): n is a, c, g, or t
  misc_feature (1086)..(1086): n is a, c, g, or t
  misc_feature (1088)..(1088): n is a, c, g, or t
  misc_feature (1098)..(1098): n is a, c, g, or t
  misc_feature (1103)..(1103): n is a, c, g, or t
  misc_feature (1107)..(1107): n is a, c, g, or t
  misc_feature (1109)..(1109): n is a, c, g, or t
  misc_feature (1111)..(1111): n is a, c, g, or t
  misc_feature (1114)..(1114): n is a, c, g, or t
  misc_feature (1117)..(1117): n is a, c, g, or t
  misc_feature (1128)..(1128): n is a, c, g, or t
gggtccggaattcccgggatcggaggcccggggcgcctgggagtttgaagcaaacaggcagcgcgcgacaatggcggtcgctcgtgcagctttggggccattggtgacgggtctgtacgacgtgcaggctttcaagtttggggacttcgtgctgaagagcgggctttcctcccccatctacatcgatctgcggggcatcgtgtctcgaccgcgtcttctgagtcaggttgcagatattttattccaaactgcccaaaatgcaggcatcagttttgacaccgtgtgtggagtgccttatacagctttgccattggctacagttatctgttcaaccaatcaaattccaatgcttattagaaggaaagaaacaaaggattatggaactaagcgtcttgtagaaggaactattaatccaggagaaacctgtttaatcattgaagatgttgtcaccagtggatctagtgttttggaaactgttgaggttcttcagaaggagggcttgaaggtcactgatgccatagtgctgttggacagagagcagggaggcaaggacaagttgcaggcgcacgggatccgcctccactcagtgtgtacattgtccaaaatgctggagattctcgagcagcagaaaaaagttgatgctgagacagttgggagagtgaagaggtttattcaggagaatgtctttgtggcagcgaatcataatgcttctcccctttctataaaggaagcaccccaaagaactcagcttcggtgcacgtgcagagctgcccaggatccacccagttgcatcgaagcttctcaggcttatgcaaaagaaggaaaccaatctgtgtctatctgctgatgtttcactggccagagagctgttgcagctagcagatgctttaggacctagtatctgcatgctgaagactcatgtagatattttgaatgattttactctggatgtgatgaaggagttgataactctggcaaaatgccatgagttcttgatatttgaagaccggaagtttgcagatataggaanacagtgaaaannngtatnaaggtaagtgtnttnttcnggatctcaaganncggaancngcttaaacgnagagnaaangnantcnctntattgaagtcnat

SEQ ID NO: 348818 - DNA, 652 bp, Homo Sapiens
ggagcacagtgctgtttagggttctgtttgtgatcccccacccgctaccaaagctgactctgtggacgttgaagtgagggtgccagaaaaccatgcatctaaagttgaaggtgataataccaaagaaagagacttggatagagccagtgagaaggtggaacctagagatgaagatttggtggtagctcagcaaataaatgcccaaaggcccgagccccagtcagacaatgattccagtgccacgtgcagcgctgatgaggatgtggatggagagcaagagaggcagagaatgtttcctatggactcaaagccttcactgttaaaccccactgggatcaatactcgtctcatctgccgttaaaaaccaaatccactgggatctgccacagcttaagcatcgagctgctgttatcccaccaatggtatcctgcaccccatgtaacataccaattggaaccccagtgagcggctatgctctctaccagcgacacatataaagcaatgcatgagtcagcaactcctggaggagcagcggcagagacaagaacagatagattcggaatgtagaagttctacaagtccatgtggcacaatccaagagtccaaacagagagtgggaagtccttcagctgctccacataaagggtcccgg

SEQ ID NO: 348819 - DNA, 890 bp, Homo Sapiens
aggctggtcccgcccgggagttcgggatcagctccgcgtccccgcgcctcctcccagcgcaggtgggtccgcccgcggggggcgggggtgcccgggagccgtgggacgggcgggtagcggcaacctttggggagcagagtggtccccaacgcccaggtgccccggctcgcgctctggcccgggcgaatcgggctataggaagggccacacggatggaagtcctagtccgggtgctcacctcttgtggaacgtgcaaagcctgtcccaggacctctttacactctgggggtctctgcccaggcacgcttgctgcttccggacacagctgtgggcggagctagtaggggcggggctacgtgattgacacttctctcctcagacttcaagggctaccactggacccttcccctgtcttgaaccctgagccggcaccatgcacggacgcctgaaggtgaagacgtcagaagagcaggcggaggccaaaaggctagagcgagagcagaagctgaagctataccagtcagccacccaggccgtattccagaagcgccaggctggtgagctggatgagtccgtgctggaactgacaagccagattctgggagccaaccctgattttgccaccctctggaactgccgacgagaggtgctccagcagctggagactcagaagtctcctgaagagttggctgctctggtgaaggcagaactgggcttcctggagagctgcctgcggggtgaaccccaagtctcatggtacctggcaccaccgatgctggctgctaggccgcctgcctgagcccaactggacccgagagctggagctctgtgcccgtttcctggaggtggatgagcggaactttcactgctgggactatcggcggtttgtg

SEQ ID NO: 348820 - DNA, 2760 bp, Homo Sapiens
  misc_feature (1921)..(1989): n is a, c, g, or t
  misc_feature (2628)..(2685): n is a, c, g, or t
gccgggacgtggcgccgctctagccagcgcctgggctctgtggcgggcgccgcagctccgcgtcccccgcgcctcctcccagcgcagacttcaagggctaccactggacccttcccctgtcttgaaccctgagccggcaccatgcacggacgcctgaaggtgaagacgtcagaagagcaggcggaggccaaaaggctagagcgagagcagaagctgaagctataccagtcagccacccaggccgtattccagaagcgccaggctggtgagctggatgagtccgtgctggaactgacaagccagattctgggagccaaccctgattttgccaccctctggaactgccgacgagaggtgctccagcagctggagactcagaagtctcctgaagagttggctgctctggtgaaggcagaactgggcttcctggagagctgcctgcgggtgaaccccaagtcttatggtacctggcaccaccgatgctggctgctaggccgcctgcctgagcccaactggacccgagagctggagctctgtgcccgtttcctggaggtggatgagcggaactttcactgctgggactatcggcggtttgtggccacacaggcagccgtgccccctgcagaagagctagccttcactgacagcctcatcacccgaaacttctccaactactcttcctggcattaccgctcctgtctcttgccccagctgcacccccagccggattctggaccacaggggcgcctccctgaggatgtgctgctcaaagagctggagctggtgcagaatgccttcttcactgaccccaatgaccagagtgcctggttttatcaccgttggctcctaggccgagctgacccccaggatgcactgcgctgcctgcatgtgagccgggacgaggcctgtctgactgtctccttctctcggcccctcttagtgggctccaggatggagatcttgctgctcatggttgatgattctcccctgattgtggagtggaggaccccagatggcaggaaccggcccagccatgtctggctctgtgacctgcctgctgcctccctcaacgaccagttgccccaacatacatttcgcgtcatttggacagcaggcgatgtccagaaagaatgcgtgcttttaaaaggccgccaggagggctggtgccgggactccacgacagacgagcagctattcaggtgtgagctgtcagtggagaagtccacagtgctgcagtctgagctggaatcctgtaaggagctgcaggagctggagcctgagaataaatggtgcctgcttaccatcatcctgctgatgcgggcactggaccccctgctgtatgagaaggagaccctgcagtacttccagaccctcaaggccgtggaccccatgcgggcagcgtatctggatgacctgcgcagcaagttcttgctggagaatagcgtgctcaagatggagtatgccgaggtgcgtgtgctgcacctggctcacaaggatctgacagtgctctgccatctggaacagctgctcttggtcacccatcttgacttgtcacacaatcgtctccgaaccctgccacctgcactggctgccctgcgctgccttgaggtgctgcaggccagtgataatgccatagagtccctggacggcgtcaccaacctaccccggctgcaggagctgctactgtgcaacaaccgcctccagcagcctgcagtgctccagcctcttgcctcctgccccaggctggtcctcctcaacctgcagggtaacccgctgtgccaagcggtgggcatcttggagcaactggctgaactgctgccttcagttagcagcgtcctcacctaagaggccctgccccctacccttgccctttaacttattgggactgaataaagaatggagaggccctctcaggctaccnnnnnnnnnnnnnnnnnnnnnnnnnnnnnnnnnnnnnnnnnnnnnnnnnnnnnnnnnnnnnnnnnnnnngaagaggggggcggcgcagcaaaaaatcatccaccaagagggggccacacaaaaagcccgcgaaacaacgtagtgagtaacagaaaggggacccaacagagagggagagcgccacatatatagcacgagcgacacgacagcgaggagaaaaaaacaacagagccacgagcagagggcaacccacccgcaggagaccgagggaacagccaccacttggggaggccacgaccccacgccctacagagcgggggcgaaggccaacaacaaagaggagcagaccacaaaacaccaccaccacacggaaaaaactagaagacaaccacgggagggagcaacaccaaaaaacacaagagaagaaagagaacaaaacaagtgaggcaacaaacacaagaagcagaaggaagacacaagatacagcagaaggagaaagacacaacaataccggcgacacaaaagcgggacacagtagtcccagacaagacagaagtaatatttaagcacacggggggaccagaagacatacaaaacaaacacaacaaacagaagcgaacggaccaacccccagaccaggacggagcgagcaagaaccgaaaacagacaacaggacgacgaaccaggaagaaggaacgacgacaggannnnnnnnnnnnnnnnnnnnnnnnnnnnnnnnnnnnnnnnnnnnnnnnnnnnnnnnnncgacaaggagaacagagacgagcaacggcacaaccagagagcggagacaagaacgaagggagaccaccaagagag

SEQ ID NO: 348821 - DNA, 977 bp, Homo Sapiens
  misc_feature (769)..(769): n is a, c, g, or t
  misc_feature (799)..(799): n is a, c, g, or t
  misc_feature (835)..(835): n is a, c, g, or t
  misc_feature (878)..(878): n is a, c, g, or t
  misc_feature (883)..(883): n is a, c, g, or t
  misc_feature (889)..(889): n is a, c, g, or t
  misc_feature (927)..(927): n is a, c, g, or t
  misc_feature (937)..(937): n is a, c, g, or t
  misc_feature (962)..(962): n is a, c, g, or t
tcttctactactactatgctgcgagaagacgacagaagggggtttttttggtagattccttgaacatttctacatgaataattatgttgtctgtgaataggaaaaattgtattttttccattttgtatacattttattggtcttgctttgttgtatttgccagaattcatgatgttgaatagaagtataaaaagtaaacatgcttgcttgctcctcaacttaagggaagagcattaagttcgatgtcatctatatgaatttttgagtctccttttatcagattaaggcaattttctcttatttgtagtctgctgggggtttttattatataaatatattagtctttttcaaacgtatttatacatctgttgagatacttatgtggtttttcttttcaatctgttaatatagtgagttacattgattgcttttcttgggaaattgaccctttatcattatgtaatgtctcttgttttccttagcagtttttctacttcttaagtctactctttttggtattaatataactacccttgtcttatttgatttagtgttttaattgcatctctttttgttctgtttttacaatatatctatatcataatacttaaagaaggcctctgatgggatttcttgaatatagtggatgggtttctttgtttggtttggggttaaattcaatatagttgatgtgtttaaactctttatttacattaagtataattattagcattggtaaatttggtctaatattttaataattttggtngattccttgggttttcttcatcaattttcntttccataagggcatttggattcttgaaaataagcnctattccttttaaattatctattggctatttggatcttttggncaaantttagngattgatacaattgcactactttcaaattggctaaaanaaattactgntcaaggcatgcaaaccttaaacaanggcctcatttctcct

SEQ ID NO: 348822 - DNA, 1233 bp, Homo Sapiens
  misc_feature (20)..(20): n is a, c, g, or t
  misc_feature (283)..(334): n is a, c, g, or t
  misc_feature (562)..(570): n is a, c, g, or t
agcggtgttgcggacggtgngtgagagttgtctgcgacgtgcccgatccatgggggcggggcatcggagtcgagcggggcggtggggcgcgtcgtgtggtgcgcgcgtgcgccggggtaggggatgtgggcccgtgtggggcagggtgctgggtgtactcctggcgcggcagcgcgcggacacgtggatagggaggcgtggtctccaacggtggctggtaatagcttgtggtggcgggcggtgtggtggggcccgggttcgaggtgtgggtgtgtctgtcatnnnnnnnnnnnnnnnnnnnnnnnnnnnnnnnnnnnnnnnnnnnnnnnnnnnnggtggcggagggcgggtgccattgtggtcggggtgctgccgttggttgccctctgccgtgggctttattcccaaaccgtcagggtggctattctcttcccccggataaagcagaatctatacagaggtcttgcgggccgactaaatcagatcccattttagaaccatcatctgcttcctcttccatatcagagtccattccattgtcaccctcaagaatcttcaaaannnnnnnnncagacaggagctctaactgttcctggcatagttttttaatttcttctattgaacagttctttaacacatcaggaagcatcttctgtaactttttctctcctataatacagaagcactgctgaagcatttcttttttgtctgatatatagaaactaactggtttcaatgacacagtcaggtccagtccaccttcttcaaggtcactgtgctctgccaagaataattctttttccaaagttggcaaaatatatttagtttcctgctgcaaggagcccgagacgctggaagagtcggtactcctccgcttccggcgctcgccgcgctccacgctgctcccgccccaacagctgccgccgctcccaccgccggtgacacttccactaaaattggcgttcccacagcagctgacgctcccgcagcccccggcgctcccgcagccgctagtgcttccactgctgccgctggccaacgcgggtacgatgtccggggccgcgagcgctgcggccgcctcctgactgctacgtttgcgccgtttctcccgggaggactttttccccgtcatgatccctctgctgcaaccatcggaggaaagtccgctgtctctggtgcgaccgaagcccgactcctgcggccgtgggcggcaggcactggcgtcgcaggtta

SEQ ID NO: 348823 - DNA, 483 bp, Homo Sapiens
tatccgttcgcctactactactatgctgcgagaagacgacagaaggggtccaggagctgccctgggcaacagggacaggagcctcccgtgagacactgcagctgagacagatgggagtcctctgaccccagagggtactggcttgactgctttatgccttaagtggggcctggagcaaaatggcccaggttagtctgtcctgagagtccagagccttggttcaggggagaatggcatctggagagtgggctgctgggataatggggacagtgagggacagagcccttgatacttaaggaagtgctggatattgctaagaattcaggtagtctcgggatctccagagtctccatgctaggacaggagatcttcagaacctggaggaatggaaatagtctagtcagcttatttgtcaagaaaaatgtcaaccttggtaatttaaataatgctttaaaagtccacaaaatacatatttctaaaatt

SEQ ID NO: 348824 - DNA, 455 bp, Homo Sapiens
  misc_feature (21)..(21): n is a, c, g, or t
  misc_feature (205)..(205): n is a, c, g, or t
  misc_feature (284)..(284): n is a, c, g, or t
  misc_feature (348)..(348): n is a, c, g, or t
cgggaacccctcccccgtganaacaactgccagcctgaagaacaaaatgggaaaatcccctcctgaacccccaaagggtaactgggccttgaactgcctttaatgccccttaaagtggggcccccggagccaaaaatggcccccaggttaagtcctgtccctgaagaagtcccagagcccttggttccaggggagaatggccatnctggagagtgggcctgcctgggataatggggacagtgagggacagagcccttgatacttaaggaagtgctggatattgnctaagaattcaggtagtcctcgggatctccagagtctccatgctaggacaggagatcttcagancctggaggaatggaaatagtctagtcagcttatttgtcaagaaaaatgtcaaccttggtaatttaaataatgctttaaaagtccacaaaatacatatttctaaaatt

SEQ ID NO: 348825 - DNA, 790 bp, Homo Sapiens
  misc_feature (595)..(699): n is a, c, g, or t
cctactatgctgcgagaagacgacagaaggggcacgacattgtccgcagcttccggcagaccatggaccaatacagcacggagcccggcagatacaggttcatggggactgaagcctatgcagagagtattgacaggaccgtgatgtactatggattgccatttatccaagaagctgattttcccttcaacaattacctcagcatgctagacactgtttctgggaacagcgtgtatgaggttatcacatcctggatggaaaacatgccagaaggaaaatggcctaactggatgattggtggaccagacagttcacggctgacttcgcgtttggggaatcagtatgtcaacgtgatgaacatgcttcttttcacactccctggaactcctataacttactatggagaaagaaattggaatgggaaatattgtagcccgcaaatctcaatgaaagctatgaatattaatacccttcgctcaaagtcaccaatgcagtgggacaatagttcaaatgctggtttttctgaagctagtaacacctggttacctaccaattcagattaccacactgtgaatgttgattcttgctccgtcannnnnnnnnnnnnnnnnnnnnnnnnnnnnnnnnnnnnnnnnnnnnnnnnnnnnnnnnnnnnnnnnnnnnnnnnnnnnnnnnnnnnnnnnnnnnnnnnnnnnnnnngtccaaaagactcaacccagatcggctttgaagttatatcaagaattttaaagtctactttcatgccaatggaacctacttccttcaaaca

SEQ ID NO: 348826 - DNA, 947 bp, Homo Sapiens
ggtccggaattcccgggatgccagaaaggccacctgcgccagcacctcctgagaccggccttcaaagacacgacgcatgccgctctgccgtccggagcacttaatgcctagagccagcagggtcccagtggccgcgtcactgcctctgagccacgcggtcattccaactcaactgccctcgcgttctggccacaggccccctgggagaccccggagatgcccaaaggcctcatgcctgccgcctccagtgggacctagcagcacacagacagcgaagcgggtgaccatggggtggccacggccgggccgagccctcgtggcagtcaaagccttgctggtcttgtcgctgctccaggtgcccgcgcaggcggtggtacgggccgtgctggaagacaactcgagctcggtggactttgcggatctgccggcgctgttcggcgtccccctggcccccgagggcatacggggctacctgatggaggtcaagccagccaacgcgtgccatcccatcgaggccccgcgactgggcaaccgctctctgggctccatcgcgctgatccgctgctacgactgcaccttcgacctcaaggtgctgaacgcccagcgcgccggcttcgaggcggccatcgtgcacaacgtccactccgacgacctcgtgagcatgacccacgtctacgaggacttgaggggccagatcgccatcccctcagtgttcgtgagcgaggccgcctcgcaggacctgcgggtcatcctgggctgcaacaagtcggcccacgcgctgctcctgcccgacgacccaccgtgccacgacctgggctgtcaccccgtgctgaccgtgtcctgggtgctgggctgtacccctggccctggtcgtatcagccttctttgtcctgaaccacctgtggctctgggcccaggcctgctgcagcccagacggccggtgaaga

SEQ ID NO: 348827 - DNA, 521 bp, Homo Sapiens
gcggccgctgggcgactcgctgagctgggtggccagccaggaggacaccaactgcatcctgcttcgctgtgtttcctgtaatgtttctgtggataaggaacagaagctatccaaacgtgaaaaggaaaatggttgcgtccttgagactttgtgctgcgcagggtgctcactcaatcttggctacgtgtacagatgcacgcccaagaatcttgattacaagagagacttgttttgcctcagtgttgaagccattgaaagttatgttttagggtcctctgaaaagcaaattgtgtcagaagataaagagctttttaatcttgaaagcagagttgaaatagaaaagtctctaacacagatggaagatgtctagaaagcattacaaatgaagctgtgggaggccgaatccaaattgtcctttgccacttgtaaaagctgaactctagtctgtgtcctccattctgcccccgcccttcctccccttatttgttaaatgaagcaacatagtgagacgtcgtctctac

SEQ ID NO: 348828 - DNA, 1085 bp, Homo Sapiens
  misc_feature (3)..(3): n is a, c, g, or t
  misc_feature (7)..(7): n is a, c, g, or t
  misc_feature (15)..(15): n is a, c, g, or t
  misc_feature (20)..(20): n is a, c, g, or t
  misc_feature (29)..(29): n is a, c, g, or t
  misc_feature (46)..(46): n is a, c, g, or t
  misc_feature (60)..(60): n is a, c, g, or t
  misc_feature (132)..(132): n is a, c, g, or t
  misc_feature (161)..(161): n is a, c, g, or t
  misc_feature (175)..(175): n is a, c, g, or t
  misc_feature (182)..(182): n is a, c, g, or t
  misc_feature (205)..(205): n is a, c, g, or t
  misc_feature (226)..(226): n is a, c, g, or t
  misc_feature (349)..(349): n is a, c, g, or t
  misc_feature (413)..(413): n is a, c, g, or t
  misc_feature (436)..(487): n is a, c, g, or t
  misc_feature (495)..(496): n is a, c, g, or t
  misc_feature (589)..(589): n is a, c, g, or t
tgnagtnctaaatgnataanccaaaggantttttaaatccagttcnacctgaaaattcanctataagaaaattgtatttatataacatttactattttttaagactaatgagatttctgtaataattttaantctttaaaaagtgaaagctttttgtaaanatattttctttttnttattanaagaaaatacaaagagaaaaatntctttctttcatgggcatttnataatttcagtctttgaactgatttgtaagcctagaatatactaagctgaataacagctctgttgcctcagaattttcagtagccagtatttctgattaactaagttgaaactcttattaganactttcagttggtgatattgtattctagaagatataaatgagaggtttcgcccatctcagtttngaaatttattcaaacctaaagannnnnnnnnnnnnnnnnnnnnnnnnnnnnnnnnnnnnnnnnnnnnnnnnnnngtttgtcnngttatatatagaatttctattaaggattttttaaatggacaaccaatagggggttgaagtgtttatctgatttgtttaaaattttgtatatcnccaaatttttaaaaagtgatagtcacagtgctaagttatctagttggctactattacaccttaaaaattgagtttacacacacacaattacctgtttatatggtgctcatttgttattctcaaatataatgtgtgaccgtgatatagtgagaaagattctaccaaccactgtttcactactttttagttaaaattgggtatgttcttaatattcattagtgagaatcacaaagtattttgtagaaggcccaaatcacagaataaaggactaagagtggatttgctgacattccatactaatatacattgtttatgctttctttaaaataactagaagaacataaaagaaagagaatctcagaagtagtttgctgctaatatatacatatattgtataaaaaggtatattttggttttgttaaaacccttgttgacttttctacactgaacattttttttaacttgatttaataaaaatgttaattttggaagtgca

SEQ ID NO: 348829 - DNA, 454 bp, Homo Sapiens
tagaggagcattcaaatgaggggacgtttccacccagaacaactgttaagccattagagcgaggttatagaagagctctgacaagacaaaagaacccaagaacaaccacaatgaaagaaactcaaaagtaacaggatgggcagcaaaaggtacagcaaagaatgaaaacagatgcatggttacaaacagcattaaatgcgtacaacttctgggtctggtgaataattaagggacaagaaagccattactgcacctgatctgcactgaaggtccttcctaagacagtttgagaaaggaagatagaaagtcagcatgggactatttggctggaggcagggggcttttctacaggtgaaaaccttcctttgatagatagaaaccgtcccagggcaaataggaacagtttcaatccatctatcaaagtgacttccagtgcccacaaaacttaagtctt

SEQ ID NO: 348830 - DNA, 496 bp, Homo Sapiens
  misc_feature (11)..(11): n is a, c, g, or t
  misc_feature (22)..(22): n is a, c, g, or t
  misc_feature (64)..(64): n is a, c, g, or t
  misc_feature (173)..(173): n is a, c, g, or t
  misc_feature (351)..(351): n is a, c, g, or t
aaaaaaccccnaaatttcccanaaaggaccaagggataaagcttaagcataacttcaaaagagncattaagcggggggtgaacaagatccaaaaccacaggctctcttgatgtaaagatagacctttaaccatgtgcaatctgtctattaagaaaatagaggactctaaacancaaaattaagagtatagttgtctctgtgtgactgaaaaagagtgaaagataactgcaaaattattgatactgttcttatgcttaaattgggttgtgtgcttacatgtgttcattatgttaatatgtctcataggttaggtatctcaatcaaatatgcagttatataaatacaatacanctgagataagataactagcaacacattgaaacaaaaaaacaagaataggattgaatactgtcacgatctttacaaggcctggcctttcactatgtaaatagatatcttttagtccaagaaatcacagaacttacacatttttagg

SEQ ID NO: 348831 - DNA, 799 bp, Homo Sapiens
  misc_feature (17)..(17): n is a, c, g, or t
  misc_feature (21)..(21): n is a, c, g, or t
  misc_feature (37)..(37): n is a, c, g, or t
  misc_feature (91)..(91): n is a, c, g, or t
  misc_feature (134)..(134): n is a, c, g, or t
  misc_feature (151)..(151): n is a, c, g, or t
gttggggggccaaaggncttncaaccccaaggggccnttcccaagggccaagggggcttgggggttttggggcctttcccattcaaccttncccagggttgaatgggggcttgttgggaacccaagccgggccntggcgcccttcccttcntggggtacccccaagagtggaaggggctgggtttgggcttggccttttgcccacctcccctgcctttgcagggccctgtggacagctggagaggccacagatggggtggaatcccatctgctgctgaatcctcacctgggcctgagggactgtgcctgctgtgcactcacagctgggtcttcccaaggatgctgttctcaggagtggtgggtccccagcccctcttcacactgggtatgatggaggtgtgggcgggctcgtccaggccgatcaaggcacagcagtgagcagcggaggcctgtggtggggaatggactctcgtgggatcctcttgcagaggatgccccaggcctgaaccctctagtggatccacagtttgtggagactggcactctcccagccctgtccttgaccgagagtccagcattttttcagttggcccctggttggctgcctcaccccagcaggggaggaggcatccgaatccacagggacggcacgtgccatggctatgcacattgcctgcccgtggcatcaactggggccgctggcacttgtctaggatggaagcccccaagaagggcaggggtttctgtctgctctgttcagtgaatcatgtgaagtgcttgcaaaggcagctttacacag

SEQ ID NO: 348832 - DNA, 1612 bp, Homo Sapiens
gctggatggaccgcgagacgcgcgccctcgccgacagccacttccgaggcctgggggtcgatgtccccggcgtcggccaggctccgggccgggtagccttcgtctcggagccgggcgccttctcctacgccgactttgtgcggggcttcttgctgcccaacctgccctgcgtgttttccagcgccttcacgcagggctggggcagccggcggcgctgggtgacgcccgcggggaggcccgacttcgaccacctgctacggacctacggagacgtggttgtaccagttgcaaactgtggggtccaggaatacaactcgaaccccaaagagcacatgactctcagagactacatcacctactggaaagagtacatacaggcgggctactcctctcccaggggctgtctctacctcaaagactggcacttgtgcagggactttccggtggaggacgttttcaccctgcctgtgtacttctcgtccgactggctgaatgagttctgggatgcactggatgtggatgactaccgctttgtctacgcggggcctgcgggcagctggtccccgttccatgctgacatcttccgctccttcagctggtctgtcaatgtctgtgggaggaagaagtggctcctcttccccccagggcaggaagaggccctgcgggaccgccacggcaacctgccctacgacgtgacctccccagcactctgcgacacacacctgcacccacggaaccagcttgctggcccacccttggagatcacgcaggaagcgggcgagatggtgtttgtgcccagtggctggcaccaccaggtgcacaacctggatgacaccatctccatcaaccacaactgggtcaatggcttcaacctggccaacatgtggcgcttcttgcagcaggagctatgcgccgtgcaggaggaggtcagcgagtggagggactccatgcccgactggcaccaccactgccaggtcatcatgaggtcctgctcgggcatcaactttgaagagttttaccacttcctcaaggtcatcgctgagaagaggctcctggtcctgagggaggcagccgctgaggacggtgctgggttgggtttcgaacaggcagcctttgatgttgggcgcatcacagaggtgctggcctccttggttgcgcaccccgacttccagagagtggacaccagcgcgttctcaccacagcccaaagagctgctgcagcagctgagagaggctgttgatgctgctgcggccccatagcacctgtcgtgaggatagaaggacgggtggacgagaggcagcctcctgctccggggcccttccagaaataaagaccgccctccctgtgacctggggcccacccctgtcgaggcttgtggcctggctgttcatggccactgcctgggtgcctgttttcaggtgaggcccaatgaggtcagggacccaagatgggatgtggcccttctgacctgcagcaggcctgctgggagctcggagatggtgccaggacctggctcttttggggcctgctccttggccggacgctgagctgcagggtctggtctgggggcgtcctgggggccctataggcgcctgtccccgttcggcttggc

SEQ ID NO: 348833 - DNA, 1031 bp, Homo Sapiens
ggggggtccttcgacccgtgctgagctggatggaccgcgagacgcgcgccctcgccgacagccacttccgaggcctgggggtcgaggtccccggcgtcggccaggctccgggccgggtagccttcgtctcggagccgggcgccttctcctacgccgactttgtgcggggcttcttgctgcccaacctgccctgcgtgttttccagcgccttcacgcagggctggggcagccggcggcgctgggtgacgcccgcggggaggcccgacttcgaccacctgctacggacctacggagacgtggttgtaccagttgcaaactgtggggtccaggaatacaactcgaaccccaaagagcacatgactctcagagactacatcacctactggaaagagtacatacaggcgggctactcctctcccaggggctgtctctacctcaaagactggcacttgtgcagggactttccggtggaggacgttttcaccctgcctgtgtacttctcgtccgactggctgaatgagttctgggatgcactggatgtggatgactaccgctttgtctacgcggggcctgcgggcagctggtccccgttccatgctgacatcttccgctccttcagctggtctgtcaatgtctgtggggaggaagaagtggctcctcttccccccagggcaggaagaggccctgcgggaccgccacggcaacctgccctacgacgtgacctccccagcactctgcgacacacacctgcaccccaccggaaccagcttgctgggccaccccttggagatcacccaagaaaacggcccaaaatggtgtttgttgcccatgggctggcaccccccagggggcccaacctggaatgaaacccttctccatcaaccacaaatggggtcaaagggctttcaaactgggccaaaaatggggggggccttcctttgcaacaggaagctaatgcgccccgggcagggaaggaggtccaaccaaagggaaagggaacttcctggccccgaaattgggaccacccccgt

SEQ ID NO: 348834 - DNA, 1937 bp, Homo Sapiens
tgggtggcgaattcggcacgaggcgccgagcggccgaggcgccgcggtcggctctgggactcgtctggcgtccctcagaggcagaagaggcctggaccttggcgcacacagacccaggaacagatgagcggggatgtctgcatccacacctggccgtgcacctactacctggagcccaagaggcgatgggttactggacagctgtccttaacatcgctgtcgctcaggttcatgactgacagcactggagagattctggtcagcttccccctctccagcatagttgagatcaagaaggaggcttcacattttatcttcagctccatcaccatcctggagaagggccatgccaagcactggttcagctccctgcggccaagtcgaaatgtggtcttcagcatcatcgagcatttctggagggagctgctgctgtctcagcctggagccgtggcagacgcatctgtcccaaggacccggggcgaggagctgacgggactcatggctggatcccagaaacgcctggaggacacggcgagggtcctgcaccaccagggccagcagctggacagcgtcatgagaggcctggacaagatggagtcagacctggaggtggcggacagattgctgacagaactggaatctcctgcttggtggccctttagctccaagctttggaagacaccaccggaaacaaagcccagggaagatgtctccatgaccagttgtgaaccctttgggaaagaagggatactgataaaaattcctgctgttatttcccacagaacagagtctcacgttaaaccagggaggctcaccgtccttgtgtctgggttggaaatacatgactccagttctttgctcatgcacaggtttgaaagagaagacgtggacgacatcaaggtccactcaccttacgaaattagcatccgccagcggtttattggaaagccagacatggcctatcgtttgatatctgccaagatgccagaggttatccccattttagaagtgcagttcagcaagaagatggagctgttagaagatgcattggtgctcagaagcgcaagaacctcttcccccgcagagaagagctgctcagtctggcatgcagcatctgggctgatgggccgtaccctgcaccgtgagccacccgcaggagaccaggagggcacagcactgcacctgcagacaagcctgccagccctttctgaggcagatacccaggaactaacccagatcctgaggaggatgaaggggctggccctggaggccgaaagtaagctggaaagacaagacgaagccctggatggcgttgcaacagcttgtgaacagggcaaccttaaccatcgacaagcacaacaggcggaggaagaggctgacctaggggcagaacgtccctggcattcctgtctcaccctgcacatcccgctgagatggagggctgggcggcagtgccagggctgcagaggcctgtggccctccggagtggtcttcctctggatggggctgctactgtggggctgcttctgcaccaggggcctccccaggtgtgcaccatgcctgcctcccacttggctgtccctgctgctgggcaggacccggccacatgttctgcggatgctgcagaagtgtggaccatggcgggaccccaaggacacttggcacaggcctggaagaggccgccctcgtcttgtctcggctccctttcatggacagactggccttcttagctgtactataaatttgtgagtgaagttagagcccagctcacttagccagctcactttgagggcatcctataaacacccaactgttcttttatcgtctcggttttagccaaaagtgaaattagcatgactgcatctttcaaacaaaaatattgatttctgcttttagggccccgtttccatccagaaataaagggaaatgctggcttc

SEQ ID NO: 348835 - DNA, 873 bp, Homo Sapiens
  misc_feature (19)..(19): n is a, c, g, or t
  misc_feature (85)..(85): n is a, c, g, or t
caccccccagggggagccnccgtgatgctgcctgccctgcctggagggtgcttccaagaaacaacggagatggtggtgaagaagnctctgggttccaaattccagttctcctttagggcgaaggggtgactgtggctaggtttgtcagttaccttatctataaaatgcacaggaccaggccgggcacggtggctccctcctgtggtcccagtactttgggagcctgaggcaggtggaattgcttgaggtcaggagttccagatcagcctgggcaacatagtgaaactccatcaggagactcgggtgtcaccccagattgacctctcaaggctcatttcttgtcagtccagtacccgtcccctcggttcacacgaccatccagaaacctcaaattcagtccatgcttcttgttttgggtctcggggctgggataaggcgggctgaccaccgcggggcatgtaggtagtttccgtggtgctgggggcgctctccagggaaggctacttggtctgcagaaaaggccttgacttgtgcatacctgggcagcgggcctgaaccagagcaccctcccgcgccggggacaccccacaggcggctcccgcgccaggccgcggcccagggagtcagccttccgcgcaagccggcgaaatcaaagtgcgtccggggttagaggtcagaggtcggagccgcgggtctttctccttcttcggccagcccaccaaacgtcaatttagaatgagacatgtgttgaaaatgggacggctactccccatccactactacgactctggcgggcgggttctccagctccaggtctcctaccccgcgggcgcgcgttccggttccgccgccgcaggcccggcgccctccgct

SEQ ID NO: 348836 - DNA, 1549 bp, Homo Sapiens
  misc_feature (4)..(5): n is a, c, g, or t
  misc_feature (11)..(11): n is a, c, g, or t
  misc_feature (20)..(20): n is a, c, g, or t
  misc_feature (37)..(37): n is a, c, g, or t
  misc_feature (41)..(41): n is a, c, g, or t
  misc_feature (85)..(85): n is a, c, g, or t
  misc_feature (90)..(90): n is a, c, g, or t
  misc_feature (106)..(219): n is a, c, g, or t
  misc_feature (231)..(233): n is a, c, g, or t
  misc_feature (238)..(238): n is a, c, g, or t
  misc_feature (242)..(242): n is a, c, g, or t
  misc_feature (251)..(251): n is a, c, g, or t
  misc_feature (254)..(255): n is a, c, g, or t
  misc_feature (259)..(259): n is a, c, g, or t
  misc_feature (275)..(275): n is a, c, g, or t
  misc_feature (354)..(354): n is a, c, g, or t
  misc_feature (971)..(1144): n is a, c, g, or t
actnnatttgnggtttctgnatggtcgtgtgcaccgngggncacgggtactgcactgacaagaaatgagccttgaaggtcaatcngggtnacacccgagtctcctnnnnnnnnnnnnnnnnnnnnnnnnnnnnnnnnnnnnnnnnnnnnnnnnnnnnnnnnnnnnnnnnnnnnnnnnnnnnnnnnnnnnnnnnnnnnnnnnnnnnnnnnnnnnnnnnnntggtcctgtgcnnnttatngatnaggtcactnacnnaccnagccacagtcaccccntcgccctaaaggagaactggaatttgaacccagagccttcttcaccaccatctccgttgtttctggaagcaccctccangcaggccagccagcatcacggggcctcccctagggctggaacgtctgcaggatgcccctttgagaaatgctgttccacagaaccctgcctttcaggccttggagacgtgggcagggaagaagcagcgtccctcagagccaggcctggcagtggtgctagcaggggccaaggcccagggagcagggtctcctgtcggagggacctgggcaagcccctccacgcgccagcgggtttctcagcaggggaggtccacaccacaccgcttgggaacctgggtgcctaaacgcaacaggagccaaggcacaaatttaaccaaacaccaaggttgcgtgaggccccatttcatgagccgggctccaaggacgtgtccttaggcggctctggaaggcccagcgccagcccccgtcctctgttaaagggagccagccccgcggctccgcccaggcatggtagcctgagcgcgcccccagggtagtagggggcacctgaggagcagggtctgccctggcatgagcagagcccaggatggggtcagggtcaggccctgccagaggctggagggtgcccaaggcgaggccggtgaggcccagctctacaaataaagtgttttatttacnnnnnnnnnnnnnnnnnnnnnnnnnnnnnnnnnnnnnnnnnnnnnnnnnnnnnnnnnnnnnnnnnnnnnnnnnnnnnnnnnnnnnnnnnnnnnnnnnnnnnnnnnnnnnnnnnnnnnnnnnnnnnnnnnnnnnnnnnnnnnnnnnnnnnnnnnnnnnnnnnnnnnnnnnnnnnncgacgccagccagccaggcgcggcggagggagggaccaaacgagacagggaggacgggagaaggaagcaggagagggaggagcgaagaagcgacagggacacgaaagacgaagagaacggcggcacagggcgagagccacgacgacgagagagctgaggatgataatagaggcggcagccacgagcgggacaagacagaactatagcagaggaagctcaggggacgcggaggagacggaaacataaggaggtagaggggcagacagaagacgaaaggaggcggaagaaaaagagacacgagggcgagacggccccgccgcgcggggccggggagtcgagcagaagacagcaagagcgcggaagcagacagtagaattgatcgactgagaggggcgaaacgcaaga

SEQ ID NO: 348837 - DNA, 1305 bp, Homo Sapiens
  misc_feature (171)..(179): n is a, c, g, or t
acacaggcccgtccgcggcgtccacgcctccggcggagcgcccccattttcgtcacgagggggctcactgtgggaggtggtttatgaccctccaagggagacggcgcccgggtgttgtgggggacgccgccaacggggagagtgcgcgccctgagccactagccgtgagcnnnnnnnnnaaccggagctcggagggtttgaaatcttcggcgtttccgtttagggggaagagaggtgaacccgaccgcagggggtgtcgaagttgcgggattttgtgaaaagtggccgggggtccagcgcggggggcacggagggtaccggcctggaatccccaaatacttttgggagggcgggggcagggggaattcttgaggggtcaggaagttccaaatccaggcggggcaaccataggaaaactcccatcaggagaattggggtgtcacccaaatggacctccaaggggcatttccggtcagtccagtacccgtcccctcggttcacacgaccatccagaaacctcaaattcagtccatgcttcttgtttggggtctcgcggctgggataaggcgggctgaccaccgcggggcatgtaggtagtttccgtggtcctgggggcgctctccagggaaggctacttggtctgcagaaaaggccttgacttgtgcatacctgggcagcgggcctatgagtggcagcgagagcggggtaaccagagagggcacaccccccaaccggagcgccccccaggttggcatctccacaactgtagaacctcccccatcagggcaaccctcccgattgggacaccgcccccagccagacacatcctcctagcagaacacccatgcttagccggagccgctcccccgccagacacctccccaccgggaaaccctccccagtgggacaccccagccagtccaggtattcccgccgttagggacaccccctccagccggagcataccctcggcaggggcattcctcccaaccgagggaaccccgccgcaacgggaacctgcctgaaccagagcaccctcccgcgccggggacaccccacaggcggctcccgcgccaggccgcggcccagggagtcagccttccgcgcaagccggcgaaatcaaagtgcgtccggggttagaggtcagaggtcggagccgcgggtctttctccttcttcggccagcccaccaaaacgtcaatttagaatgagacatgtgttgaaaatgggacggctactccccatccactactacgactctggcgggcgggttctccagctccaggtctcctaccccgcgggcgcg

SEQ ID NO: 348838 - DNA, 594 bp, Homo Sapiens
  misc_feature (454)..(454): n is a, c, g, or t
  misc_feature (521)..(521): n is a, c, g, or t
  misc_feature (536)..(536): n is a, c, g, or t
  misc_feature (561)..(561): n is a, c, g, or t
tggggggaaggagaagccagagctccagcggcgccgcggggcggcagtcaagaccagagccggagccgtcactcacctctggattagcctgaagcggagactaccggctgcggagcggcggggcgagacacttgctcgccttttgaccccatcatgtcgcggggctccatcgagattcccctccgggacactgacgaggtcattgaacttgacttcgatcagttaccggagggagatgaagttatcagtattctgaaacaggaacacacacaactgcacatatggattgctttggcgctggaatactacaagcaaggaaaaacagaagagtttgtaaaattgttggaagcagcacgtatagatggcaatttggactatagagaccatgaaaaagaccagatgacttgctttgggatacattggcagccgtatttatgtaccaacaagggcttcnggaaagaaaaggaaattaaagggaccaatttaaaaaagggaatcttttatttaccaccagggccccncccctttggtttggngattaccaaatggggccccgatttnaaaaatttaatttaattggtattggaattcaag

SEQ ID NO: 348839 - DNA, 1007 bp, Homo Sapiens
ggtcgagactggcagcagacagggattagggtagggatgtgacaaggtgaggaagggaggtggcagagctgctcaccttggagatagccagagggacagggaacctggggacgggggatggtgccagctgtggccctggctcctggggcctccaggaagggaagaaggaaccagggcagagcaacagccaggagctcaccttctccaggttggtgttgtccagccagagggtctccaggttgcttatggaaccacagagaacagtcccgtgacattcgcgcacttccctgaggacactgtggagcagaaggcagaaagcgtgggcagaattatgcctcacacggagagatgtcgccacaatgaatgagcagggcttctgcaagatcgtgggccgctctaaggatatgattcatccggggtggtgagaacatctaccccgcagaacttcgaggacttctttcacacacacccgaaggtgcaggaagtgcaggtggtgggagtgaaggacgatcggatgggggaagagatttgtgcctgcattcggctgaaggacggggaggagaccacggtggaggagataaaagctttctgcaaagggaagatctctcacttcaagattccgaagtacatcgtgtttgtcacaaactaccccctcaccatttcaggaaagatccagaaattcaaacttcgagagcagatggaacgacatctaaatctgtgaataaagcagcaggcctgtcctggccggttggcttgactctctcctgtcagaatgcaacctggctttatgcacctagatgtccccagcacccagttctgagccaggcacatcaaatgtcaaggaattgactgaacgaactaagagctcctggatgggtccgggaactcgcctgggcacaaggtgccaaaaggcaggcagcctgcccaggccctccctcctgtccatcccccacattcccctctctgtccttgtgatttggcataaagagcttctgttttctttggct

SEQ ID NO: 348840 - DNA, 723 bp, Homo Sapiens
  misc_feature (329)..(358): n is a, c, g, or t
  misc_feature (620)..(621): n is a, c, g, or t
  misc_feature (681)..(681): n is a, c, g, or t
cgccgctctgtctcattccctcgcgctctctcgggcaacatttcgggtgtggaggaggtagcggcctccgggagccacctgaatggcgacctggatccagacgacagggaagaaggagctgcctctacggctgaggaagcagccaagaaaaaaagacgaaagaagaagaagagcaaagggccttctgcagcaggggaacaggaacctgataaagaatcaggagcctcagtggatgaagtagcaagacagttggaaagatcagcattggaagataaagaaagagatgaagatgatgaagatggagatggcgatggagatggagcaactgnnnnnnnnnnnnnnnnnnnnnnnnnnnnnngaggaccaaaagttcaaacagaccctccctcagttccaatatgtgacctgtatcctaatggtgtatttcccaaaggaccaagaatgcgaatacccacccacacaagatgggcgaacaactgcttggagaactacaagtgaagaaaagaaagcattagatcaggcaagtgaagagatttggatgatttcgagaagctgcagaagcacatcgacaagttagaaaatacgtaatgagctggatcaagcctgggatgacaatgatnngaaatctggtgggtggaagacttgtcacgcaagttaataaaggagaatgggataaatgcnagcctggcatttctaactggaggtctctcaattgtgctggcc

SEQ ID NO: 348841 - DNA, 1975 bp, Homo Sapiens
  misc_feature (382)..(411): n is a, c, g, or t
agcggagcttccggcgtggctggtgtaggcgggtggagaaggatcggggccctcgccgctctgtctcattccctcgcgctctctcgggcaacatggcgggtgtggaggaggtagcggcctccgggagccacctgaatggcgacctggatccagacgacagggaagaaggagctgcctctacggctgaggaagcagccaagaaaaaaagacgaaagaagaagaagagcaaagggccttctgcagcaggggaacaggaacctgataaagaatcaggagcctcagtggatgaagtagcaagacagttggaaagatcagcattggaagataaagaaagagatgaagatgatgaagatggagatggcgatggagatggagcaactgnnnnnnnnnnnnnnnnnnnnnnnnnnnnnngaggaccaaaagttcaaacagaccctccctcagttccaatatgtgacctgtatcctaatggtgtatttcccaaaggacaagaatgcgaatacccacccacacaagatgggcgaacagctgcttggagaactacaagtgaagaaaagaaagcattagatcaggcaagtgaagagatttggaatgattttcgagaagctgcagaagcacatcgacaagttagaaaatacgtaatgagctggatcaagcctgggatgacaatgatagaaatctgtgaaaagttggaagactgttcacgcaagttaataaaagagaatggattaaatgcaggcctggcatttcctactggatgttctctcaataattgtgctgcccattatactcccaatgccggtgacacaacagtattacagtatgatgacatctgtaaaatagactttggaacacatataagtggtaggattattgactgtgcttttactgtcacttttaatcccaaatatgatacgttattaaaagctgtaaaagatgctactaacactggaataaagtgtgctggaattgatgttcgtctgtgtgatgttggtgaggccatccaagaagttatggagtcctatgaagttgaaatagatggggaagacatatcaagtgaaaccaatccgtaatctaaatggacattcaattggggcaatataggattacatgctgggaaaaacagtgccgattgtgaaaggaggggaggcaacaagaatggaggaaggagaagtatatgcaattgaaacctttggtagtacaggaaaaggtgttgttcatgatgatatggaatgttcacattacatgaaaaattttgatgttggacatgtgccaataaggcttccaagaacaaaacacttgctaaatgtcatcaatgaaaactttggaacccttgccttctgccgcagatggctggatcgcttgggagaaagtaaatacttgatggctctgaagaatctgtgtgacttgggcattgtagatccatatccaccattatgtgacattaaaggatcatatacagcgcaatttgaacataccatcctgttgcgtccaacatgtaaagaagttgtcagcagaggagatgactattaaacttagtccaaagccacctcaacacctttattttctgagctttgttggaaaacatgataccagaattaatttgccacatgttgtctgttttaacagtggacccatgtaatacttttatccatgtttaaaaaagaaggaatttggacaaaggcaaaccgtctaatgtaattaaccaacgaaaaagctttccggacttttaaatgctaactgtttttccccttcctgtctaggaaaatgctataaagctcaaattagttaggaatgacttatacgttttgttttgaatacctaagagatactttttggatatttatattgccatattcttacttgaatgctttgaatgactacatccagttctgcacctataccctctggtgttgctttttaaccttcctggaatccattttctaaaaaataaagacattttcagatttgaaaa

SEQ ID NO: 348842 - DNA, 993 bp, Homo Sapiens
taagacttattaaaacagatcgctgggccctacacccagaggctgtggttcagtaggctgtagtaaaccagtaatttgtatttctatgacgttcccaggttctaatgctgttccccaaggccacaccttggaaaccaccacattaaaatacccagaaggcattaattcccagtccttcctctacacagctgcaaaacaatggtcctgaccatttcatctttgcactacatccttcactgtctctcttttgcccataggataagtacaaactagatctggttactgcctgccccaccagcctcagcatctctcacaactaggactaactttttcttctgacaactataaaatatttcccttgccttctcaagtttgctcaaggtcaagttatgccttttgcctggaatgacttgacttctcttttgttttacttaactggctgcttttcatcttgtaggttaggtcaaggactccaggaagtcttccctggacaagtaatgaagagggcataatccaagggccaactcccatgtttggaacctgactccattttcaggcacgtaatattgtcaaattccttttaaaagcacctgtctgtctgttaacgttggtgcagatactgctattcccctcctccataccattgctgatggttactgagggtatgggaagggccgactagtccagctgttcacaaacagcccttaatgtcaaactgaatactgccaacgtagttccagtttctgtatctaaagactcagcttggagtcacttgtctggactaaaagtaacccctccttgtctggtttgtgactttctgtactctgatgcccccagctttctgccttctagaaatttgtcagaatttccaaaattcttgggccttccttcttgctctatatatggttttggattcattccttttaaaaaatatttactgtcatttcagtagaattttgacacaataaatataagcacatcagattttttgcc

SEQ ID NO: 348843 - DNA, 434 bp, Homo Sapiens
catttctgaaaaaaaattactgaaccatcagaaattcataaaatctctaatttttacataagaattattttcaagcttaccagtaaacttggttgtcatatattataccaagaactgctgctgcactaattgtgtacgctgcacagtctctgaataggggccaacatgatagtgttgagacctgtaatatggtaagttattatttccattacattgtaacttcttcaagtacaatccttagtataatactaaaattgtttatatatttgtagttaaatattgttatcttttgcatattgcttagagaaaaaaatgtaaaattgtgttctaacttacacagactttcataaatctgaccaagagctatttgtggattaacattaaattgaatacatgttgtttttctactgattaataaatttgattgcacatat

SEQ ID NO: 348844 - DNA, 1332 bp, Homo Sapiens
  misc_feature (789)..(852): n is a, c, g, or t
  misc_feature (862)..(969): n is a, c, g, or t
ggcccatgagattcccaccgtcataatctgaaacaaacaaaggcgtacgaggaagaggcccacggccttcatgggcctctgagccggaacgcccatccattattagggcatcagaactgaaggagcttgaaaaatttgataacatagatgcagaagctgatgaaggttgggcaggtgctcagatggaagtagattatacagagcaactgaatttcagtgatgatgatgaacaaggaagtaacagtcctaaagagaataacagtgaggatcaaggttcaaaagcctctgaaaacaacgaaaacaaaaaagaaacagatgaagttttcaacactaaatcatcttcccaaatacctgcccaaccatcagtagcaaaagttccctatgggaaaggaccttcatttaatcaggaacgtggaacatcttcacatctgccaccacctccaaagttgcttgcacagcagcatccacctccagatcgacaggcagtacctggaagaccaggcccctttccctccaagcagcaagtagctgatgaagatgaaatatggaagcaaagacgaagacaacaatcagaaatttctgcagcagtagaacgtgctcgtaaacggcgtgaagaggaagagcgaagaatggaagaacaaaggaaggcagcttgtgcggagaaactgaaacgattggatgagaagcttggcatcctggaaaaacaaccatctccagaggaaattagggaaagggagcgagaaaaagaacgggagcgtgagaaagaacttgaaaaagaacaagaacagnnnnnnnnnnnnnnnnnnnnnnnnnnnnnnnnnnnnnnnnnnnnnnnnnnnnnnnnnnnnnnnnaaggagcagnnnnnnnnnnnnnnnnnnnnnnnnnnnnnnnnnnnnnnnnnnnnnnnnnnnnnnnnnnnnnnnnnnnnnnnnnnnnnnnnnnnnnnnnnnnnnnnnnnnnnnnnnnnngaatgtgagctggagaaggaaagggaaaaattagaggagaaaattgaacccagagaacctatttagagcccatggtagaaaaacaagaaagtgaaaacagctgtaataaagaggaggaacccgttttcactagacaagacagcaatcgcagtgaaaaggaagccacaccagtggtgcatgaaaccgaaccagaatcagggtctcaacctcggccggctgtattatctggctatttcaaacagtttcagaagtcttttactccaacgattccagcggcagcaggaaacagatgaaaccgccagcagtgggcagccacagccaacagcaaggttgtactttcccccgaactgttcccttccccaa

SEQ ID NO: 348845 - DNA, 362 bp, Homo Sapiens
tagataggacactaaagccaagatccatgaaagaaagaattagtaagctagacttcatcaaaaatgtctgctctgcaaaagacactgtcaagagaatgaaaagcaaccaaaagaatgtgagctggagaaggaaagggaaaaattagaggagaaaattgaacccagagaacctaatttagagcccatggtagaaaaacaagaaagtgaaaacagctgtaataaagaggaggaacccgttttcactagacaagacagcaatcgcagccaaaaggaagccacaccagtggtgcatgaaacagaaccagaatcagggtctcaacctcggccgactgtcatctcagcggggatcctaatagagtcga

SEQ ID NO: 348846 - DNA, 952 bp, Homo Sapiens
  misc_feature (22)..(22): n is a, c, g, or t
  misc_feature (739)..(748): n is a, c, g, or t
agtgccttgtttccaagggagnaactgcagcccagacctcatctccaggcttgaagtatttcacatcaagcccacattccatcaccacgccagagacatcccgacccagagtcagaggaaattcttctcctttgattttcacgtgtaaaggatcacgcttcatatttaaagctgtagctccataaccacttctcatattaacgtctataggatttacactgccagcgtgaactttgacaatgacttcatttggatagtggtatgataggcatcatcatgttctgagtgaatcgaagcacttcattcttcccatatttatctatcacccaagcaggcatgacagtgctcctaggagaggtagtactaatccttctaactgaaggcttttggacaactttgcttctccagaagcaaaccgcagtgcatgcatttcttctaagtacacaagtcttcagaaattccattgtaaacactggttgaactgcgtgctcaaattcaaatacacttggactggatcaaactctcacccctgaattcagtcaaattctgccaaaccacggggctagtttcaaaattaagcatgcaaaacggagcattcgaaaatgaagctaatctaatggagaaactgaaagaagaatacggaactgttattccgctcttcgcatatgaaatgctcgaattaacgttccagtcagtattctgtccattctcctccctcactttcaccccctccactttnnnnnnnnnnggggggcggggcattaaaaagcaggtgcgcaaaccccctagatccctgccctgtcctgggagccctcggcgggacaagcagacaccgctcgcgatccaacgccagagaatcgaacgcttgccgactgccgccgcgaccctggcccggaatctccttgcctgcccgctctccttagccgcctcgtgccgaattcgccacccaggc

SEQ ID NO: 348847 - DNA, 483 bp, Homo Sapiens
tgcgtcaagcgttctcaagctgtgagaatgtgcgcagctccaggcaggttttctctcggagagttaagtcttcccttgaaggcagggaagcaggatggatacacatatatcacacgcataaaacaccaggtgcgggagcagcccagactcaaggctgactaaactggaggctgaataccgtggaggtccacatgcagcttccctggagggcaggccggaggcgctcccgcccctgggcttgaggatgctgcaccccgtgggcttccaggcctgcccagatgatgccttcaggcctctgtccctggcggccatcctcaggccgattttgaccagcaatgatagactcttcttaaccctttcaaaataaatttttcagtgggacagaaaggagagttaaaaaacatttttttaaaggtggtaacatctgacccacaaagggaatgggtctgttttatgcaaaataaaagtttttcaaataaaaaa

SEQ ID NO: 348848 - DNA, 481 bp, Homo Sapiens
  misc_feature (20)..(20): n is a, c, g, or t
  misc_feature (42)..(42): n is a, c, g, or t
aaacgttctcaactgtgaanaatgtccgcaactcccaggcangttttctctcggaaagttaagtccttccccttaaaggcagggaagccaggatggatacacatatatcacacgcataaaacacccaggtgcgggagcagccccagactcaaggctgaactaaactggaggctgaataccgtggaggtcccacatgcagccttcccctggagggcaggccggaaggcgtcacgcccctgggcttgaggatgctgcaccccgtgggcttcccaggcctgcccagatgatgccttcaggcctctgtcctggcggccatcctcaggccgattttgaccagcaatgatagactcttcttaaccctttcaaaataaatttttcagtgggacagaaaggagagttaaaaaacatttttttaaaggtggtaacatctgacccacaaagggaatgggtctgttttatgcaaaataaaagtttttcaaat

SEQ ID NO: 348849 - DNA, 903 bp, Homo Sapiens
  misc_feature (45)..(45): n is a, c, g, or t
  misc_feature (126)..(126): n is a, c, g, or t
ttatgtggtgtggtgtcctgtgtgtctttgggagaaatatatatnattttttccaaataggaagccaacatatcaagtgatgacattaaagtatgcctgcagaatatatattctaaaactacaaanaaagtcactgaatatcaaaatgatacagcttatacatatagttactgtgacaagtgacagactgctagttcagaattcaacaatcctttcctagtttgtgagataatgggctaaattccttctgcctgccactggggcaaagcaaattgctttagtttttgatgagagttcttagaagtttgttggtattccttcatccacagcatccattgttgaaataaccattttcagttgtgatgccttaactaagaagccaattgttagcctgaaatgcaatcttggtagccagtttcaatgaagctagagattagtcagaaaaagttagctgttgggctttagaaagggattttgagtcctgtcatttctacttgggagcattttggagcagattagtctttcagtataaaaacaagtggctacctgatggaaacttttcttacccttatagggaaactgagcacaagctgaatgatattgtctgctgccaggaagagacatcgaagcaaaagagtcaaacaaaactagaaacctagaagaaatgggaaaacaatagagggtgcctctagaatcgaaagcaaatctgagagacgagacaccatagaccgaatatttatcgttgaaatccatcttatccatcatctcatggggtgcaacaggactcctcgatcctgggtgagcattatgggtacgacagttttattacgcaaagatttattacgtaccatagatgtgctgagtgtaccattgtaccttgagcacatacatacgataccttat

SEQ ID NO: 348850 - DNA, 1199 bp, Homo Sapiens
  misc_feature (212)..(212): n is a, c, g, or t
gggccaccagaagggggaaaggccccctccagggggggccagatggttccttgattattggtccaatgggtggccccccccaggaggggaaaagccagccccaagacccggagggaaatatccagcctgatggctggggcaggcccgggagttggtaagtgtggctggggagcttccctcctggaagcagaagaacccgagcctccccctgncgcgtgcagcaccagtggggtcgggtcttgaccgagaactcggcctcacagaatcgggctcattgcttcctcccacacaagtttggcacactctaggcggtttgtgtggctgcggcagtggcagcagcgggaatatccaatctccaggaaattgagggtctcaccctggcgagtgaggtgggagtagctggacttgtggtaggttccagggaccatataccacatgctgacggttaggaaggcagatttggttcagattgtctggagaaggccgcccaggggggaagccatccagccggtggccccagcccccttgggaccggtcctgttggcagtgctgggctgcattccaggactcaggttctggatggctctggtccccaaatggagctggcgttccttccttctgttcattggggtgctggagagagggcagctctttttggagggggacagcttcctgagggagagggggacccacttccttttcagcagggagttgggcaggtagcagcttttcctgttggagaggggtggcctcctgagagggagggggctgcacttgactctgtccctcaaagggagggccatgctgagaggagtcagggtgatccatggggaggcttcgggataggggtggggaggggggagctgcgtagccaacttcttgaaagtgctctggcctcagctgcctctgtcctgtagccgtgaagcctccctcagaggcagcagaagcaacagccaaataggtcaagaccaaggctgctctggctgtggtccccatcctggggcaactgaccactggacactcagaggtgggtcctctcaggcaagtctggatgtgaagggccggccactgaagcttgtctggtggctgttacggttgtgagcttcaggaccagctcttcttttataattgtctggtgtgatctcccgccctccccagcttcctgccatgactcccccttctgtcgtcttctcgcagca

SEQ ID NO: 348851 - DNA, 1218 bp, Homo Sapiens
atcaggccaaatcggccgagctcgaattcgtcgagagcgggggcgggcggaggcggaagtagcggtgccgggcccggggagtaggaaggagccggggctgtagccggagtggagcggctgccagccgaggagcaggcgcggccgcggcgccatattgcggccctcagcggccgcgaccgagtcatggctgagacctacgacttcctcttcaaattcctggtgattggcagtgcaggaactggcaaatcatgtctccttcatcagttcattgagaataagttcaaacaggactccaaccacacaatcggcgtggagtttggatcccgggtggtcaacgtgggtgggaagactgtgaagctacagatttgggacacggctggccaggagcggtttcggtcagtgacgcggagttattaccgaggggcggctggagccctgctggtgtacgacatcaccagccgggagacatacaactcactggctgcctggctgacggatgcccgcaccctggccagccccaacatcgtggtcatcctctgtggcaacaagaaggacctggaccctgagcgggaggtcactttcctggaggcctcccgctttgcccaggagaatgagctgatgttcctggagaccagcgctctcacaggcgagaacgtggaggaggcgttcctcaagtgtgcccgcactatcctcaacaagattgactcaggcgagctagacccggagaggatgggctctggcattcagtacggggatgcgtccctccgccagcttcggcagcctcggagtgcccaggccgtggcccctcagccgtgtggctgctgagctctgtggagccagctcacctgttctccaggaccagccctgctggggcccaggcccaggctctgagaggccgtgtcctaacctgccctggcccggagaagctacgttgccacctgtcccccttccctggcctggtggggcctggctttggggcaagactgagccacgggggaagggggaatcccgtacctgctgctgcttcctctgtcttggctaacgtctgtccccctgaacccctaaccatatcccaagagctcccaaagcctgagaccagggtcatttgtccccaactccccatctggccctgctgttgctagtacctgttatttattacctggaggcctgtccagcacccaccctacccccataaagcattgtttacacctgtaaaaa

SEQ ID NO: 348852 - DNA, 1108 bp, Homo Sapiens
agcggactggcggtcgctgttctaggcgcgcgagctagttgcctcccgtacctgccgcggtcgccggccccgcccccgggagcgcgggccaatgggctgggctccaggggcggggctggcgggcgggcggtgcggccgtggcggtagctgcaggggcggtggcggctgcagtggtggtggtgcctgtggctgtggctgcggctgcggctgcggctgagatttggccgggcgtccgcaggccgtgggggatgggggcagcgagctccagccctcggcggtggcggcggccgtaggtgtggggcgggcgtccgcgtccggcacgcgagatggagcgccgtggatttcagtttttctgactgttacatgaaaggatgattgctcacaaacagaaaaagacaaagaaaaaacgtgcttgggcatcaggtcaactctctactgatattacaacttctgaaatggggctcaagtccttaagttccaactctatttttgatccggattacatcaaggagttggtgaatgatatcaggaagttctcccacatgttactatatttgaaagaagccatattttcagactgttttaacagaagttattcatatacgtctagaggaactgctccgtgttttaacagtctataatgaataaacatcagaacctcaattctgttgatcttcaaaatgctgcagaaatgctcactgcaaaagtgaaagctgtgaaccttcacagaagttaatgaagaaaacaaaaacgatctcttccaggaagtgttaacttctattgaaaccttgggcatttacctttggaaatatcccttacaaacttccttatgggagatgtcagccatgattcattatcgcgactgcctgttcccgagaaactaagtcgttcgcaaacatgtttctgtgcgaattcagtgggacttcatccagtgaacaacaggaaccattttccccctttagcaacctagaccacggtgctgtctcaagcacacctgtactctaatcgaccctgcgtttgcacatatgctaaaacctgtgtccacagtacttaagaacatcagtccacgggtcgaaaccaacctaaccggcaatgcttccgcgcaaca

SEQ ID NO: 348853 - DNA, 324 bp, Homo Sapiens
tgcagaggcgttaggatcgcaagcgctgtccaaaagaatgccaccagcaccaaggcagaagctgaaagaacttttgcagaagttacagatctggataatgaggtgaacaatatgttgaagcaactgcaggaagcagaaaaagagctaaagagaaaacaagatgacgctgaccaggacatgatgatggcagggatggcttcacaggctgctcaagaagccgagatcaatgccagaaaagccaaaaactctgttactagcctcctcagcattattaatgacctcttggagcagctggggcagctggatacagtggacctgaataag

SEQ ID NO: 348854 - DNA, 1007 bp, Homo Sapiens
  misc_feature (46)..(82): n is a, c, g, or t
ggaaagtactacctaaagtgggacctgaggttcccgggggcggcgnnnnnnnnnnnnnnnnnnnnnnnnnnnnnnnnnnnnnatcaggccaaatcggccgagctcgaattcgtcgagagcggggagctgtggagttgatcctgaatgaaagtggcgcgccgcccctgacgttacccggatcggagaggttggaattcagattacggctgcgattcgggtgtctcggaccccggtgtgcaccggaccacggggaggcggctccaaaggcgcggtgaacgttggtgagggagggcagctctgcgcagccccaagacatggctcacaacaagatcccgccgcggtggctgaactgtccccggcgcggccagccggtggcaggaagattcttacctctgaagacaatgttaggaccaagatatgatagtcaagttgctgaagaaaatcggttccatcccaacatgctctcaaattacctaaagagcctaaaggttaaaatgggcttgttggtggacctgacaaatacttcaaggttctatgaccgaaatgacatagaaaaagaaggaatcaaatatataaaacttcagtgtaaaggacatggtgagtgccctaccactgagaatactgagacctttattcgtctgtgtgagcggtttaatgacaagaaatccacctgaacttataggtgttcattgtactcatggcttcaatcgcactggtttcctcatatgtgccttttaggtggagaaaatggattggagtatcgaagcagcagttgctacttttgcccaagccagaaccccaggaatctacaaaggtgattatttgaaggaactttttcgtcggtatggggacctagaaggaagcaccacccccaacctctatggccgaattggtggtttggaggatgatgaagaagaaaaatgaggatgcaggatgggaaagaaaggaatcaaaacccccggtccaggtgctttccttttggccaaagggagaaaaaaacgggttaa

SEQ ID NO: 348855 - DNA, 836 bp, Homo Sapiens
cggtccggaattctcgggatggacccccgtctgcccgcctgggcactggtgctgctgggccctgccctggtgttcgcgttgggccccgcgcccaccccagagatgcgtgagaagttgtgcggccaccacttcgtacgcgcgctagtgcgcgtgtgcgggggcccccgctggtccaccgaagccaggaggcctgcggccggaggcgaccgtgagttgctacagtggctggagagacgacatctgctccatgggctggtggccgacagtaatctcacgctgggacctggcctgcagcccctgccccagacctctcaccatcaccgccaccaccgtgcagctgccaccaaccctgcacgctactgctgcctcagtggctgtacccaacaagacctgctgaccctctgtccctactgattcctccttgggtgcagcctcagagtggcctgaggcccagagggtctggtctggtgagctcctgaggccacacagcaccataaagtctcgcatctacaggcctttgattacctcctgggatgggtgctcactatctaccccagaccaatgccacctgcagcctgtggagtcaactgcagaataaatcacaccctagccctggcttggaggatccccgctttcacagatgctggacactgacagccaaatgtcctcactccagaggagccccagacgctccgctccctgcatgtgtaacaccccttcttgctgtctcttagtaaataaacgacccaaagcagcaaacaaaaaccaacataaataatacctactacaataaacaaccccacctccctacacccaccaacccaaactatcaccca

SEQ ID NO: 348856 - DNA, 331 bp, Homo Sapiens
agactccttctcaaaaaaactctggctgggtgtgtgtgggtggggactagggggatgcctgaatgagaatccctgaatccttgagtgtgggggttcaggaatatgtatctaacaagctccttggattagtcaagtttgtgtgtgggctcaggaatatatgtatctagcaagctcctcagactagtcaactttcttaatagtctgcatatttgtatattgcccagaaagggacactttttggaatatactttctttttttaacttatttcgcattatattgtttacttaataactccaagcaaataaatgtacatctttagcaacattccca

SEQ ID NO: 348857 - DNA, 1275 bp, Homo Sapiens
  misc_feature (1200)..(1202): n is a, c, g, or t
  misc_feature (1204)..(1204): n is a, c, g, or t
  misc_feature (1206)..(1206): n is a, c, g, or t
  misc_feature (1209)..(1210): n is a, c, g, or t
  misc_feature (1212)..(1212): n is a, c, g, or t
  misc_feature (1214)..(1215): n is a, c, g, or t
  misc_feature (1217)..(1219): n is a, c, g, or t
  misc_feature (1221)..(1226): n is a, c, g, or t
gctggtaccgggtccgggaattcccgcggatcactcaaccttaagacctactgttctaaagctctgacattatgtggttttagattttctggttctaacatttttgataaagcctcaaggttttaggttctaaagttctaagattctgattttaggagctaaggctctatgagtctagatgtttattcttctagagttcagagtccttaaaatgtaagattatagattctaaagattctatagttctaggacatggagggttctaaggcctaggattctaaaatgtgatgttctaaggctctgagagtctagattctctggctgtaaggctctagatcataaggcttcaaaatgttatcttctcaagttctaagattctaatgatgatcaattatagtttctgaggctttatgataatagattctcttgtataagatcctagatcctaagggtcgaaagctctagaatctgcaattcaaaagttccaagagtctaaagatggagtttctaaagtccggtgtttctaaaatgtggatattctaagacttactctaagatcttagattctctgtgtctaagattctagatcagatgctccaagattctagatgattaaataagattctaacggtctgttctgtttcaaggcactctagattccattggtccaagattccggatcctaagcatctaagttataagactctcacactcagttgtgactaactagacaccaaagttctaataatttctaatgttggacacctttaggttctttgctgcattctgcctctctaggaccatggttaagagtccaagaatccacatttctaaaatcttatagttctaggcactgtagttctaagactcaaatgttctaagtttctaagattctaaaggtccacaggtctagactattaggtgcaatttcaaggttctaaccctatactgtagtattctttggggtgcccctctccttcttagctatcattgcttcctcctccccaactgtgggggtgtgcccccttcaagcctgtgcaatgcattagggatgcctcctttcccgcaggggatggacgatctcccacctttcgggccatgttgcccccgtgagccaatccctcaccttctgagtacagagtgtggactctggtgcctccagaggggctcaggtcacataaaactttgtatatcaacccnnnananaannanannannnannnnnnacatgtcgggccgcctcggcccctcgaggagctttctaaaccatttctt

SEQ ID NO: 348858 - DNA, 445 bp, Homo Sapiens
  misc_feature (82)..(82): n is a, c, g, or t
ccttttgcttgaaatctgccctcttctaggacccatgggttaaaaaacccaagaatcccaaattcctaaaaaccttaaaagntcctaggcactggtagttcctaagaactcaaatgttcctaagtttcctaagattcctaaaggtcccacaggttctagactattaggtgcaattttcaaggttctaaccctatactgtagtattctttggggtgcccctctccttcttagctatcattgcttcctcctccccaactgtgggggtgtgcccccttcaagcctgtgcaatgcattagggatgcctcctttcccgcaggggatggacgatctcccacctttcgggccatgttgcccccgtgagccaatccctcaccttctgagtacagagtgtggactctggtgcctccagaggggctcaggtcacataaaactttgtatatcaacg

SEQ ID NO: 348859 - DNA, 1435 bp, Homo Sapiens
  misc_feature (71)..(203): n is a, c, g, or t
tggctggtacggtccggaatgttttgggatatcgtcgacccacgcgctcgatttatcgcgtattcgtactnnnnnnnnnnnnnnnnnnnnnnnnnnnnnnnnnnnnnnnnnnnnnnnnnnnnnnnnnnnnnnnnnnnnnnnnnnnnnnnnnnnnnnnnnnnnnnnnnnnnnnnnnnnnnnnnnnnnnnnnnnnnnnnnnnnnncctattaaattgaggctagagctggagatgtaattggtttttgagaaacattagtataaagcttgcccttgttgtgtggaagaagccattttgtactgctttaaagttagactaatattctcagcacgggtgtatggggacctcattacctatttttttcatcatttaccctaggtaagaactttgatcactgcttactaggtaaagaatgtttgtactgttccaaaacccaggcttctttattcctttaccactatccatgtgagcattgacaaatcatggcttagaggtgctcactgactcgctaagacgactttggccctgttgatgactggtgctgtgctccagccttatcagttaggggacccaaggtttgtttgggacctgggtacaggtaaaagccagacttggcagggacccctctttctaggctgaaccttgagtccccctgctttttggcagacctaatggatcactgtcttgcagctagttcttcatgtggggcctcttaggccagtgccggaggaggcatgctcctctttctatgccacagaacaaacactactctagcagagcctttcttgcactttaaagtgagattaatttagctgtaatttggttaaaaacttcctaagagagaaaattaagtctactgatttggtataggtaaatggacattaaacttttttaaagtaaaggagatggtagataccgttagattatagtcttgaggttcatgtgaagccagtggtgttaacttactttgatttccttgttcaggtcagggcctggaacgcctgtgcggggaggtcactcaattcaaaattttctgtatgaaagcatttttcaccaaaatgagcctcatccctttatgcaacacataaccttactgagggagggaaatacggaagccacctttttatttctcttcactgtgtacaagttcacttgttgtcttgaacactgtctcaaatacctgctttttgttttggatagtaccttgtctgtataagaagctggcctttccatagagaggccctggagtctaaaattatgagaacaattaatttatttgtgtcttctattatgatctcgttttgacaataaaaatccttactactttctcaaaaaaacaagaaaactcgagcgggggcccggtccccaattcgccctatagcgaagtcgattacaattcactgcccggcgttttaccgtcgtgctgggccctggcg

SEQ ID NO: 348860 - DNA, 647 bp, Homo Sapiens
  misc_feature (52)..(52): n is a, c, g, or t
gaccataatccatattggcctttaaatttatggtccagaactcctaagtggncggcctacaacccagaacccaaaaaaggtgcgttcggcctctggtaatccatctcggctaataaattataagaaccaaggaaaattagggaaaatattttatttggatggtttctataaacaagggactataattcttatacattatttttcatcttggctgttttctttgagccagttctaatgtgccacacaattatctaaggtatttgttttctataagaattgttttaaaagtattcttgttaccagagtagttgtattatatttcaaaacgtaagatgatttttaaaagcctgagtactgacctaagatggaattgtatgaactctgctctggagggaggggaggatgtccgtggaagttgtaagacttttatttttttgtgccatcaaatataggtaaaaataattgtgcaattctgctgtttaaacaggaactattggcctccttggccctaaatggaagggccgatattttaagttgattattttattgtaaattaatccaacctagttctttttaatttggttgaatgttttttcttgttaaatgatgtttaaaaaataaaaactggaagttcttggcttagtcat

SEQ ID NO: 348861 - DNA, 1771 bp, Homo Sapiens
  misc_feature (1159)..(1168): n is a, c, g, or t
  misc_feature (1706)..(1706): n is a, c, g, or t
ggggaacaggaaaaaactgaagagggattaggccctaatataaaaagcattgtcaccatgttgatgctgatgctattgatgatgtttgctgtccactgtacctgggtcacaagcaatgcctactctagtccaagtgtagtcctggcctcatacaatcatgatggcaccaggaatatcttagatgattttagagaagcttacttttggctaaggcaaaatacagatgaacatgcacgagtaatgtcttggtgggattatggctatcagatagctggaatggctaatagaactacgttggtggataataacacctggaataacagccacatagcactggtgggaaaagctatgtcttctaatgaaacagcagcctataaaatcatgaggactctagatgtagaatatgttttggttatttttggaggggttattggctattctggtgatgatatcaacaaatttctctggatggttaggatagctgaaggagaacatcccaaagacattcggggaaagtgactattttaccccacaggggagaattccgtgtaagacaaagcaggatcccctactttgttgaattgccttatgtataaaatgtcatactacagatttggagaaatgcagctggattttcgtacacccccaggttttgaccgaacacgtaatgctgagattggaaataaggacattaaattcaaacatttggaagaagcctttacatcagaacactggcttgttaggatatataaagtaaaagcacctgataacagggagacattagatcacaaacctcgagtcaccaacattttcccaaaacagaagtatttgtcaaagaagactaccaaaaggaagcgtggctacattaaaaataagctggtttttaagaaaggcaagaaaatatctaagaagactgtttaaatgcactgttctggttcctaacttgaagcagttgtccttgtgagaaccggtctttgcctttagctcatgtcgtgtttcacagcaaagagggtacagaaccatcactggtccaggttaatgtacaaaattttctggcaatgcctgattaaaaaaataaaattggcttgttgagaacagctgttttcgatttctaatgtgaagcaagacagagcactgctgtaaatgtctagcagcagannnnnnnnnnattggtacatattatccttcaaatctgagaatttggactaactgcaccaaagaaccctctaatttggtccctggcacatgcatacttgtcaatgtttttattcttttacaagacctgcattttatttgaattacccgaatagcaatatgtaaaatacaagtgacaaaatgtgatgagagcttcttgaaccggtaaactagtacaggtctgagaaagacatattagaagaatcattatacttccttgaattatatttattttcatgtttctctaatgcaaagaatgtttcatcaaatgtatattttctgttgcttactgtttgctctgagaagaagctgctgtttcaaagatggacctctgagtagctaattgattcaagtagtttttttatgttgacacattattactgcctgttagcagtcgttttcaccaagtacttacagagcagatttcatacatcatttcttcaagggcttaatttatatttttttgggaaatcatggcaaactacacaggaattttgctttacccggaacgnagttttgggtatcttagtactgaaggttaaccctatgtttacctgccaaaagattaaaggaaaca

SEQ ID NO: 348862 - DNA, 455 bp, Homo Sapiens
  misc_feature (24)..(24): n is a, c, g, or t
  misc_feature (31)..(31): n is a, c, g, or t
actttccagcttataggccaactntataccngacttgaacattttctcccagttgtttagtaaaagtgaaaagagaaagggtttttccctgccacaggatataactttttttatataacaagcataacacaccactgcttttggtggaaaagtgcagaatagtatgtaccttttatgaagaaaaatgtaatttacaatattcagtgagaatgttactgctgattttcttttccaaggtgtagaatattctttgatttatagaattcatttttgacccagatgatggttcctttacagaacaataaaatggctgaacattttcacaaatagagtgtaacgaagtctggatttctgataccttgtcatttgggggattttattttactttgttgctttaaaattcaatgcagagaagttgttgactgtaggggaaataaagttaattcaaattttga

SEQ ID NO: 348863 - DNA, 1335 bp, Homo Sapiens
  misc_feature (1287)..(1287): n is a, c, g, or t
tgtttataaaagggaaagtcttgttcgagtgtctaaaatttcacgcagccgcacttaatgtgggggtgtggctttccgaggtccgggttcattttttcttttgtcccccacaatgttcccgaagtctattttgaagttttctttaaaggggtccgcgcccctccctgaaaaaaattatgtgtgttaatttcggcctcacggggtggtcttcggtaaaatttccccaaaggggcaaaatggagggggttaaaaaaattttgtttggccttttattccatttccaaaattcgggcaaaatttcccgtcaagcagtgaggtgaattatcccctttgaggtaatccaatataccaaggataaaaggagtagtcctttggggtcattccttgttgtgcctggcgggtttttccaaataggttgaggataaggctttttcagagccatgggaatgtatcagcagtatggaaaggggccagtgcgaaaagagtcagcacccaggtcctcctacccattcccttgtatgccagctggtaggctcccattccacatctgggcgaggagttacctcagaacttgggaaactgacactctctgcacatttccagagagaaagatctgaagatcactagcatcaaaacctactgtcacagggggctgacgcatttcacaaaagcctcaggcctgaaagaaatcgaagagatctcttttcctgccccactctactgaaacacctgtgtggagtaaaaattttcatacatgaacacatacatattacatttcaatactgttgacaagaaatataacaaacttcatgtaataaccaagattttgaatcttcctaagtggcccacttatttaatgagtattggataaaaacaaaattctagtacaactgaaggctgtaaatcctgagagttggttataataggatctggcctggatttttaaatggcacaccattcaaaaagtggttgggaacataaaaggttctccacaaaagccttttgctgcagaaggtggcttggatggctaaagtagtatttactcttagcaattaaccaccaaagcatttagttatttgcatcccagcaagaacaacaatcccacactttactccatcacacctggaatccaagaggtctacaagtccaaagacaactgtgttatcagctttgcatgggaaagacaggaggtagctaaactgacctgtaggtgccctttcagtgtggctagggtcatctgagcagtcagggagtctctcattcatcaacagtttagcctcctttagnggtgattatttgacttatctgcaaaatggaagagccccagctacttgg

SEQ ID NO: 348864 - DNA, 1106 bp, Homo Sapiens
ggttgctgccgccttggccctcccagtttgggaagatgcccaagggcccaaccggggcaaggtttcccggaacgccccggggttttggaagtttttcccttgccttccgtgaaggttcctggttccaagtttggccagttgttccaggcaggtgtttcttccgggttcccttcaggaactggatgacccctgctcaaactcagcccacaatggtactccctttggtccttgaaggttctttcagcgcggccaggatatcagcttctccctttgctggaaagccctgaattttgtctctgtctctccttagggtactcaggtggttcaggattttttccctgtggggctgggcgcccttcctccatgaaggacggccgtgtggggcctgtgctcccgggactcccggcacatcacgcacagcagcttcccgtcgtcctcacagtagtagtgcagcttctctcggtgtcgctcgcacaactttgcatcctgctgctcccgggtcacctctccccggctgcctgcccttgtccaccttcagccgctcaatgttctccaccaggctggccagttgccacacgggtcggatgttctccttcttaaaaggcttcttgcagagtgggcagacggggcggctccctgagatggggcggacgtctgtggtgcagctgcggcagaagacgtggccacagtcaatggtcacagggtcccgcaggtaatcaagacagatggagcaggtcacctcctcttccaggctccgtagtggggctgacgtggccatggtatccttagttcagagaggtctccgttcactggtgaggacttcttctcctggaggacttgctctcctatagatccatggaaggcaactacagcagcgctgggaagacaaccagcagggcacagaggtgactgcgaggctggaatgaagcaaccgcaccctgctatggttctgcccttttatgccgtcagtatattctctgtgatctcaacaggtttccacaataagaggtaaaaccattacccttctctccattcctgactccggtcccgagctccgggccgcgaatcccggccggcacccctcctctctcacggcggtctgtccc

SEQ ID NO: 348865 - DNA, 1600 bp, Homo Sapiens
  misc_feature (1528)..(1536): n is a, c, g, or t
gggaacatcaatattttataaatgtttcttaaatataagtattttgtctcaattcatcgtcactctctaatctgctggctctattgaacaccaacagagttaatgcttttagtagctttgtaccttttaaagctctattatgaatctttctaatacatatgaaattaatattatattagaattatgtacattatacaaaataattcataaccaagcaatattcatactatagaataatttattattatatatatgaatattacattgagactgaacaaataaccactctgctccaaatattactctcaagttctctgcctttaattattatagtcaattcataaaattctacatacagttgtacatggtgggttatcaaagtactccataatccaaatgcatctaaaagtattccaaatgcgcctttcattctagaatactaaaggaaagcgtttgaaagaagaggaaagtaaagcagacttctaactatttaatttaaacattgccattcagattgaataatttttaaatgatgatgctccactctttgatctacagacaaggttacaaaagatttacaattagtccaaaatcagaggattttaaatcttaaaggagttaagtttgtctcaatgatccaagactacaaaatttcttgctacattggcaaggaaatatgtttaaagccgagaactaaaatagctttttaaaatttaaaaattcctctgtttcttctgaatgtaaaacagacaaaatgatcctgacttcaaaatgaaatatattgattgctctcaaaagatgtttgacaaagttaagtcagtatcttcaatgctttaacagtaggtagaggtctttggggttggaactcaggatacagtgactaggacagagtgcattcttaggctaattagtgcctagtcctctggagtattttttaatgccctgaatttcaagttgtcaaactggtttacatattgaatgacattttgaatcaataaaaatgagaaaaaaacatttaaatttggttttcatgtctcatttgagaataaagatttccttcatcaccctaagtaataaaagctgatatgtcttgaaacaactatagacaatcagaatgtgttcatttataaagtatcactggtttgtatattttaatgctgacctttgcctgtgaactagaaaatcaagatttgtagagtcaggttgatttgccttcatttaattcctgcaaatgcattggaagtggatggataacttggaactttttccatactgttttccccctcaccaagcattaaatctaattcaaaatatgtctttctaaaaaacaatagtttatttttaaaactaacaactaattgtgttattccttgttgataagaaagtcactttttagaaacaagaatatagctattgtggctttggtcgcttaggattctcatatatttacacatggcattattcttttcatatacacctaccagatttcaagctattggatatttcccttgtacaacctttacatccnnnnnnnnnccttaaatgctctgtacaatcacatgtaaagtcatgagctacaaacctcaataaaaatatcagt

SEQ ID NO: 348866 - DNA, 636 bp, Homo Sapiens
gggggttaggagaagggggattcctcactcagctgtgcgctctgatttcgtgcgcttcctcgtcctgcatgttggatggccagtttttcgtttgtgcgtcatcctctacctgagaaatggtcgcttgcccctagtctagacacgcattaaagggcagtatttaaagtcagttggcaagcagtggaataagatttttgtaaagaaaccttgtgcagcatggattctctaccagatgaattttttgtgaggcatcctgctgtggaggatcagaggaaggaagaaactgagaataagctagaaaaatcatctggtcaactgaacaaacaggaaaatgacatacctactgatcttgtccctgttaacctactattagaagtgaagaagttattaaatgcaattaatactctaccaaaaggtgtggttcctcacattaagaagttcttacaagaagatttttccttccaaactatgcagagagaagttgcagctaacagccagaatggtgaggaaattgttcctgctttgactttacgtttcttgattacacagctagaagcagcacttaggaacattcaagctggcaattataccgcacaccagattgaatattggttattatttgacattactgttttt

SEQ ID NO: 348867 - DNA, 1364 bp, Homo Sapiens
ggtccggaattcttgcgatgccagagaacaggagaggaggagagtatggtataagcatgtccagaaataaggagaacttgaagcagaatggctgcaagatgtgggtttatcaactctgatctcaggtgatgaagaggaagatggcaaagccttgctctccacattgactcgaacccaagcagctgccgtgcaaaagagataccatacctatacccaaaccatgaggaaaaaggataagcaatctatcagggatgtcagagacatttttggagtcagtgaatctcctcctcgtgatacctgtggcaaccacactaatcagctggatggcaccaaggaagaaagagagcttccaagagttatcaagacaagtggttccatgccagatgatgcttctctcaacagtactaccctgtctgacgcatcccaggataaagaagggagttttgcggttcccaggagtgactctgtggctatacttgagaccattccagttctaccagttcattccaatggatcaccggagcctggacagccagttcagaatgcgataagtgatgatgattttctggaaaagaacattccaccagaggctgaagagctgtcatttgaagtgtcttattcagaaatggttacggaggctctaaaaagaaataaacttaagaaatcagagattaagaaagaagactatgttttaactaaatttaatgttcagaaaaccagatttggcttaactgaagcaggagatctgtctgctgaagacatgaagaaaatccgccatctctctctgattgaattgactgccttttttgatgcctttggaattcaactgaaaaggaacaaaacagagaaagtaaaaggacgagacaatgggatttttggagttccacttacagtcctcctggacggtgaccgaaagaaagaccctggagtgaaagttcccctggtattacaaaaacaataccgtgaagaacttgatgccaagtttaatgctgataaatttaaatgggacaaaatgtgccatagagaagctgcagtaatgttgaaagcgtttttcagagaactacccacctctctcttccctgtggaatatatacctgccttcatcagtctaatggaaagagggcctcacgtcaaagtatagtttcaagccttacacctcatggtcatggcgctgcctgatgccaacagagatgcagctcaggccctcatgacattcttcaataaagtgattgccaatgaatcaaaaaaacccgaatgagtctgtggaacatttctacagtgatggcaccgaaccttttcttcagtagaagcaaacactctgattatgaagaattactggtagcaaacaccgcggcccacatcat

SEQ ID NO: 348868 - DNA, 424 bp, Homo Sapiens; identical to SEQ ID NO: 264484

SEQ ID NO: 348869 - DNA, 900 bp, Homo Sapiens
  misc_feature (17)..(17): n is a, c, g, or t
  misc_feature (876)..(876): n is a, c, g, or t
tccaaaaacccaggtangaacctcccccatttaaaaggaggttaaaaatagtgtccagcactgtgactgaccccatagcaagtaggggtacctatcccaaatatttgtcctttgaaacaagaaacaagtgacccacccgatgaaaagtgcatgccctcttaacagtatctttctgtaagaaaaattaggtgatcctatatttacatttgggcagtggggggatgaaaactgctcttacccaagatggctgacttgaataaagacagtcaatatttttcaaaaaattcactgctctggtactgagatctcccatgataacagattacagttaaacagaaaatgctgtgaaataccttttacagaacacagcctgactttgcagattaacttaaagatatatttcttgattatttcactgttaaaaatcaagaaaaacactactaacatttcaacatcttaaaaatagaatttatgcaatgacatttttaagctctgcattttgtatactattaccgtctttaattacagttatgttcatccatatatcaaaaggcagcactggtaaccttgataacattatatatgcttatgtgtttaagacagtcttgattaaatatttccataccttatctgcagccactattcttatcctttcttcccaggaggagaatgaagtgggactaggcatttacctggcacttgcctgcactatcattcattggcactaatgattaggatgcttgaaccatgcagttttgtttctatttcaacaatatgacactgaagtagccattatcttttgatatttaagcctaagtaatagtatattcttcatgccaagttttgacagctcaataatttgtattctagaggggnaaaatgatatttttgctattattt

SEQ ID NO: 348870 - DNA, 562 bp, Homo Sapiens
  misc_feature (97)..(113): n is a, c, g, or t
  misc_feature (296)..(307): n is a, c, g, or t
  misc_feature (489)..(489): n is a, c, g, or t
  misc_feature (511)..(511): n is a, c, g, or t
ttttgtttttttcaaaaccaaataacagaaatgtgtatgtgtgtactgtatctgcctttccaccacatttttatgacactgtattccactgcctgcnnnnnnnnnnnnnnnnnccctaggatttgtcctacagcttagtattgtggttgacagcgatactagggctgacagcacaaaagtcacaagaaaagagtggaagggcaagaattcaaagcatttgttcatacaatgtggcaacctcttttgcatagttgcgtaggatcctgtttgtaatgctatcataaatattctgtagnnnnnnnnnnnnctctcccaactggagctatgacactttttattggattcagtcttgtctcttgtctagaaagaaatttatcttgttgacgcatgagctgtttaaaaattatcctattaaatgttggttaatagttgtgcagtttttcatttcagatggaaaggcaatgcaaattttgcctttgttttctgtcnccttccaacccctgagcacttntagtcagatacagattcatcagtgtatgcaacatcctttgtagtttaaaac

SEQ ID NO: 348871 - DNA, 490 bp, Homo Sapiens
  misc_feature (360)..(360): n is a, c, g, or t
  misc_feature (404)..(404): n is a, c, g, or t
taggcctgttggtgagggtggatttgtctctgtgtatgtagtatcaggtgttctcaagagcatctggttagctgagcagtgggggaaaatgcgaagtctcagtagagaatgggctttgccctttttcctttcttattctggagaacatgattgagctgctggggttacaggagaaatcttgtcctaggaaacaaaaaggtttgtagccctcattctggctttgagccctgtagcaagcctcctggctttgagccagtatcgtctgtgaaatgggtaggtatcatgatacctaccctccctgactcagatgtgttccaagcttgtgccagacgatggacacttagatattatctaggagcnctgccctgcagaaacaagaagtcgaatatgaggtggaatggccncatttcctagaatcacgacatcttcagcagttgtgatccatttgattgttacttagtactcctttcaatttgataggattttgctt

SEQ ID NO: 348872 - DNA, 1309 bp, Homo Sapiens
agcggagtgacagccagccgggcccggtggcggagaggaagtgcggtccgcgccaagcccgtccccgccgacgccggctccacgcggctcgggtgacagcgtcgcggccgccggacgcagcgcggggcaggcgcgggcagagccgagcgcagcggaggctccggcggaggcgcggggaaaatggctgatgactttggcttcttctcgtcgtcggagagcggtgccccggaggcggcggaggaggacccggcggccgccttcctggcccagcaggagagcgagattgcaggcatagagaacgacgagggcttcggggcacctgccggcagccatgcggcccccgcgcagccgggccccacgagtggggctggttctgaggacatggggaccacagtcaatggagatgtgtttcaggaggccaacggtcctgctgatggctacgcagccattgcccaggctgacaggctgacccaggagcctgagagcatccgcaagtggcgagaggagcagaggaaacggctgcaagagctggatgctgcatctaaggtcacggaacaggaatggcgggagaaggccaagaaggacctggaggagtggaaccagcgccagagtgaacaaagtagagaagaacaagatcaacaaccggatcgctgacaaagcattctaccagcagccagatgctgatatcatcggctacgtggcatccgaggaggctttcgtgaaggaatccaaggaggagaccccaggcacagagtgggagaaggtggcccagctatgtgacttcaaccccaagagcagcaagcagtgcaaagatgtgtcccgcctgcgctcggtgctcatgtccctgaagcagacgccactgtcccgctaggtgcctgctaggtgcatggccacagagcatgggctgggcctgggcacaggaggagcagctgctttggtcggggtggagactcgcagcagctgctacccacagcctattccactcctccccatctccaggcgctgggaggggggccctcaccccgtcacgcctcgctccctcctggccctctggtccagcccctcacgcctcctctcagtctactcaattgtgactgtccctcctgatgtattttttttcttggcttaaagggtgtgttgttgcttcctctctataccctttcccctattccacttttctttatcttcttcaacattcatcctctcctattttccacttaccctatcttccttccctctatttcacctatctaccactttctctttcctattccttaactatccccatctacttctctcctcctctcct

SEQ ID NO: 348873 - DNA, 1295 bp, Homo Sapiens
  misc_feature (52)..(88): n is a, c, g, or t
  misc_feature (1021)..(1021): n is a, c, g, or t
  misc_feature (1090)..(1102): n is a, c, g, or t
cggaagatagactcatatagggcgaatggagcttcaccgcggtggcggccgnnnnnnnnnnnnnnnnnnnnnnnnnnnnnnnnnnnnnatcaggccaaatcggccgagctcgaattcgtcgagagcggagtgacagccagccgggcccggtggcggagaggaagtgcggtccgcgccaagcccgtccccgccgacgccggctccccgcggctcgggtgacagcgtcgcggccgccggacgcagcgcggggcaggcgcgggcagagccgagcgcagcggaggctccggcggaggcgcggggaaaatggctgatgactttggcttcttctcgtcgtcggagagcggtgccccggaggcggcggaggaggacccggcggccgccttcctggcccagcaggagagcgagattgcaggcatagagaacgacgagggcttcggggcacctgccggcagccatgcggcccccgcgcagccgggccccacgagtggggctggttctgaggacatggggaccacagtcaatggagatgtgtttcaggaggccaacggtcctgctgatggctacgcagccattgcccaggctgacaggctgacccaggagcctgagagcatccgcaagtggcgagaggagcagaggaaacggctgcaagagctggatgctgcatctaaggtcacggaacaggaatggcgggagaaggccaagaaggacctggaggagtggaaccagcgccagagtgaacaagtagagaagaacaagatcaacaaccgggcatccgaggaggctttcgtgaaggaatccaaggaggagaccccaggcacagagtgggagaaggtggccccagctatgtgacttcaaccccaagagcagcaagcagtgcaaagatgtgtcccgccctgcgctcggtgctcatgtccctgaagcagacgccactgtcccgctaggtgcctgctaggtgcatggccacagaacatgggctgggcctgggcacaggaggagcagctgcttttggtcggggtggganactcgctgcaggtgctacccacaggcctatttcacctccttcccatctccaaggggctgggaaaggggnnnnnnnnnnnnngcaatggtggggcgccggtgcgggggcgccctgggaacgggcccggacgaggcggggcggcgtgggggcgggtgagtgtggggggctggctcccgccggagccgcgttgagttgcgccctcggccgtatacgcggttgcgggtggttctgagtatacaggagcaatggtgtgatgagggacgcacgacggcca

SEQ ID NO: 348874 - DNA, 963 bp, Homo Sapiens
  misc_feature (13)..(13): n is a, c, g, or t
tcgcctatacctnccgaaggcccagttgaaggatgcgggagtatatgaatgtgaatctaaaaacaaagttggctcacaattaagaagtttaacacttgatgttcaaggaagagaaaacaacaaagactatttttctcctgagcttctcgtgctctattttgcatcctccttaataatacctgccattggaatgataatttactttgcaagaaaagccaacatgaaggggtcatatagtcttgtagaagcacagaaatcaaaagtgtagccaatgcttgatatgttcaactggagacactatttatctgtgcaaatccttgatactgctcatcattccttgagaaaaacaatgagctgagaggcagacttccctgaatgtattgaacttggaaagaaatgcccatctatgtcccttgctgtgagcaagaagtcaaagtaaaacttgctgcctgaagaacagtaactgccatcaagatgagagaactggaggagttccttgatctgtatatacaataacataatttgtacatatgtaaaataaaattatgccatagcaagattgcttaaaatagcaacactctatatttagattgttaaaataactagtgttgcttggactattataatttaatgcatgttaggaaaatttcacattaatatttgctgacagctgacctttgtcatctttcttctattttattccctttcacaaaattttattcctatatagtttattgacaataatttcaggttttgtaaagatgccgggttttatatttttatagacaaataataagcaaagggagcactgggttgactttcaggtactaaatacctcaacctatggtataatggttgactgggtttctctgtatagtactggcatggtacggagatgtttcacgaagtttgttcatcagactcctgtgcaactttcccaatgtggcctaaaaatgcaacttc

SEQ ID NO: 348875 - DNA, 467 bp, Homo Sapiens
  misc_feature (331)..(331): n is a, c, g, or t
gcctataccatccgaaagcccagttgaaggatgcgggagtatatgaatgtgaatctaaaaacaaagttggctcacaattaagaagtttaacacttgatgttcaaggaagagaaaacaacaaagactatttttctcctgagcttctcgtgctctattttgcatcctccttaataatacctgccattggaatgataatttactttgcaagaaaagccaacatgaaggggtcatatagtcttgtaggaagcacagaaatcaaaagtgtagctaatgcttgatatgttcaactgggagacactatttatctgtggcaaatccttggatactgctncatgcattccttgaggaaaaacaatgaggctgagagggcaggactttccctggaatgtatttggaacctggggaaaggaaatgcccctctatggtcccttggctgtggagccaggaagtccaaagttaaaacttgg

SEQ ID NO: 348876 - DNA, 858 bp, Homo Sapiens
ggggggtccgggccgcaggcccgctgcggcggactgggcggcggaagttcgacggcgccgggcgagtggctgttgagcggcgccgcgggagttccgcaggtttcccgtgttcgcagcggagccggaggccagctgaacccggccgtgggatcccggataggaggaggaggggacccataggacgcgttaacatggacctggaaaacaaagtgaagaagatgggcttaggtcacgagcaaggatttggagccccttgtttaaaatgcaaagaaaaatgtgaaggattcgaactgcacttctggagaaaaatatgtcgtaactgcaagtgtggccaagaagagcatgatgtcctcttgagcaatgaagaggatcgaaaagtgggaaaactttttgaagacaccaagtataccactctgattgcaaaactaaagtcagatggaattcccatgtataaacgcaatgttatgatattgacgaatccagttgctgccaagaagaatgtctccatcaatacagttacctatgagtgggctcctcctgtccagaatcaagcattggccaggcagtacatgcagatgctacccaaggaaaagcagccagtagcaggctcagagggggcacagtaccggaagaagcagctggcaaagcagctccctgcacatgaccaggacccttcaaagtgccatgagttgtctcccagagaggtgaaggagatggagcagtttgtgaagaaatataagagcgaagctctgggagtaggagatgtcaaacttccctgtgagatggatgcccaaggccccaaaacaaatgaacattcctggaggggatagaagcaccccagcagcagtgggggccatg

SEQ ID NO: 348877 - DNA, 1865 bp, Homo Sapiens
  misc_feature (1088)..(1376): n is a, c, g, or t
  misc_feature (1503)..(1525): n is a, c, g, or t
tggggacacgctgcaggcgtatattggatccctaaatactttattctccttataccattatcagacccaagtatcatctaatagtccataatcaaactgcctaagcagtttctacactgtctttttaactatttcaaactatcaaggttcgcattttcttccttagaacttttagtctttttcttccccaaaatatttgagtccatgccagttgcctttagttgtacccaaataatggtttgtctatttcctaaaagtagtactcttaaatttaaatttagtgttatttttgttgtcattgttccttcttcctcatgtggttgtgcaggcagagcttgagcatccagatttcaaaattaaaaaataaaagataatctagtttaatatatagtagttgaatcaccttaagtctagactgctgtatgagcacccattatctttcactatattccatcatcccccaacatatccacagtagatgaagggcagtttgctcaaacattgttttgatcctgtcatgtctgttcagaaatgcctgtctattcagaaacccacgtctaataacaaaatcttggactggttactatcaaaacccaacaacatacagactcctcagctaggccctagggatatttttctaccttgatttccaaatgttcattgaaagaatgcttaattctaatttggaaaaaagtttttggcttcccacttctgctttacacgttcatctttcttgaaatcaaatccaatccaatctatattctaagaacctgctcaaatcttggttcttcaaagctttccctggtattttgcatttttgctttgaatagttccacgaaggataacttcttactccttccttcatctttctgtatcttgcatatagtaaatattaatgacttgtttgcattttgttatcctaacttggctataaagaaaatcagatgtcttcaccagtcgttcaaacttcaggtctgcctacagattcatagatggctgtggatttttataattttgtcacaaagttagtggtaactacaggttatctcagaatatcttttttggcgtataaattttttctctttccnnnnnnnnnnnnnnnnnnnnnnnnnnnnnnnnnnnnnnnnnnnnnnnnnnnnnnnnnnnnnnnnnnnnnnnnnnnnnnnnnnnnnnnnnnnnnnnnnnnnnnnnnnnnnnnnnnnnnnnnnnnnnnnnnnnnnnnnnnnnnnnnnnnnnnnnnnnnnnnnnnnnnnnnnnnnnnnnnnnnnnnnnnnnnnnnnnnnnnnnnnnnnnnnnnnnnnnnnnnnnnnnnnnnnnnnnnnnnnnnnnnnnnnnnnnnnnnnnnnnnnnnnnnnnnnnnnnnnnnnnnnnnnnnntggagtataaatttcaaaacattaaaatatgaatcaggaaacttcgattctggtctttttcagactttaggttattttccttggttttatatcttattaccataaatcatcttgatgctggtacctnnnnnnnnnnnnnnnnnnnnnnngtttaaaagttttgctttagagattccaaagaatatatttagacttataaaagcacttatctgataagattctatttgcttttctttattcatagagaccacaaacagatcgcagatccaggtttctcaaactggagcatctgcttaattttcccataaaatcagtcttattctttctgacagctctgagactcctccggccacgaataggtgctgtcctggaggaaacggtggaggacggccgcacaaaaaccaatctacctgatgaaaactccgttcccttctcgccagaaacataaaatgcgatggagctacggccaccgctgccgagacaaaatgg

SEQ ID NO: 348878 - DNA, 336 bp, Homo Sapiens
gggaccagcttgtcggcgccattttgtctcggcagcggtggccgtagctccatcgcattttatgtttctggcgagaagggaacggagttttcatcaggtagattggtttttgtgcggccgtcctccaccgtttcctccaggacagcacctagtcgtggccggaggagtctcagagctgtcagaaagaataagactgattttatgggaaaattaagcagatgctccagtttgagaaacctggatctgcgatctgtttgtggtaccagcatcaagatgatttatggtaataaggtactcagtctttgcttaaaataaattttacgtttatcaaagtta

SEQ ID NO: 348879 - DNA, 665 bp, Homo Sapiens
  misc_feature (44)..(53): n is a, c, g, or t
  misc_feature (95)..(151): n is a, c, g, or t
  misc_feature (231)..(333): n is a, c, g, or t
  misc_feature (337)..(337): n is a, c, g, or t
ccccgaggggttaaaatttcgggggggggttttcccccattttnnnnnnnnnnaaaaaagggttctttcccaaaaatcccccgggggcggttttnnnnnnnnnnnnnnnnnnnnnnnnnnnnnnnnnnnnnnnnnnnnnnnnnnnnnnnnnagggggcccctttttccaaaaaaaagggggaccgtaaaatttggccccccccggggaaattttaagggggcccccccccnnnnnnnnnnnnnnnnnnnnnnnnnnnnnnnnnnnnnnnnnnnnnnnnnnnnnnnnnnnnnnnnnnnnnnnnnnnnnnnnnnnnnnnnnnnnnnnnnnnnnnnactntgataaacgtaaaatttattttaagcaaagactgagtaccttattaccataaatcatcttgatgctggtacctgataagattctatttgcttttctttattcatagagaccacaaacagatcgcagatccaggtttctcaaactggagcatctgcttaattttcccataaaatcagtcttattctttctgacagctctgagactctccggccacgactaggtgctgtcctggaggaaacggtggaggacggccgcacaaaaaccaatctacctgatgaaaactccgttcccttctcgccagaaacataaaatgcgatggagctacggc

SEQ ID NO: 348880 - DNA, 1117 bp, Homo Sapiens
  misc_feature (43)..(43): n is a, c, g, or t
gaattccaaagaaaagtcaaactgaaaaggaaaacacaacaanctgaacgaggaagggatgctgttggcttcagagatcaaacacctgccccgaagactcctgcacagtctcaagcaaccatatattatcaaggacagacatgtccaacaggctatggtgtgacatcaccttattcacagacaactccaccaattgtacagagttatgcccagccaagtcttcagtatatccaggggcaacagattttcacagctcatccacaaggagtggtggtacagccagccgcagcagtgactacaatagttgcaccagggcagcctcagcccttgcagccatctgaaatggttgtgacaaataatctcttggatctgccgcccccctctcctcccaaaccaaaaaccattgtcttacctcccaactggaagacagctcgagatccagaagggaagatttattactaccatgtgatcacaaggcagactcagtgggatcctcctacttgggaaagcccaggagatgatgccagccttgagcatgaagctgagatggacctgggaactccaacatatgatgaaaaccccatgaaggcctcgaaaaagcccaagacagcagaagcagacacctccagtgaactagcaaagaaaagcaaagaagtattcagaaaagagatgtcccagttcatcgtccagtgcctgaacccttaccggaaacctgactgcaaagtgggaagaattaccacaactgaagactttaaacatctggctcgcaagctgactcacggtgttatgaataaggagctgaagtactgtaagaatcctgaggacctggagtgcaatgagaatgtgaaacacaaaaccaaggagtacattaagaagtacatgcagaagtttggggctgtttacaaacccaaagaggacactgaattagagtgactgttgggccagggtgggaggatgggtggtcaggtaagacagactctagggagaggaaatcctgtgggcctttctgtcccacccctgtcagcactgtgctactgatgatacatcaccctggggaattcaaccctgcagatgtcaactgaaggccacaaaaatgaactccatctacaagtgatta

SEQ ID NO: 348881 - DNA, 1669 bp, Homo Sapiens
  misc_feature (64)..(135): n is a, c, g, or t
  misc_feature (981)..(1116): n is a, c, g, or t
  misc_feature (1605)..(1605): n is a, c, g, or t
  misc_feature (1636)..(1636): n is a, c, g, or t
  misc_feature (1651)..(1651): n is a, c, g, or t
tttggtcttgctccccttcctcacagcctgagagcaaagcaaaagagaagaaaaagcctgaagnnnnnnnnnnnnnnnnnnnnnnnnnnnnnnnnnnnnnnnnnnnnnnnnnnnnnnnnnnnnnnnnnnnnnnnntggccttttggactagcaccccttcctcacagcctgagagcaaagagcctccattatggcatgctgaatttaccaaagaagaattggttcagaagctccgttccaccacaaaaagtgcagatcacttaaacggcctgcttcgggaaatagaggcaaccaatgcagtccttatggagcaaattaagcttctcaaaagtgaaataagaagattggaaaggaatcaagagcgagagaagtctgcagctaacctggaatacttgaagaacgtcttgctgcagttcattttcttgaaaccaggtagtgaaagagagagacttcttcctgttataaatacgatgttgcagctcagccctgaagaaaagggaaaacttgctgcagttgctcaagatgaggaagaaaatgcttcccgttcttctggatgagcatcctatcttcgtagttggtttggacttcgataggttgatggaaggaatacttctattaaccaaatagaatctatttacaaaaatggttcacgtatattaccacaattcttttgtcaaaaagtgtgtatatatgtttgcatctacatatatttgtacatctgtatgacagatgtattttaaaagtttcaacttgaagtaaaagtacaacagcttgaagtgttgataccaggccacagccctctaactcatgtgatctcccatgcatgctgccagaataaaaccaccaggaatgaattcactccccacttctctggaacctcaggacccgcccatttctcggcagtactgtgaattttgaagttaaactaaattttggtaccataccaactggaatttaggctttaaaaataatgtttcaagnnnnnnnnnnnnnnnnnnnnnnnnnnnnnnnnnnnnnnnnnnnnnnnnnnnnnnnnnnnnnnnnnnnnnnnnnnnnnnnnnnnnnnnnnnnnnnnnnnnnnnnnnnnnnnnnnnnnnnnnnnnnnnnnnnnnnnnntaataatagtaataaaaataacgttttatgactatttattgcaaggtcagatttacagattgttataaattgttgagaaatttttgtgattagaatatgaaggaaaaagctttgttggtaaaagtgacatgttaaggggctatgaagtaaatatgctgcagttaattgtgctaagttaaaatacagtttagttatttgctttaaaataaactcttctttttttctttaaagtatactacctcaaaactcattatgttgtcagagcccctagagctggctagtgtaacactgactatgagtaggtggggcccaccacttggagttgagggtgatttcatgggtgcctttccagggctcttgataggggtgtcactggcatgcaagccatggaatctgttttgaggaatcctctccattttccccaaataaaaacctatcccaacagtgactattatcactcaggcatgggatcttaaatataaagtgggngcttttcagtgtttttgggccggtagtgttnccataacctttcccntcaggagggggttttagg

SEQ ID NO: 348882 - DNA, 574 bp, Homo Sapiens
  misc_feature (74)..(74): n is a, c, g, or t
  misc_feature (306)..(314): n is a, c, g, or t
gtagccacttgtttggttatgatttgtgtcttatcagggaaaaggtgcccagctgccagcccagctccgctgcntatctttgcctcacttagtcatgtgcaattcgcgttgcagagtggcagaccattagttgctgagttctgtcagcactctgatgtgctcagaagagcacctgcccaaagtttttctggttttaatttaaaggacaaggctacatatattcagctttttgagatgaccaaagctagttagggtctccttgatgtagctaagctgcttcagtgatcttcacatttgcactccagnnnnnnnnnctttaaaaaagcggtttctacctctctatgtgcctgagtgatgatacaatcgctgtttagttactagatgaacaaatccacagaatgggtaaagagtagaatctgaactatatcttgacgaaatatttattcaaacttgaatgtaaatatatacagtatgtatattttttaaaaagatttgcttgcaatgaccttataagtgacatttaatgtcatagcatgtaaagggttttttttgtaataaaaattatagaatctgc

SEQ ID NO: 348883 - DNA, 344 bp, Homo Sapiens
  misc_feature (172)..(298): n is a, c, g, or t
gggtgctttgtgtggtattgccatcttaatattaagtcttccaattgctgaacacaggatatctctatttatttatgtcttccttaattccattcagcaatgttttataacttttagtgtacaatgctttcacttggttaaatttattcctagggaccgggcgcagtaatcnnnnnnnnnnnnnnnnnnnnnnnnnnnnnnnnnnnnnnnnnnnnnnnnnnnnnnnnnnnnnnnnnnnnnnnnnnnnnnnnnnnnnnnnnnnnnnnnnnnnnnnnnnnnnnnnnnnnnnnnnnnnnnntgtggtggcacatgcctataatcccagctacttgggggagcagggg

SEQ ID NO: 348884 - DNA, 870 bp, Homo Sapiens
cccccatttatgtgaaaagccatgtggataaattgttggccgccgtccagagatatgagaaactccctttgccattaggtgggcattattcatagacttctacatgaaagagaagagaaataaaagatgcaccaggaaaatctgagcagagaggcttttagtggttgacttactgagtgatgcctgaagtaggtgttcagagtaatactttgcgttatactgagagagaatctgaattttagtagtaaattgttttgccaactgtatatttatgtaataagtgcaataaaatgcagtaaattttaaaattctcttaagataatgtgtgaacttaatttttgaaataaaaattgttattgtgttaaaatttttgtgccgtgaatgaagtgttttattatgccaccaactttcacctatccaaccttactcaagggtgtacgttaaagatggtaacaatgtactatctggtaatataattgaatgacatctctagtcttttttagtggctttcaacagcaaataaattgaagaatattgtttgcatgttacatttttattcttattgaaatttttcaaaaggttttgtgagtacatagtatgtgtatatatttatggtatatatgggttattttgatacaggcatacagtatgtaataatcacaccacagtaaatgagttattatcacctcaagcatttatcctttgtattacacacaatccagttacacactttaattatttttaactacaggtcattttatgtttgtaataaacattcatacattcctgagtcttgaatacttttaaaaaatgtttcatatatatctttgaacatgtggcatgtcctcctgcaaacacatacagacattt

SEQ ID NO: 348885 - DNA, 2246 bp, Homo Sapiens
  misc_feature (1026)..(1028): n is a, c, g, or t
  misc_feature (1218)..(1232): n is a, c, g, or t
ggggggggaatactcaaggatgagcagatggggcctgcccgtctacgtgtgcaactggcagtccaggagctctgggtttctgataacaggatctcctttgggctcttgaggttggggagaagcattaggattacacagaggagctactgggacttagaaggaaccctggctgcctgaactgtggccgtgtctgggaggcgaggccacgacaggcctcaagcctcagatgctgctccacgagagccatcttccccagtggagtgcctgcctcccctgctaggcccgtttccctgaaggagctggccgtactggccgtgggcccagtcctgggaggagcagcacagccttgcccaggcccagtccacagagccagcagcttgggttgagatgaatgatgtgttcacaaatgaggggatttcccttctggactaaactgaaggagaggcttgttgctttccagaggtgtgtggctcttaagttgacatcagcttttccccttgtgggtggttctttagctctcctgtcacaccattcgggtgtcctaatgtagggacaagagcaagcctgctgctcaggccccctggcgaaggcttcacctcactgtggaagggggcgtcctgcagctggttagtcttaggcctggtggctgatcacttgtggggtcagtctccagcacccagcgctcccacaagccttgccaaggaaggcctgcttttcagccacaaacttcaggaaactcatccccccgctccccaaagtgttgttgctggccctgggcttgtgtggctcctgaggattgggaatttcaaataattgcaatacctgagttagaattccttctaatggcatcgttttaagctggaccataaagcagaggggaattacaagtgtgtcccatgcctgaccttcataattggtgtgggggacaggggagtcacagccactgatatttaggtgatgtctcttaggacttcagtgcctcagctgcctgaactgtaaatgttttctgaatttcacatatttgtnnntggcatgccttaggaagaagcacataggtaaaaccagcagtttccagtaatatagggggtttttgagcaaggcccctggagcagcggagagacaagatggagcacatgtagtctgtgtgcctggtcacacagaggcctgcatgcaagtagcaaagcagctctcaagggcttgtcagtaaaatatattagnnnnnnnnnnnnnnncaatttgaacccaaattgaacaaaactccagataccattgtatagagaaatttggcatcaagaagggcttctgaaaagacccacgtgctccagtcccagctccaaaagccactgatgacaagggccccactgtggaacctaagtctgggagccccctgacttctggctggccagaggctgcggtccgtcaagggcttgcctcgcttcagaatcagtaacatagatcttaagtgcaattgattaataagcagtgagttactgtagcttcctttagctctaccgaactctttttaaaaactcaaacttgagcagccttagaaaaggggttggggggtgggaaccacaggccatttctctaagtgggctgctgtgaagttttaaatgaaagctctagctttaggagcttgagccatttcctgactgcactggcctggcagtctggctgctgcacaagagtttttaaagaggggtcggagcccgcccgtgagagcgggtcttctcaccatgtggggctgtactacgtggtggtcttggtttctcttcacagaaatgctctctcaccaacttgccccactgtcccaactcctctcctcttagagaaaaaactgtgattacctcaacttgaatatgaaactgtgattgaaaaaagtcaaaacgtgaagaagcatcaaagccaaaaaggcaaaactggctgaggcctctgttgatgctcctcagcctactcgggaacgtgaaggggcagctggcgaaagggcattcctggggccacttgctctgccccactgataaggcacacccgcggtgcactgtgagctctttgaggactgagggcaggggatgcctcctggaacctgccaggcctctctgttctgtgaaggtcagtatccacttggatcctccaggcggcgcttcaagttgggaggaagcaggggtcttctgctgttttccaaaggaatggcccatgaacactggctttttggacctcttagaaagtgggattccaggggaacccca

SEQ ID NO: 348886 - DNA, 595 bp, Homo Sapiens
cagctatgtttataggtaacaacctagaaaaccaggtgattcacgtacaatgataccttattttctaatgacgtggcaactcaaagagccagcaaggcaagatagggacaatttggaactggcaaaataatgaatgagtttctagacataattttattttctctgggataaatgatgagattcaggcttactgacccccaaaggaggctcttgttgtattttaatatttgagagggttgaacttggagggacaaggcatacatttttttaccgaggatgctgctttggtcaagacctgtcatcctttgatggtcacagagcaggtgtgcctgcctccctcccaagtcaactgcagtgaaatgttattgtttgatagcttttcagttgctgacaaaatcagctggtgttcccagaaaatgaaatgaattccacacactggcctccctcccttccttcccctttcactcagtggagtcccaatggatgaaatgaacaaatctccaaggaatttgaagaccactcttactacttacaagagtgctttctggcatctgtagaaaaatcagaaaatccaacaatatggcccaaagtcccc

SEQ ID NO: 348887 - DNA, 438 bp, Homo Sapiens
ggggaatgtggtgtttcaaactcctgggagtatgagcttcttcctccacaacaccctcatcctgacttggagatgaggtctccatagcatttctacacaagaggttgaatttcccctcttgtttcattttagtttttgtctcctgagatttaaaaacatttttaagtaccacatttctatgtattcattagaatgcctggaaattttgtttcctgatagatttctctctgattatgttgtagctaaagcagcagggaaggtggggaacgaccttttctgcagggcagcagggagcattggacatgtcagctgaaagtgtgagggaaagaaccttggccttggagatggggagccctgggcaccggctctgcctctgtgactcacaatcacattcggccagcatactttacctccctgcttctcagcttctacatgttc

SEQ ID NO: 348888 - DNA, 439 bp, Homo Sapiens
  misc_feature (353)..(353): n is a, c, g, or t
tgtgcagacctccctgatcagtgttacatataatggataaaacaccactgtggaaaaatataatatgcttatctataaaatataaccctagcgtttttaattttgagaaatcgacacagattttgactgaatatatgtttggatttgcccaggccaaacatgcatatgatgcaaccccaccctacatttatgtggcacgaagggaaagtatgatgaaaggagacgaagaaagggattggaggccacagcccagtgccagtaacacagcagggttagggggtgtgatggatgcctagggtatctgcttgcttcctctgcagaggatcaaacctattgtggaggatgtggctcangcagcacatcatgactgaaaatggggaagactcagggtccactcagagccattagaccagtcccagaactttccccaatactggtt

SEQ ID NO: 348889 - DNA, 1225 bp, Homo Sapiens
  misc_feature (54)..(160): n is a, c, g, or t
  misc_feature (193)..(193): n is a, c, g, or t
  misc_feature (225)..(225): n is a, c, g, or t
tctccccagtagctggaattacaggtgcccgccaccacaccagcctaatttttnnnnnnnnnnnnnnnnnnnnnnnnnnnnnnnnnnnnnnnnnnnnnnnnnnnnnnnnnnnnnnnnnnnnnnnnnnnnnnnnnnnnnnnnnnnnnnnnnnnnnnnnnnntgaaccaccgcccccggctgcagttggattttnaaattgcttttttttattgttgaggttttttnatctccaagggactctcccggcacttctaccttccagagttacttcagtgcataaagtttgaattattttgttcttgtgggcagaagtgggaatgatggaatatcctcacggaaaaggcagtgaagttgggagtactgcttacaaaacagggtcaccagtgcattatgtggcgtgttcatccccacgccgtgtgtcacgggctagggcggcgtgttcatccccacaccgtgtgtcacaacaggctagggcacttcacgatgtcactacttgtttttctgacgttccaaaaacaacgtaacttggttttcatgtgtttttccgtggtatatgtgagattgatgctacgggtcttacggactcacacccgttcccactctctgcaatatggatcaggcagtgtttctgataggatgtgaaatggactctcctcgggtgggtccagcaggggccctgcccaccagaacacagtccgtgctgtgctgcgctaaggagctggccctcaactctccttggtgcagggttcccacaaccgagttctagttccctgaggtctttaaaaacaaaaacagaatgttgtacgtgaagattctaggaggggagggaccagcaaatctgagagaaccgtcctggggcctcccttcgaggagccctctgatgtgaggagggacttgagttgagtgacgctgtggtgtgaggtgttctgagctcactgaccggaaggtccaggtgaatctcgtcataagtgatctcaggctctcacaggatccggagggaaatgtgttagagggtctggaaaattcagtgcttttgagttacttgtttttattaaaaatttcctcacaaaagagagtcctcaagttgtggctgttcttgggaaaggggtcaccgtgtctgacaaagtgtaactttaaaaagcacgttgattttttacaaatgtaagtgtgcttgggaattccttaaattttgtgcaataaactattttttggtaaagattttcat

SEQ ID NO: 348890 - DNA, 2149 bp, Homo Sapiens
tgcgccctggccttcgcgcatctcccaggttagctgcgtgtccgggtgctaggctgcagacccgccgccatgacgctgcgcgcggccgtcttcgaccttgacggggtgctggcgctgccagcggtgttcggcgtcctcggccgcacggaggaggccctggcgctgcccagaggacttctgaatgatgctttccagaaagggggaccagagggtgccactacccggcttatgaaaggagagatcacactttcccagtggataccactcatggaagaaaactgcaggaagtgctccgagaccgctaaagtctgcctccccaagaatttctccataaaagaaatctttgacaaggcgatttcagccagaaagatcaaccgccccatgctccaggcagctctcatgctcaggaagaaaggattcactactgccatcctcaccaacacctggctggacgaccgtgctgagagagatggcctggcccagctgatgtgtgagctgaagatgcactttgacttcctgatagagtcgtatcaggtgggaatggtcaaacctgaacctcagatctacaaggtttctgctggacaccctgaaagccagccccagtgaggtcgtttatatggatgacatccgggctaatctgaagccagccccgtgacttgggaatggtcaccatcctggtccaggaaacttgacacggcccctgaaagaactggaagaaagtgaccggaatccagctttctcaataccccgggcccctctgccgacctctttgcaacccaagtgacatgagccatgggtacgtgacagtaaagcccaggtccgtctgcatttgtggagctgggctccggccctgctgtgtgcctctgccatggatttcccgagagtggtattcttggaggtaccagatccctgctctggcccaggcaggttaccgggtcctagctatggacatgaaaggctatggagagtcatctgctcctcccgaaatagaagaatatgcatggaagtgttatgtaaggagatggtaaccttcctggataaactgggcctctctcaagcagtgttcatgggccatgactggggtggcatgctggtgtggtacatggctctcttctaccccgagagagtgagggcggtggccagtttgaatactcccttcataccagcaaatcccaacatgtccccttggagagtatcaaagccaacccagtattggattaccagctctacttccaagaaccaggagtggctgaggctgaactggaacagaacctgagtcggactttcaaaagcctcttcagagcaagcgatgagagtgttttatccatgcataaagtctgtgaagcgggaggactttttgtaaatagcccagaagagcccagcctcagcaggatggtcactgaggaggaaatccagttctatgtgcagcagttcaagaagtctggtttcagaggtcctctaaactggtaccgaaacatggaaaggaactggaagtgggcttgcaaaagcttgggacggaagatcctgattccggccctgatggtcacggcggagaagggacttcgtgctcgttcctcagatgtcccagcacatggaggactggattccccacctgaaaagggggacacattgaggactgtgggcactggacacagatggacaagcccaccgaggtgaatcagatcccaattaagtggctggattctgatgcccggaacccaccggtggtctcaaagatgtagaacgcagcgtgtgcccacgctcagcaggtgtgccgtccttccacctgctggggcaccattcttagtatacagaggtggccttacacacatctcgcatggatggcagcattgttctgaaggggtttgcagaaaaaaaagattttctttacataaagtgaatcaaatttgacattattttagatcccagagaaatcaggtgtgattagttctccaggcatgaatgcatcgtccctttatctgtaagaacccttagtgtcctgtagggggacagaatggggtggccaggtggtgatttctctttgaccaatgcatagtttggcagaaaaatcagccgttcatttagaagaatcttagcagagattgggatgccttactcaataaagctaagatgactatgctgaaaaaaa

SEQ ID NO: 348891 - DNA, 1177 bp, Homo Sapiens
gggtttatcaagtcctcggcgagctgcccaacgggcagcagctggcgcaagtagcctagctggagaggctcaccccaggaaggagggaggccaccgacctactgggccgacggactcccacacagggctggcggcgccgcggagctgggaggactgaaccaccggcctcgggctgcaggggaaacatttcaggctgactggcgctcgtggctgagactcccatagaaagcccggctcagaggggcattagggtcctaaatgggcggccacgtccctctgcagaggacctggggctcttcgagcccgaaacgaggcaccggcaccgagaaaggtggaccacaccttcccgccccgtccgcaagtccaatcccgggcccacctccgcactggagtcttaaagggccagcgtgcctgggggcggagccagcagaggcgctgagccgggccgcgcctgggcgaacggccggagcgggctgggctgggcccgggatggcggtggccctggcgccggtcccggtggcgccccgcgcgagttcctgagctggtgccaggcaggtgacacctccggcagcccccagcatgcgggcaggcccaggccccaccgttacattggccctggtgctggcggtggcatgggccatggagctcaagcccacagcaccacccatcttcactggccggccctttgtggtagcgtgggacgtgcccacacaggactgtggcccacgcctcaaggtgccactggacctgaatgcctttgatgtgcaggcctcacctaatgagggttttgtgaaccagaatattaccatcttctaccgcgaccgtctaggcctgtatccacgcttcgattctgccggaaggtctgtgcatggtggtgagccacagaatgtcagccttcgggcacaccggaagatgctgcagaaacgtgtggagcactacattcggacacaggagtctgcgggggctggcggtcatcgactgggaggactggcgacctgtgtgggtgcgcaactggcaggaccaaagatgtgtatcgccggttatcacgccagctagtggccagtcgtcaccctgactggcctccagaccgcatagtcaaacaggcacaatatgagttagagttcgcagcacagcagtcatgctggagacactgcgttatgtcaggcagtgcgggccg

SEQ ID NO: 348892 - DNA, 1602 bp, Homo Sapiens
gtttatcaagtcctcggcgagctgcccaacgggcagcagctggcgcaagtagcctagctggagaggctcaccccaggaaggagggaggccaccgacctactgggccgacggactcccacacagttcctgagctggtgccaggcaggtgacacctcctgcagcccccagcatgcgggcaggcccaggccccaccgttacattggccctggtgctggcggtggcatgggccatggagctcaagcccacagcaccacccatcttcactggccggccctttgtggtagcgtgggacgtgcccacacaggactgtggcccacgcctcaaggtgccactggacctgaatgcctttgatgtgcaggcctcacctaatgagggttttgtgaaccagaatattaccatcttctaccgcgaccgtctaggcctgtatccacgcttcgattctgccggaaggtctgtgcatggtggtgtgccacagaatgtcagcctttgggcacaccggaagatgctgcagaaacgtgtggagcactacattcggacacaggagtctgcggggctggcggtcatcgactgggaggactggcgacctgtgtgggtgcgcaactggcaggacaaagatgtgtatcgccggttatcacgccagctagtggccagtcgtcaccctgactggcctccagaccgcatagtcaaacaggcacaatatgagtttgagttcgcagcacagcagttcatgctggagacactgcgttatgtcaaggcagtgcggccccggcacctctggggcttctacctctttcctgactgctacaatcatgattatgtgcagaactgggagagctacacaggccgctgccctgatgttgaggtggcccgcaatgaccagctggcctggctgtgggctgagagcacggccctcttcccgtctgtctacctggacgagacacttgcttcctcccgccatggccgcaactttgtgagcttccgtgttcaggaggcccttcgtgtggctcgcacccaccatgccaaccatgcactcccagtctacgtcttcacacgacccacctacagccgcaggctcacggggcttagtgagatggacctcatctctaccattggcgagagtgcggccctgggcgcagctggtgtcatcctctggggtgacgcggggtacaccacaagcacggagacctgccagtacctcaaagattacctgacacggctgctggtcccctacgtggtcaatgtgtcctgggccacccaatattgcagccgggcccagtgccatggccatgggcgctgtgtgcgccgcaaccccagtgccagtaccttcctgcatctcagcaccaacagtttccgcctagtgcctggccatgcacctggtgaaccccagctgcgacctgtgggggagctcagttgggccgacattgaccacctgcagacacacttccgctgccagtgctacttgggctggagtggtgaaacaatgccagtggggaccattagcaaggcgacctggaaggtgcccaccgaaaggcctggggctgggttccccaccctcaacaagttcctgctgggcctcctgggcaaacccccttgggccccttt

SEQ ID NO: 348893 - DNA, 278 bp, Homo Sapiens
ggaggccaggaggagacagagtaaaagggatcagcaaactagtcttgggatttttcctgagctcaagctccctgaccctcagaaagcagcatggtgtcacagaaggcacagtacacttgaagtcacatattcaggtctcagtctcagctctgctcttatttaagaactgtgtgaacctgggcatactactcaatctcttagcctcagtttcctcagatataaaacagggatgctacaaacctgttgtaaagaccaaataggctgggcatggtggctca

SEQ ID NO: 348894 - DNA, 705 bp, Homo Sapiens
  misc_feature (528)..(536): n is a, c, g, or t
tacgtgaggtgatggacaggttcattccccaaatgtggtattcatactttaaatatatataactttgtcaattatacctcaataaagctggaagaaaatatgacaaaatataaatgactttatctgatctcaagttgggagatgaaacaaactacataaaccaaacataataaaagcattcaacacagagcagttgaagtccttcacaatttcagatctctgccttgtaagcactgtgaatagttcagagtaagtgcccccaatttctctatggtcctacctagttaggtcattaaaaatgacctaacctctcgcttcagttgtgtcacctacagaatttttaaaaatatcttctttggcttcttttctgaaagattcatttcagccagtctgaaaggctgacaaagcatctgtggtgaacactttatctgaggtattctaacatggtttcaatatccttcattttctcaacgaaacatacatctgtcactaaaagcaagtgtcatccctagcatggattaatactgnnnnnnnnnaaaagtcattttctagtttaacttatttaaatgtcataaaataatgaatgaataaggaattttatctggtagtagagggaaatcgtaacagtgaatgcaactttttttctcattttgaattttattgggttgatagaaaaaatgtctttgaagacaatgttgttccccc

SEQ ID NO: 348895 - DNA, 1003 bp, Homo Sapiens
gagtacttgcccctcacagacctgtctcgatctcgagtggacagccgatggctccgctcagaatcccgataggaaggcgtcggggagggcgattcccactgtgagcgccttgaggagccatagccactgtcctcttcctcccaggtagaccttgaaggggtggctgcatctttaggtcgatgtcgtgggctctcgggttcatttcttctgctgctacgctctgaccctccatctcgctctgatctgctgctgtgcctacttctatcccgctcatctctgtccctcttgcggtcatagtctcgatcccgcgatttctccttcttccaatccatttcattctttggacgaggcatagacaccatgttcccgccgctcccgctctctctgccgactgcgttcccaaactcttcgctcacaccacccggatgggatggagtctctacccgagcagaccgataatgtctgtctttccggatattttggccagcctggtcaccgccctcttcctcagcatccttctggtcatccttgctctcttcccagtccttgtaggaggagactttggacttcttcttgtcctccccatcgtccttctcctctcgctctctccgttttcacgggaaagccaccaagtccacgctccgagataatagaaggagcggggaagcaggagcctctgaagacatgctgcgtcgcatgaccgcactatttggactcgcaaagataagaccacccagacctgacaagtccaagatcacgtgccttccaaatcgatggatcgagcgcaatcctcactggtgtcccccatcacaggatctgggatttctctcacacaagcgcgactcttcgggacccttctgtcccgagattcctggggcgcgcggcgcgtgccacccctcgactcagaccaggctaaagcagccaaaatccacaccttgaaagcggcccctcgtgccggattcaacacccaggcctcgtacctagccgtatagtgtcgcttcca

SEQ ID NO: 348896 - DNA, 939 bp, Homo Sapiens
cgaaatataggctaggtacgaggctgggtggtgaattcggcacgagggccgctttcaaggtgtggattttggctccttgagcctgtctgagcgaggggtggcagcgccggcgccccagaatccgggacagaagggtcccaagagtcgcgcttggtgagagaaatcccagatcctgtgatgggggacaccagtgaggatgcctcgatccatcgattggaaggcactgatctggactgtcaggttggtggtcttatttgcaagtccaaaagtgcggccagcgagcagcatgtcttcaaggctcctgctccccgcccttcattactcggactggacttgctggcttccctgaaacggagagagcgagaggagaaggacgatggggaggacaagaagaagtccaaagtctcctcctacaaggactgggaagagagcaaggatgaccagaaggatgctgaggaagagggcggtgaccaggctggccaaaatatccggaaagacagacattatcggtctgctcgggtagagactccatcccatccgggtggtgtgagcgaagagttttgggaacgcagtcggcagagagagcgggagcggcgggaacatggtgtctatgcctcgtccaaagaagaaaaggattggaagaaggagaaatcgcgggatcgagactatgaccgcaagagggacagagatgcagccaccccttcaaggtctacctgggaggaagaggacagtggctatggctcctcaaggcgctcacagtgggaatcgccctccccgacgccttcctatcggggattctgagcggagccatcggctgtccactcgagatcgagacagggctggtgaggggcaaggtactcggatgacacgccctctgccaactcccctcctacaaatataacgagtgggccgatgacgaaaaaaacacttgggggtccc

SEQ ID NO: 348897 - DNA, 612 bp, Homo Sapiens
gggtatggacacccagacttacacagggagagctgacggccttggctgcacctaaggggacacacactgacccctcaggaaatcctgctggtcccgtccccagggtgggaaaggtcaacaagggaaggacgtgatgacgctagcctcacagggaatgccctccccttcctcctcgggtcacacaggctggtgtgcactggcctctctgactcagattcccgaaggaaggattgactgactgcctcttctataagagccaacctccaatctccatgtgagtgctctgcaccagccttgggtgaagcagatcccaggcccctttgaggaaaggcaaaaatcttactgcccaaccccctagcagtgcctctgagcttgctccacggggtacagggaaaggggccgactgggccggaagggccccagcgaaggaggcacacctggtagttccatttcctgactagcaacttccagcccacatcaattttaaggagtccagaatatttgtagtatgcaaaaaggggcattacgaaacttttaaaagtctgttttaattataaaagtaatatatgcacatggttttaaaaaaaatgctggctgggtgcggtggcgcat

SEQ ID NO: 348898 - DNA, 1407 bp, Homo Sapiens
  misc_feature (1276)..(1276): n is a, c, g, or t
ggggatgagaaatcaaccggaggaatttccgtgcctggccccatgggaccctctggtcctcgtggtctccctggcccccctggtgcacctggtccccaaggcttccaaggtccccctggtgagcctggcgagcctggagcttcaggtcccatgggtccccgaggtcccccaggtccccctggaaagaatggagatgatggggaagctggaaaacctggtcgtcctggtgagcgtgggcctcctgggcctcaggatgctcgaggattgcccggatacagctggcctccctggaatgaagggacacagaggtttcagtggtttggatggtgccaagggagatgctggtcctgctggtcctaagggtgagcctggcagccctggtgaaaatggagctcctggtcagatgggcccccgtggcctgcctggcgagagaggtcgccctggagcccctggccctgctggtgctcgtggaaatgatggtgctactggtgctgccgggccccctggtcccaccggccccgctggtcctcctggcttccctggtgctgttggtgctaagggtgaagctggtccccaagggccccgaggctctgaaggtccccagggtgtgcgtggtgagcctggaccccctggccctgctggtgctgctggccctgcttggaaaccctggtgctgatggacagcctggttgctaaaggtgccaatggttgctccgtggtatagctggtgctcctggattccctggtgcccgaggcccctctggaccccagggccccggcggccctcctggtcccaaggtgtaacagcggtgaacctggtgctcctggcagcaaaggagacactggtgctaagggagagactgcccctgttggtgttcaaggaccccctggccctgctggagaggaaggaaagcgaggagctcgaggtgaacccggacccactggcctgcccggaccccctggcgagcgtggtggacctggtagccgtggtttccctggcgcagatggtgttgctggtcccaagggtcccgctggtgaacgtggttctcctggccctgctggccccaaaggatctcctggtgaagctggtcgtcccggtgaagctggtctgcctggtgccaagggtctgactggaagccctggcagccctggtcctgatggcaaaactggcccccctggtcccgccggtcaagatggtcgccccggacccccaggcccacctggtgcccgtggtcaggctggtgtgataggattccctggacctaaaggtgctgctnggaaaagcccggcaaggctggagagcgaggttgttcccggaccacctgggcgctgtcggtcctgctggcaaagatggagaggctggagctcagggaccccctggccctgctggtcccgctggcgagaaaag

SEQ ID NO: 348899 - DNA, 807 bp, Homo Sapiens
ggggagacgcaccggagcggtcgcccagccgccgcctccaagcccctgaggtttccggggaccacaatgaacaacttgctgtgctgcgcgctcgtgtttctggacatctccattaagtggaccacccaggaaacgtttcctccaaagtaccttcattatgacgaagaaacctctcatcaactggtgtgtgacaaatggcctcctggtacctacctaaaacaacactgtacagcaaagtggaagaccgtgtgcgccccttgccctgaccactactacacagacagctggcacaccagtgacgagtgtctatactgcagccccgtgtgcaaggagctgcagtacgtcaagcaggagtgcaatcgcacccacaaccgcgtgtgcgaatgcaaggaagggcgctaccttgagatagagttctgcttgaaacataggagctgccctcctggatttggagtggtgcaagctggaaccccagagcgaaatacagtttgcaaaagatgtccagatgggttcttctcaaatgagacgtcatctaaagcaccctgtaaaaaacacacaaattggaggggtcttttgggtcctcctggctaactcagaaaggatatggcacccccgaacaacatatggttccggaaacagggaatcaactcaaaaatgcgggaaaagatgttaccctggggtgaggaaggcattcttccaggctttggctggttcctaacaaaggttttccccccaaactgggccttaaaggggcctggggaaagaacaattctttgcccgtgggccccgcaaaagtaaaacgcccga

SEQ ID NO: 348900 - DNA, 650 bp, Homo Sapiens
ttttcaaatgtcttctaagagaaaatccgaactctttcaagatttgaagttttaaacttttaaacctagtctcatattttcaaaataatatcacttatctacgaaacatattcttaaaaccagtggtaaccatagctgttaccattctttatacgagacctatgatagtagatggtttggaaatgcaatagactatgcaagtgccaataataatgtatttcataacttttctacaagggaaatttctagtattctaaaagtattagtgtccattaacataaagtaataatgggctctggaaaaagattcaactacaaattcaaaagctgcttaattaaattcagttctcactgactatcagttgaaatagtaatgtcttatttacttcttacagggaaccttctagttaattaaacagatcaggaaaaaaatattttagcaaaacaagaaataactatccaattatttgtcaatatcagttgcaccactctttcctattttgcatctggaggttccattattcaggtagaaatttaaaacatcccaggaaaatattatttttatatttgttcttactttcaatgacaaaaaggctgaagtttaattcaattagaaggcaataaaataagctagtgtttgttactggtccc

SEQ ID NO: 348901 - DNA, 527 bp, Homo Sapiens
  misc_feature (247)..(288): n is a, c, g, or t
actgaaggcccaaaatgactcattttcaagtgattacctagtgtgagctgttggcatgtggttagaagccatcagaggtgcaagggcttagaaaagaccctggccagacctgactccactcttaaacctgggtcttctcctggccggtgctgtcagcgcacagacccatgcgcatccccacccacaaccctttaccctgatgatctgtattatattttaatgtatatgtgaatatattgaaaataannnnnnnnnnnnnnnnnnnnnnnnnnnnnnnnnnnnnnnnnnagcctctacatgctaggatcacaggaagactttgtaaggacagtttaagttctcctgcaaggtttaatttgttatcatgtaaatattccaaagcaggctgccttgtggttttggccagccttgtgctatgttgataagattgatttactgcttaaaatcactttactttatccaatttttactgaactttttatgtaaaaaaataaaatcaattaaagaacttggcatgtgtgttccct

SEQ ID NO: 348902 - DNA, 982 bp, Homo Sapiens
  misc_feature (162)..(183): n is a, c, g, or t
cctcaaagctgttttctgatatttgttgggtaccatagagtgaatctcagaacaggaagcggaggcataagcagagaggattctggaaaggtctctttgttttcttatccacagagaaagaaagaaaaaaaattgtaactaatttgtaaacctctgtggtcnnnnnnnnnnnnnnnnnnnnnnggctgacggcagctgcggaggaaaacccttttttccctaaccatctgggttgcggggctttggttatgctgtaatccaaaaggctccggttaatcagagcattctggtagccaggaacataatctgagagccaagcccacattcagggtttgggaacagggcatgacgaatcccgtgtcagggatttcatagtagaaggggcctatacggggaaaggagccaaagaaatctcttctagggatatggtaagaaactaaagtgagatactccaccagaggggcacccgtggagcctttcccggcaaaagagggtggcgtgtgactatctagggaaactccgtagtgcaagaaagctaccgcgtaatcaacgggttgcgggcagtgaacaagagggcccgaggcccggtgggtaacccccaggaccttgaaagctcccgccttttatcactagaagaaatctctggcggctatcgcaaaaacgtgctgcagcaagagaacgccagaaagcccaaaagggaaccaagactaagttgattgtagtgcagaccaaagccaaaagccaaattaggtggactgtggacaggcgggaaaaacaaaccctccccagtttaaatcttagtgcgacacactttcctccaagagtagtggtgttcagaatccctgtgaagggacccttgttttccctagctattatccattaagaaaaccgtttgagatggtaattgcataaggggaacagccatctcccgagtcagtggccctcggccacggcatttaactccataaaccctgtgaaaaac

SEQ ID NO: 348903 - DNA, 2201 bp, Homo Sapiens
  misc_feature (793)..(793): n is a, c, g, or t
  misc_feature (846)..(846): n is a, c, g, or t
  misc_feature (900)..(900): n is a, c, g, or t
  misc_feature (971)..(972): n is a, c, g, or t
  misc_feature (1167)..(1167): n is a, c, g, or t
  misc_feature (1196)..(1196): n is a, c, g, or t
  misc_feature (1209)..(1209): n is a, c, g, or t
actagaggatccctgtgtcatcccccttcgttatgcttttgcatacattagggcttataaagaacaacagcgacatctgcatgtgccgcagtgccaaggagataggaaaaataccgaaaacaaaactctgtattggcttggaggctgtctgactctctgtctccctagcagcccctgacaccaccatggataggagtaattgtacagtgtaatcacatcaggcctcatctgcatattcataacagagacaaagctttggaggataaggggggagccggggtaatttaaatataaagcagcatctcatttccaaatcaagttgtgccagttagactgtgcaccaggactcagtattaagccaacattgttttacagtttggaaattggagtgaagaagatggagaagagactcactaaagagggggtgatactacattttcattcttaactgaggaaaaacaaagcaagacaacaacaacggcgacagaataaaaatgaagtaatatttgaagagtcaccagtagtggctaaccagctgctgttttaccaggaatgaaatagcccattgagggagctttaaaagcccccaattaatatgttgtgcatgtataagatctacaaagaactcactgtattctttctctccccaccaagtccccccctccccaagtactcacatattccctaaccaccacctttctgtcctgtcgggtgcagggggaaaagatcagagctacaaaataattgactaattgcttcaaaagtaacaacatccctcttcaaaaagaaaggncaaaaacaaacacatacaaaaaggtgactgttcattaatgaagggataaattnccgatggcttcttcattctctttagttcattaccccccaaaagaaacaaatatnatccacgtgttaatatttcttgtcttcgttttctttgtttctaatatgatgctgtttattatatatttttnngtgttggtatttgtagaagcctctgctactgcattccccaaagagctactagtttcagcccactggggtttatattcctttaattgtctagtgcaggaacatttctgctgttttgtaaaatacactgctctgcagggattagaagaatccaaggttgtatccaacttcaaaggtttccaagtcataatgattttngcaaaagtagaagacagatcatgggacangtccccgtttgangataagcatcatagggacctttttttcttccctctgtccccaacttggtacttcccctggttctgaatggcccctcacgaacacagtttaatgatatgcaaatgaaatatgcataaaaccattctactgtatgatgattaaacactggagacacttaacagcggaggctttcactctgtgtaataatccttccccgaccatccactttgattgcagagttatggaaacccatagcagttggcagagagagcgaaagagagaaggaaggaaagacgcagggacacatcacccatctcggtgcttctcccactgcaggagaggtccccccctttgtactgcgttcctattgctgtcttttgtaatccatccatgcagtcgcaccagagcgattaacggaaaaaacctcttttctcttaatgtttcaaagctcattagccacacgattattcctcattaacagcgaaagctcattcattaaaaggaagaatatgcccaaaagatgccagcgcagctaatcctgagtcccgtaactgggctgtaaatcccatactacttgtatattccatgcaaaagggacacgcgccaatccacatttttttaagaaagaaaaagaaaacagtttatgtgttttgtaaaatccacaagagcagcaattaatattcccattgaatcactttatttttttgtctctcccttttgtttccagcgcctgcccctggctcagcgcccggtgccaacagaacacctttcaggatccacagcaacgcagacaacgtaagtaccagccgttccctgaaacccttttgcagattttttaaaaacaaccacctaaaacatagagagagagagacaagcctctttccccttcttctcaccctgcgcttatgccaccagtgtttcctcagtagccccttccaaatcagctctgccttcaagtttgtgcatgtctgtgtgcatccctcctcctccattcactcccatagtggatctta

SEQ ID NO: 348904 - DNA, 613 bp, Homo Sapiens
gtcagacagatgtgttttctttgcatggcagcattgagatggatccaatctgcgaatttgctgcccaaatagcatttctaatggaaactggaactaaacaagggcacggatatgggagggaggggagaagagagaatacacgaagaagagtatattcagagccactgcatggcattttgagtacaggaggttttcaggaacgatctttgcttcattagtctcccctgtgggctcctgatgtagggagctatcagggtataccaagatgagcactgagacaggcctttctaggtctgaggctgaggaaagcagcggcaacttggtgcctgtcccccagagctgtctacagttcagaagccaaaagcacagctacttctaatttggggatgcagtagagtgcctactgatccaggtatttgtgaaaagatggaattcttggtgctatcatagtatacattgctaaagagcagatgaaatcggctgcttaaggaggcctgataatatttatgttggttaattctcatgataatgataactgcacttgtctagtattttcagaatgttaaaattaccagtgtggcttaatgcatgtttacaataaatagagagggcc

SEQ ID NO: 348905 - DNA, 500 bp, Homo Sapiens
atcagtggcccagccagaagttaaagggctgagggttgaggtgagaggcacctctgctcttgttgggaggggtggctgcttggaaataggcccaggggctctgcagcctcggcctctccctcctgagttgccttctgttggtggctttcttcttgaacccacctgtgtaaagaggttttcagttccgtgggtttcccctttgattctgtaaatagtcccagagagaattcgtgggctgagggcaattctgtcttggaggaagaagctggacattcagcctgtggagtctgagttttgaaggatgtagggagccttagttgggtctcagaccataagtgtgtactacacagaagctgtgttttctagttctggtctgctgttgagatgtttggtaaatgccaggttgatagggcgctggctgcttggagcaaagggtgcatttcagggtgtggccaccaggtgctgtgagtttctgtggctcatggcctctgggctggtcc

SEQ ID NO: 348906 - DNA, 785 bp, Homo Sapiens
ggcagtaactctacggcgtaaggtagcgagggctgggtggcgaaatcggcacgaggagagaaagttgaagagtcccagacctactagcatttgcaactatgcttgtaaagtcctcggaaagtttcctcgcgtaccagacagcggcgggggctgatagcaattttagttttggcctccctatcctctcacatgagaacactgcctggatgcatctcatgatctctggagaatttccccatctttctcttctttccatcgtgtggattcaatagttggatttgaaggctgccctgcccccgactctcctgccgcacccctggccattgtacctttggatgtttagaagttcgtggaagtagacgctgaggtgtgcagaggagctggtggataacagagaatgccagggaagatgagtgctgggtcagggtacttggatgaaacggtgcaggccaggcgggccctaataaaaccctctgccaggtctgggagtcccaggccatctgctcaacgctctgtggtttgtcagacctgcaagcaagccccctgctggggaagcctaggtgtccttgagctgaaccgcactgaagaactcttgtcctcactggctgatgcagcagaactcttgggaaatgtcttagtcctgcagaatcaggagtcaccagatgatgcagagttgagatcatcattgcaaagttctctgttcctgaggaactaaatttaaggaaaaaatgggattttgttttagagttggaaaaaaagcctgattaaagagtttctgcctgttc

SEQ ID NO: 348907 - DNA, 1234 bp, Homo Sapiens
atcaggccaaatcggccgagctcgaattcgtcgagagcgggctcccatcgcgcgcacacacgcacacatcgtctccagctctctgctcgctctgctcgcagtcacagacacttgagcacacgcgtacacccagacatcttcgggctgctattggattgactttgaaggttctgtgtgggtcgccgtggctgcatgtttgaatcaggtggagaagcacttcaacgctggacgaagtaaagattattgttgttatattctgttcctctctctctctctcttaagaaaggaaaatatcccaaggactaatctgatcgggtcttccttcatgaacgaatgcaggaatttgggaactgagctgtgcaagtgctgaagaaggagatttgtttggaggaaacaggaaagagaaagaaaaggaaggaaaaaatacataatttcagggacgagagagagaagaaaaacggggactatggggagaaaaaagattcagattacgaggattatggatgaacgtaacagacaggtgacatttacaaagaggaaatttgggttgatgaagaaggcttatgagctgagcgtgctgtgtgactgtgagattgcgctgatcatcttcaacagcaccaacaagctgttccagtatgccagcaccgacatggacaaagtgcttctcaagtacacggagtacaacgagccgcatgagagccggacaaactcagacatcgtggagacgttgagaaagaagggccttaatggctgtgacagcccagaccccgatgcggacgattccgtaggtcacagccctgagtctgaggacaagtacaggaaaattaacgaagatattgatctaatgatcagcaggcaaagattgtgtgctgttccacctcccaacttcgagatgccagtctccatcccagtgtccagccacaacagtttggtgtacagcaaccctgtcagctcactgggaaaccccaacctattgccactggctcacccttctctgcagaggaatagtatgtctcctggtgtaacacatcgacctccaagtgcaggtaacacaggtggtctgatgggtggagacctcacgtctggtgcaggcaccagtgcagggaacgggtatggcaatccccgaaactcaccaggtctgctggtctcacctggtaacttgaacagaatatgcagcaaatctcctcccccatgaatttaggaatgaataaccgtaaacgttctctctcctcac

SEQ ID NO: 348908 - DNA, 865 bp, Homo Sapiens
  misc_feature (790)..(793): n is a, c, g, or t
tgaaggattgtaaatgatagggttggcagagttcatagagacacatgttaaatgattaatttcatgagatttgtaccaagttatctctttatgtggaaaactaatactgaaatctaatatttttaacttttaaaaaaattcatcagtaatgtctttttatttattttaaaagaatcaaaggataaataactcccagtcggctcagtcattggcttcccccagtggtttccgtagcaactcctactttaccaggacaaggaatgggaggatatccatcagccatttcaacaacatatggtaccgagtactctctgagtagtgcagacctgtcatctctgtctgggtttaacaccgccagcgctcttcaccttggttcagtaactggctggcaacagcaacacctacataacatgccaccatctgccctcagtcagttgggagcttgcactagcactcatttatctcagagttcaaatctctccctgccttctactcaaagcctcaacatcaagtcagaacctgtttctcctcctagagaccgtaccaccaccccttcgagatacccacaacacacgcgccacgaggcggggagatctcctgttgacagcttgagcagctgtagcagttcgtacgacgggagcgaccgagaggatcaccggaacgaattccactcccccattggactcaccagaccttcgccggacgaaagggaaagtccctcagtcaagcgcatgcgactttctgaaggatgggcaacatgatcagattattacttactagttaaagattnnnncttgcagtgtgtgtgtgtgctataccttaatggggaaggggggtcgatatgcattatatgtgccgtgtgtgg

SEQ ID NO: 348909 - DNA, 686 bp, Homo Sapiens
acagaagggtggtggccacggtccaggctggacacaaccaaaggcggaggacccgtggcccacgaagctcatctttgaactgtccccgccttctcccgccttgacttgtgaccctaggccctttggggcgcctctgacccagctagccagatcccggacccaaaccatgttccctgtgaaggtgaaagtggagaaatcagagctggagatggccaaagcccggaaccaactggatgctgtcttgcagtgtctgctggagaagagtcacatggacagggagcgtctggatgaggaagctgggaaaacaccctcagacacccacaataaggactgctccatcgcagccactggcaaaaggccatctgcccgcttcccccaccagcggaggaagaagaggagggagatggatgatgggctggctgagggagggccgcagcgatccagtgagtagacagtggccctagagggtcggtaaggagccaagggcctatgcaaggatgctcacacacctcccatccccaccttcccagacacatatgtgatcaagctgttcgaccggagcgtggacttggcccagttcagcgagaacacgccactgtacccaatctgccgcgcctggatgcgcaacagcccctctgtgcgcgagcgtgaatgctctcccagctcacccctgcccccgctgcctg

SEQ ID NO: 348910 - DNA, 1050 bp, Homo Sapiens
  misc_feature (825)..(825): n is a, c, g, or t
  misc_feature (827)..(827): n is a, c, g, or t
  misc_feature (830)..(830): n is a, c, g, or t
  misc_feature (832)..(848): n is a, c, g, or t
  misc_feature (850)..(854): n is a, c, g, or t
ggaattcctgggatcagctagccagatcccggacccaaccatgttccctgtgaaggtgaaagtggagaaatcagagctggagatggccaaagcccggaaccaactggatgctgtcttgcagtgtctgctggagaagagtcacatggacagggagcgtctggatgaggaagctgggaaaacaccctcagacacccacaataaggactgctccatcgcagccactggcaaaaggccatctgcccgcttcccccaccagcggaggaagaagaggagggagatggatgatgggctggctgagggagggccgcagcgatccaacacatatgtgatcaagctgttcgaccggagcgtggacttggcccagttcagcgagaacacgccactgtacccaatctgccgcgcctggatgcgcaacagcccctctgtgcgcgagcgtgaatgctctcccagctcacccctgcccccgctgcctgaggatgaggagggctcagaggtaaccaacagcaagagtcgtgatgtgtacaagctgccgccacccacacccccggggccacccggagatgcctgcagatcccgcatcccatctccactgcagcctgagatgcagggcacccctgacgatgagccctctgagcccgagccctcaccctccacactcatctatcgcaacatgcagcgctggaaacgcatccgccagaggtggaaggaggcctctcatcggaaccagcttcgttactcagaaagcatgaagatcctacgagagatgtacgaacgacagtgatgttcccaggtccccccacaccagtaaacatcccccagctcctnanaanannnnnnnnnnnnnnnnncnnnnnagggccggccgcttctagagtaatccctccaaggggccccaagcttacgccgtacccagctttctttgtacaaaggggccccctataatgaggtccgaattaaagcctaggccactggcccgccctttttacaacctcctggactgggaaaactggctaacttggggaaatcttgggtgaaggaacctttactttc

SEQ ID NO: 348911 - DNA, 1155 bp, Homo Sapiens
aaggctggtaccggtccggagttccgggatatcgtcgaccacgcgtcggtaaacccgtggatgatttgatgagggataaatgaacctatttcctttgcacaacattatcaactcactttagccacaagcatgtccttggtatgtgtgtaaaagatagttgtcaccaactcatttctttatggtccataatgaaataaaaattttgtatactgttaattctgtaaacagatgcatgttcaaaagatctatgatggtcttgtaatcttaatctaatatattttagatattttaattttttccctcttggggaacacatttagtatagtgtagaaaatacttccatgacattttcatataaggttatataacttttcatacataaacatgaaatttgttgtagaaaattctttaaaccaaacatttaaatctaggacttcaatttaatttgttccttgaatctatttttatgtggcccttaaaaaatatccaaaaaacccattgctaatatagcaataaaaatactttgggtactgacagactctttggagtgtttatattacaaatttgtattcatattcttttctgtgatgtgtcgtactaaaatccaaaatggcttttgcaccatttttaagccaatttcttcctttgatgttggtaccagaattactataagtgactgctgcttttgggggtaaacattttgttagtgaagataaaaccagaacactaaattatggataaaattttcagaataggtggcacaggtaaatttcactaggttatattttgtgtagtaaagaaaaaaattatttggtcaatgttatcttaattcatactacaatttaagattatcttatgtgtattatagcaaatagatgattttcagattcaagggctcctaagagtttgatttgctctgttttttcctaaaataaatattgtctctcccaactgttaagttctaggtattggacttccaattttaacttcaaaaccaagatgttggcatgaaccaaggctgcctgttgaagtacatgtatattataaattatcttatttgtgttatactcttacatgttatcttttctaagaaaacaaagtccctattattcctattgcaaagcacacaggaattaagaaagtacagtaattttt

SEQ ID NO: 348912 - DNA, 1177 bp, Homo Sapiens
  misc_feature (629)..(638): n is a, c, g, or t
  misc_feature (911)..(1118): n is a, c, g, or t
  misc_feature (1122)..(1122): n is a, c, g, or t
  misc_feature (1126)..(1126): n is a, c, g, or t
  misc_feature (1130)..(1130): n is a, c, g, or t
  misc_feature (1134)..(1134): n is a, c, g, or t
  misc_feature (1139)..(1139): n is a, c, g, or t
  misc_feature (1144)..(1144): n is a, c, g, or t
  misc_feature (1147)..(1148): n is a, c, g, or t
  misc_feature (1166)..(1166): n is a, c, g, or t
  misc_feature (1168)..(1168): n is a, c, g, or t
  misc_feature (1174)..(1174): n is a, c, g, or t
  misc_feature (1177)..(1177): n is a, c, g, or t
aggctggcgggcgcggggaaaatggcggcggcggcggtggcggctgcagctaccaacgggaccggaggaagcagcgggatggaggtggatgcagcagtaatccccagcgtgatggcctgcggagtgactgggagtgtttccgtcgctctccatccccttgtcattctcaacatctcagaccactggatccgcatgcgctcccaggaggggcggcctgtgcaggtgattgaggctctgatgggcatagacaccagggcccaaatatccaggtgatcaactcccccaagcagcggtcccacaccaagcagcgacatggagccagatgcaccagtagtccccaaagtcatcgcctccccaatgacagggagtgttcccaccgatctccagacccttgtcaggctcaacatagaagaccactggacccgcacgcgctcccaggacaggcggcctgtccaagtgattggggctctgattggcaagcaggagggccgaaatatcgaggtgatgaactcctttgagctgctgtcccacaccgtggaagagaagattatcattgacaaggaatattattacaccaaggaggagcagtgtgagagtggaatagatgtggggaagaggagtgggagttnnnnnnnnnntgtacagggtggggaagatggagagggttggaaagaaacaggagaggagaccaagaacaggggagaaaaagtgaagagtagctggagagatctcagaaaaagaaaacgttcagagttctttctcaaaagaaagcaaaggatgagaggagacaggatagaagggagtagttattctaaactgagccaggatttgaggagggaggagagaagctggtgaaaatacaccaggagcttcacattgaggaaggatggtttaaagaattactatgtcannnnnnnnnnnnnnnnnnnnnnnnnnnnnnnnnnnnnnnnnnnnnnnnnnnnnnnnnnnnnnnnnnnnnnnnnnnnnnnnnnnnnnnnnnnnnnnnnnnnnnnnnnnnnnnnnnnnnnnnnnnnnnnnnnnnnnnnnnnnnnnnnnnnnnnnnnnnnnnnnnnnnnnnnnnnnnnnnnnnnnnnnnnnnnnnnnnnnnnnnnnnnnnncggnggtntggngacngaaanatgcnctnnccccaccctgggaaaaancnaattcnttn

SEQ ID NO: 348913 - DNA, 1360 bp, Homo Sapiens
tgcagctacgaacgggaccggaggaagcagcgggatggaggtggatgcagcagtagtccccagcgtgatggcctgcggagtgactgggagtgtttccgtcgctctccatccccttgtcattctcaacatctcagaccactggatccgcatgcgctcccaggaggggcggcctgtgcaggtgattggggctctgattggcaagcaggagggccgaaatatcgaggtgatgaactcctttgagctgctgtcccacaccgtggaagagaagattatcattgacaaggaatattattacaccaaggaggagcagtttaaacaggtgttcaaggagctggagtttctgggttggtataccacaggggggccacctgacccctcggacatccacgtccataagcaggtgtgtgagatcatcgagagccccctctttctgaagttgaaccctatgaccaagcacacagatcttcctgtcagcgtttttgagtctgtcattgatataatcaatggagaggccacaatgctgtttgctgagctgacctacactctggccacagaggaagcggaacgcattggtgtagaccacgtagcccgaatgacagcaacaggcagtggagagaactccactgtggctgaacacctgatagcacagcacagcgccatcaagatgctgcacagccgcgtcaagctcatcttggagtacgtcaaggcctctgaagcgggagaggtcccctttaatcatgagatcctgcgggaggcctatgctctgtgtcactgtctcccggtgctcagcacagacaagttcaagacagatttttatgatcaatgcaacgacgtggggctcatggcctacctcggcaccatcaccaaaacgtgcaacaccatgaaccagtttgtgaacaagttcaatgtcctctacgaccgacaaggcatcggcaggagaatgcgcgggctctttttctgatgagggtacttgaagggctgatggacaggggtcaggcaactatcccaaaggggagggcactacacttccttgagagaaaccgctgtcattaataaaaggggagcagcccctgagcacccctgctggtggctctgtcctctgttaggcaccacactggttggtcaacttggatgttcatcgaggctcattctggccttgctcagaagcccttctgatgctcttcagtgagggaggcactaccatttgaagtgaccccatgtcagtcacatggactggtctttagcaaagtccaaggctgcctgcttccacctaagtggtctctgttctacactttaatgtcaccctctacatcatcttacctagcccacccaaccttataaacatgataattgactactt

SEQ ID NO: 348914 - DNA, 806 bp, Homo Sapiens
tgcagctacgaacgggaccggaggaagcagcgggatggaggtggatgcagcagtagtccccagcgtgatggcctgcggagtgactgggagtgtttccgtcgctctccatccccttgtcattctcaacatctcagaccactggatccgcatgcgctcccaggaggggcggcctgtgcaggtgtgtgagatcatcgagagccccctctttctgaagttgaaccctatgaccaagcacacagatgccacaatgctgtttgctgagctgacctacactctggccacagaggaagcggaacgcattggtgtagaccacgtagcccgaatgacagcaacaggcagtggagagaactccactgtggctgaacacctaatagcaaagcaaagcgccaacaaaatgatacacagccgcgacaagctcatcttggagtacgtcaaggcctctgaagcgggaaaggtcccctttaatcatgacattcatcagggaggcctatgctatgtgtcaatgtctcccggtgctaagcacagacaagttcaagacagacttttatgatcaatgcaacgacggggggatcatggcctacctcggcaccatcaccaaaacgtgcaacaccatgaaccagtttgtgaacaagttcaatgtcctctacgaccgacaaggcatcggccaggagaatgcgcgggctcttttttctgatgagcggtacttgaacgggctgatggaccaggggtcagggcaacttattcgcaaagggggaaggggcactacacttcccttgagagaaaccgctgtccattaataaacgggc

SEQ ID NO: 348915 - DNA, 521 bp, Homo Sapiens
ggtctacatcaatgcgttccgttcctctgtgaacagagtgtaggtcagctcagcaaacagcattgtggcctctccattgattatatcaatgacagactcaaaaacgctgacaggaagctgtgaaggagacggagaaacctgaacactatatgccaacatttgggctaactgcctatacacatttcctctcatcttcccaagaaaacaatgaagtagggataacctcctatcacagtctggaccattaaatgactaagccagagtcacagcttggtaagtggcatctggcataccccaatagaggagtgtcacacagtacaaaggtatagcgacaatcatgacagagtaggcatggagtattactcacatctgtgtgcttggtcatagggttcaacttcagaaagagggggctctcgatgatctcacacacctgcttatggacgtggatgtccgaggggtcaggttggccccctgtggtataccaacccagaaactccagctccttgaacacctgtataaac

SEQ ID NO: 348916 - DNA, 638 bp, Homo Sapiens
cgtgatctagaggatcccagttcgacggagactctctctgtagcatgcttacagagagaggagctgtgagaaaataagtgtcctatttcttaccgtgccagttgggtggatgctgacctcattcaaggaatattattacaccaaggaggagcagtttaaacaggtgttcaaggagctggagtttctgggttggtataccacaggggggccacctgacccctcggacatccacgtccataagcaggtgtgtgagatcatcgagagccccctctttctgaagttgaaccctatgaccaagcacacagatcttcctgtcagcgtttttgagtctgtcattgatataatcaatggagaggccacaatgctgtttgctgagctgacctacactctggccacagaggaagcggaacgcattggtgtagaccacgtagcccgaatgacagcaacaggcagtggagagaactccactgtggctgaacacctgatagcacagcacagcgccatcaagatgctgcacagccgcgtcaagctcatcttggagtacgtcaaggcctctgaagcgggagaggtcccctttaatcatgagatcctgcgggagggctatgctctgtgtcactgtctcccggtgctcagcacag

SEQ ID NO: 348917 - DNA, 727 bp, Homo Sapiens
  misc_feature (1)..(1): n is a, c, g, or t
  misc_feature (8)..(9): n is a, c, g, or t
  misc_feature (11)..(11): n is a, c, g, or t
  misc_feature (16)..(16): n is a, c, g, or t
  misc_feature (19)..(19): n is a, c, g, or t
  misc_feature (23)..(23): n is a, c, g, or t
  misc_feature (25)..(25): n is a, c, g, or t
  misc_feature (27)..(27): n is a, c, g, or t
  misc_feature (29)..(29): n is a, c, g, or t
  misc_feature (33)..(33): n is a, c, g, or t
  misc_feature (42)..(42): n is a, c, g, or t
  misc_feature (49)..(49): n is a, c, g, or t
  misc_feature (60)..(61): n is a, c, g, or t
  misc_feature (73)..(73): n is a, c, g, or t
  misc_feature (77)..(77): n is a, c, g, or t
  misc_feature (80)..(81): n is a, c, g, or t
  misc_feature (83)..(84): n is a, c, g, or t
  misc_feature (86)..(86): n is a, c, g, or t
  misc_feature (88)..(88): n is a, c, g, or t
  misc_feature (90)..(92): n is a, c, g, or t
  misc_feature (97)..(97): n is a, c, g, or t
  misc_feature (106)..(107): n is a, c, g, or t
  misc_feature (109)..(111): n is a, c, g, or t
  misc_feature (117)..(117): n is a, c, g, or t
  misc_feature (119)..(119): n is a, c, g, or t
  misc_feature (124)..(126): n is a, c, g, or t
  misc_feature (137)..(137): n is a, c, g, or t
  misc_feature (153)..(153): n is a, c, g, or t
  misc_feature (162)..(162): n is a, c, g, or t
  misc_feature (167)..(167): n is a, c, g, or t
  misc_feature (177)..(177): n is a, c, g, or t
  misc_feature (183)..(183): n is a, c, g, or t
  misc_feature (194)..(194): n is a, c, g, or t
  misc_feature (200)..(201): n is a, c, g, or t
  misc_feature (205)..(205): n is a, c, g, or t
  misc_feature (221)..(221): n is a, c, g, or t
  misc_feature (225)..(227): n is a, c, g, or t
  misc_feature (232)..(232): n is a, c, g, or t
  misc_feature (237)..(238): n is a, c, g, or t
naaatgcnngnatttnagngatngngngncagnagaatagtncaatgantttaaattcannaaaaagggagtncatnggnngnngngngnnngtcanggaaatatnncnnnatttanancccannngcttttgaagnagggaaggctagtaanaaactggcntgttntgcatgtatnccccancattgagtcanagattnncagnttcaaaacacaatttntaannncacanttttnngataaactgtttaacatcctattaaaataattacattaagcacaagataaatttgttacattttgtccttataaaagaattaggaatgcccctttagaagaaatagctcttcttttttacatcaccttgaaatagttccctcttgaggtaatcctttattagatttatgctgttcatgtcttcttttgattgcagtaccagtgtattttgtgagagttgcagaattaattgttgaaaaattcatgtaagtgcttttttattagtcacatgagactgactatagcacattgttaccctaagtttttttctgaactcttaaatgtaagtaaaatttttaatatttgaaagtatttttaaaacaagaactcaatatttgatatgcattaatgtaaggtctacataaaatgtagcactttaatttacaataaaaaggaaaaaatggctgagtacaaataatattagcagtgtccagacaggcgcggtagctca

SEQ ID NO: 348918 - DNA, 886 bp, Homo Sapiens
ggcctgggtggcgaattcggcacgaggcctctttccaatagacttgaatggagaggagagggagagtcccggcaaaatttactgacaatggaacagattctctctgtggaagaaactcaaattaaagacaaaaaatgcattttgttcagaataaaaggagggaaacaatttgtcttgcaatgtgagagtgatccagagtttgtgcagtggaagaaagagttgaacgaaaccttcaaggaggcccagcggctattgcgtcgtgccccgaagttcctcaacaaacctcggtcaggtactgtggagctcccaaagccatccctctgtcacagaaacagcaacggcctctagcacccagaaacagggagggtcctcgaggaggacacaccagggtctcagccttttggggtgaacgaggatgaggcatctgatctattcgctaccgggactcctccaggctcccgagaggagtcgggacccttcggcttggggtcagctcagctccctgccttgtcacatttgtctgcattagaaactactgaagaaataaaagttctttttctttgctacacactttggtacctatgaacctagaacttgaagtgactcctacttatcacgtaaatttttatgtctgatatcaaacacatcttagactccccagaatggaatttaaagatgttcagtgttgggtaacagattgccctaagcattgccacatattctgtctagtcactgctgattttctatgtctttgctccatactgctgggggatgggagagccacagtgtgtttcttttgtgcacttcgcaactgacttcttgtcctgggggttaaagttgaagatattttctgatgatattaaaagttgaagatatttctgcactt

SEQ ID NO: 348919 - DNA, 1835 bp, Homo Sapiens
  misc_feature (258)..(267): n is a, c, g, or t
  misc_feature (284)..(343): n is a, c, g, or t
  misc_feature (352)..(428): n is a, c, g, or t
  misc_feature (738)..(776): n is a, c, g, or t
gtattgtaaaaaattcacataataaacgatgttgtgatgtaatattgtgtgaggtcttaaatatcctacagtcgatgtacaagagtagagtatgtttgggaagaaacttttcagcttaagtttgcctcctctacaatgacatcttttatatgcttgtctcatttagaatgcatatgtgctgattttctaatttaagagataccatatctctctattcatttctatctctcatttgtatgcttatttttctgagaacannnnnnnnnncccccagacagggtctnnnnnnnnnnnnnnnnnnnnnnnnnnnnnnnnnnnnnnnnnnnnnnnnnnnnnnnnnnnnctctggctnnnnnnnnnnnnnnnnnnnnnnnnnnnnnnnnnnnnnnnnnnnnnnnnnnnnnnnnnnnnnnnnnnnnnnnnnnnnnttttgcagcctcccaaagttctgggattacaggcatgagcgtcatgctggcctctgagaacagtttctgactcattcagattaggtatactctcaagtccctggaaactgaaattttttttaactgtaaagagggtagtgtcatttcttttcttaaggtcaagtgacatagattttaatgtaatgcataatttaggtaagaaattaattaatgtagcctagtttattatcttgaaatgttttaccctatttactttttaaaattaatgacctaagcggagggaataattataagtcaatagcagagagannnnnnnnnnnnnnnnnnnnnnnnnnnnnnnnnnnnnnnagagattgggttaacacctctagccaaaattgtttggttttagggaggctaacaataacctactgaatttggaaaatgcaaaggtaaaaaatgtatatagactgcctgctgaactggttaagtactactgcttctgggaaatactatttcaaaattctatgtattataataataaatttgtaagacattcattattctaccatcctaatgaaaactttcagaagtctttctttatccatggcatgcccagggttttacctgaatctgatacaggatctatataactttactaggacttttgattgttgactccaggcttaggtatatcagaaggttctttttgccatttggcctgtggatgtctgagaagatcattcacaatacatgtaaaattcaggtaggcctaaggaaaggccagcctgtagaaagcaaaatggcagtgtctgttctccactgttggaggcattatgtaatttaagtatcctgttagccactgtctttctgctaattaagtggggctgaacaagtaagcactaataataccagtgaaccacttgggcaccttgtgggtagagttttgctgccacctagtggaatgggatatcattgcttccatatcaggttcacaagcaagttaagtgggcacagtttatttctgtgtagctcaggctgtaatcttgaaagctgaggagatacccatgcctctcagactcattagctgggtgtcacattaccacctgcacattctgacccaccgcatcttaatatgttttgtcctcttggagaaactaggagtagaagtcaggatatggtaggtaagggggaaaaaggaaagacggcttgatagctatgaatgcatgaggagcgaaatgttgactcagttatctagatcatggtctccaaacctgatgctatttccttacaaaaatatttgttgagcatgtgtccataattatatgtattgaacaatgaaaatatgtgtcaacaaatgtactgctacactaatgtgaacattatggaacaaaatttgaaagagtgaaataaaaggtttacactttc

SEQ ID NO: 348920 - DNA, 733 bp, Homo Sapiens
  misc_feature (571)..(572): n is a, c, g, or t
  misc_feature (621)..(621): n is a, c, g, or t
  misc_feature (640)..(640): n is a, c, g, or t
  misc_feature (692)..(692): n is a, c, g, or t
aggagctcccgccagagccagagcccgagccggaaccagagctggagccggagaaagccgatgccgagaatggggagaaggaagaagttcccgagcccacaccagagccccccaagaagcaagcacctccctcaccccctccaaagaaggaggaagctggaggcgaattctggggagaactggaggtgcagagggtgaagttcctggtctcagactctccaccaggggaggacgacatggaaggctcagctgctggggatgtgtcaggtgcaggctctggtggcagctctggctggggcttgggggccggagaggaggcatagggcgatgaggatgagaacatggtgtactacttcctggaggaaagcacaggctacatggaacccgccctgcggtgtctgagcctcctgcatacactggtggcctttctctgcatcattggctataattgtctcaaggtgcccctggtaatctttaagcgggagaaggagctggcccggaagctggagtttgatggcctgtacatcacggagcagcctgaggacgatgacgtgaaggggcagtgggaccnnctggtgctcaacacgccgtctttccctagcaactactgggacaagtttntcaagcgcaaggtcctggncaaacatggggacatctacgggcgggagcggattgctgagctactgggcatngacctgggcacactagagatcacagcccacaatgtgcgcaa

SEQ ID NO: 348921 - DNA, 1305 bp, Homo Sapiens
atcaggccaaatcggccgagctcgaattcgtcgagagcggagccgggaccgctgacctggcgctttgtgcggctccaggcctccgagtggactccagaaagcctgaaaagctatcatggcagcaaggcccaagctccactatcccaacggaagaggccggatggagtccgtgagatgggttttagctgccgccggagtcgagtttgatgaagaatttctggaaacaaaagaacagttgtacaagttgcaggatggtaaccacctgctgttccaacaagtgcccatggttgaaattgacgggatgaagttggtacagacccgaagcattctccactacatagcagacaagcacaatctctttggcaagaacctcaaggagagaaccctgattgacatgtacgtggaggggacactggatctgctggaactgcttatcatgcatcctttcttaaaaccagatgatcagcaaaaggaagtggttaacatggcccagaaggctataattagatactttcctgtgtttgaaaagattttaaggggtcacggacaaagctttcttgttggtaatcagctgagccttgcagatgtgattttactccaaaccattttagctctagaagagaaaattcctaatatcctgtctgcatttcctttcctccaggaatacacagtgaaactaagtaatatccctacaattaagagattccttgaacctggcagcaagaagaagcctccccctgatgaaatttatgtgagaaccgtctacaacatctttaggccataaaacaacacatccatgtgtgagtgacagtgtgttcctagagatggtattgtctacagtcatgtcttaatggatcccagctctgtcatggtgctatctatgtattaagttgggtcctaagttgggtcttttgtgtcaacgagatcatctcttctagaaatatcaaccttttttgtccagtaaataattgttaggggatctttattggaaaacttttttggagaggctggtatttaagttagatctgattgggctactcatgtcctgtagccagttcatcctcataataagaatgggcaggatctcttgttctctcctgagtgtctttctactctcctgagcgtctttctgctctccttatcctgttctcttatccttatcccctccagtctctgcctaatttttagtgtttaataacaaccgaatgtctagtaaatgactctcctctgagctgtaataaataaaatggtagtaatgaatgcaatcagtgttagccaaaataaagaatttatgagtcattgctc

SEQ ID NO: 348922 - DNA, 320 bp, Homo Sapiens
ctctgtcagatatagggtgcgttctcttaattgatgttatttatgaaagcatgaaatgacaaggtcatagtttcacctcttctcagatactgcactgattcaatagcctcatcagtctctccatgtggaatattgtaactgatgcacaccatttccctacagattttaaggggtcacggacaaagctttcttgttggtaatcagctgagccttggcagatgtgattttactccaaaccattttagctctagaagagaaaattcctaatatcctgtctgaagtttcctttcctccaggtaaataaaactatgtattagaag

SEQ ID NO: 348923 - DNA, 1642 bp, Homo Sapiens
ccaacaattccttaacaatccaatacaatttaaaaaccatttcaagtcattgcctataacacttcttagtttacccattaataactcacaccattgcttttaagcgtgtgaatgtttccagcaatcatcaactttaaaaatggacaacaatgaaaagatgtctaagagtctccagaagcatccaaattttggatctctcctacgtatagcacaaggtagaattgatacaatgtgccttccagcttgcctttaaagctctccatatgtctagttctgaggtgaagagattaaaaataggaagagcctggtagggagtgaagattcaaaatgcattgctagatctcacaccggttatatttcctctctaagatctcagctgcagttgccaatggggatattgaagggtacactttaaagttggctaagcattacggggagagtttcccaccatttctttccctttaacctgtaaaattctttctgaagtaaaaaagagttttaatgggggctcaatgctcacagtattaacttagaaagacccttggcatgaagggagcctgttccaatatctcctcttggggtctgataattcaatgagagaaccagccaagagaataaattagggaacagtctccttggtctgtttaggacaacctttcacatcctaatcttttacttcccatgtttccctctcgtttgaaaatgaaatttaccttagctgactagcctgcttttgtgttctggttgcaaaaatattttgtgaatttatgataatcgatacttttgaattgtttttacctttcaaagtgtattccgttgaaaataccatggaacattaaggaaatggtggaggatggggtaaggaggctggtaagtgaattgtttctttcctgtcagagagcaagatattaaaacaaaaagtgacaaataagattggcttggaaaagtgcctctccacaattcagaaagtcaacctacattaggcaaaggcaacatttcaaagtgcagaaaatctggccccaggtatagataatgcctgtggtacagaaaaaaaagcatacataacattcaggaacaccgcacttggagaaataaaacacataagttataagtgatgtggagagatcaaagtacatataaatatttcaacacatcctatttttactaggaaagatattcaggtcttaacacactatcagagctaaatttaaatgtttaacaggatggttgtatacggccattcctactgcttctgatgctacacttatttatatttactgcacatgagtcctaagtctacatgaaaactgatgttcaacatcaaaatgtacacccttaaagaaggtaaaagtgtaggatcttgcaaatgctagaagcagctactgcctgtaagtgaatcttacacatctcatctaaattcctaagcctgctcatttggtgagacaccatgtaatcaagttcctttggcaggggttgagggataaagctgaagatttttgctagccccgtagagaaatggggagaaatttggcaaggcatctttgacgtggctcaggaattagaaatattggaaatacagactaagactggaaattgggtttactaagatacttatctcacaaaacaaactctgttgtttatt

SEQ ID NO: 348924 - DNA, 832 bp, Homo Sapiens
tgactggggcgagcgtgctgtggcccttccctgcgctgcctcagggtgcctcccgctcggccgggactgtagttccgcgccggcgtggcctgctgggttccaagcgccaggagtcggcgcagccgctctcagctttggggacgggaccgagaagcggggtgtgggcctcacgggactgtcccccctgacctcgggcagcgctggggcgagagagggcaggcggaggctctgcggggaccaccagcatccccggaccctctcagccgtccctgttcacaggcgccgcccccaggagcctcggcaggggcctaggacgccccggcgtgcagaagagaagcgggatcagatggcgtcccatgtagagtgccgtcctctgggagtgtttgagtgtgaactcttgtacccttgacagctccgtacagctatgtgggacagaagccccccaacacccagtcgatggtcctcctggaggaaagctatgtcatgaaggatcccttcacctccgacaaggacagattcctggtcctcggctcgtgctgcagtttgtgcagcaggctggtgtgttgtgggcccggaatgcagtttattctactccaagagatttctgcctcccttgtgtccgggagaacatcaatgcttttcctcaggaaattcggcaagacttggagaaaaggaaagctccatcaaagaggacccccagccagcccggttctcggacgtgagtgcaactggggctaggtcatcgggcggaacctgcacagagctcctgggccagctgcgccagggatgctgctgagctggggagccgcaatgctggccttgtttctggacc

SEQ ID NO: 348925 - DNA, 886 bp, Homo Sapiens
ggacgcggagccgtgggacgagggcggcgatggcgtcccatgtagagtgccgtcctctgggagtgtttgagtgtgaactctgtaccttgacagctccgtacagctatgtgggacagaagccccccaacacccagtcgatggtcctcctggaggaaagctatgtcatgaaggatcccttcacctccgacaaggacagattcctggtcctcggctcgtgctgcagtttgtgcagcaggctggtgtgtgtgggcccggaatgcagtttattctactccaagagattctgcctcccttgtgtccgggagaacatcaatgcttttcctcaggaaattcggcaagacttggagaaaaggaaagctccatcaaagaggacccccagccagcccggttctcggacgtgagtgcaactggggctaggtcatcgggcggcaccctgcacagagctcctgggccagcctgcgccagggatgctgctgagctgggagccgccatgcctggccttgtttctggaccactgggagcagcactgcagcccaggggagctggagtccagcttggagcagccacaggcccagggagctgtagcaagagggtagtccaaaggcagatgccagacaagacacagcaggaacccggccaggtccccccacatgcccctcagggcccaggcctgagtgagtgctgctcagatgtgactgagagggatgacctccttcagcagggcagctcctaagaggctgcgtgcaggtgcgtgtggggggagatggcacactgtgtcggggcaatggtgcactggtaggtgggctgaccaatggttctctctgtaaggaaaatcactgaacagcagctccttctggaccagcctgggaaggtccagagggggaaa

SEQ ID NO: 348926 - DNA, 697 bp, Homo Sapiens
ccgactagaagaagcagaaatactgtgctttaaaagaaccaagtcgtggctggtgaaagataggtctggttgatttgtaagaaccatactgggcataaaaggaaagagaagtaatttttgtaaatggaccccctcgctgagtggaagttactgcctgaatcagctgcacacaatataaactcctggcaggagtttctctgtgagtcagatatcaaagtcttctacaaagtgggatgggcactgtggcaagttggtatagccacgtttcttgaactgaaaaggataaaaagataagtagaaaggcacactgtgaatgtcacgtaattaaatacctggccaaaatgagcaagagctaccttaccctgagcctagctaggtcagtgtgtggtgctcacctggaaagaggaataagatcaaggaggtgtaaaaccctcacataaggggtcttactgtgtggggttcagggctagcctgctgacataatagtgacattggaaagcaaagtcctgccccggtccctccatcaataatggaaacatggaggcaagatctccaaaagcagggtacgctggagaggcaaggcccctactggggcttgagaaggaagagaaaggtgacagaatcagaacagaccatgtcggaggcttcacaatagctgggagaagtacagaatttgggcctgggcacagtgtctcgt

SEQ ID NO: 348927 - DNA, 396 bp, Homo Sapiens
agacaggcacagaggcctaaaatgcccacgatgcatgcctctagcagctttgaattctgctggatcatctgacgcaatgggcagagcaggtttggccacagcctatatctgctgtagagatattatatgttctggattccacttgaaacccggagtctttgcattcattctgcaacccatctagttttggcagaggctaggtaggttaactgaacagggatttaaaaaggactttattaacacgttggagcaatatcctctattgtggtatttgtggactccgaaaccccaagaggctcaataaacactgtgcttcctttttagtgataagaagtatatatagggcaacatgccatttaccttaaaaaggatgtttctgctgggcgtggtggttca

SEQ ID NO: 348928 - DNA, 1636 bp, Homo Sapiens
acacgatatgtttatcttttggtgaggcacatgtatcgaatttatggattacagttattgatggaggacacatggaagaggattcgtttcccagacatactacgagtcttttggctaacaagagttacagctcaggctacagtgttaatgtacatcttaaggatggcaaatgaaactgattccttcttatttcttgggatgatttttgggacctcatttgcaatcttataattagtgggtgcgattctacactaactgtactgggcatgagtgctgtaatttcctcagtagcccattatttggggcttggaatattggcctttattggatcaactgaggaagatgacaggcgtcttggctttgttgcacctgttttattttttattttggctcttcagactgggttaagtgggctaagaccagaagagagacttattcgcttaagtagaaacatgtgccttttattaactgcagtcctgcattttatccatggaatgacagaccctgtattaatgtctctcagtgcctctcatgtgtcatcttttcgtagacattttcctgtgctgtttgtctctgcttgcctgtttattcttcctgtcttactcagttatgttctttggcatcactatgcactaaatacatggttgtttgcagttacagcattttgtgtggaactgtgcttaaaagtaattgtttctctcactgtttatacgttattcatgattgatggctactataatgtcctctgggaaaagcttgacgattatgtctactacgttcgttcaacaggcagtattattgaatttatatttggagttgtaatgtttggaaatggggcttacactatgatgtttgagtcgggaagtaaaattcgggcttttatgatgtgcctacatgcatattttaacatctacttacaagccaaaaatggctggaagacatttatgaatcgtaggactgctgtgaagaaaattaattcacttcctgaaataaaagggagccgcttacaagaaataaatgatgtatgtgcaatctgctatcatgagtttacaacatctgctcgtattacaccgtgtaatcattatttccatgcactttgcttcggaaatggctgtacattcaagatacttgtccaatgtgccatcagaaagtatacatcgaagatgatatcaaggataattcaaatgtatctaacaacaatggatttattccacccaatgaaactccagaggaagctgtaagagaagctgctgctgaatctgacagggaattgaacgaagatgacagtacagattgtgatgatgatgttcaaagagaaagaaatggagtgattcagcacacaggcgcagcagctgaagaatttaatgatgatactgactgatgaaaatagcatttattaatgattgaggtatttgtttaaaattcagttcatccaaaatggagtaatatccttcaccttcagtgtgtaaccaagcacaaaaacagtatcaatgttgaatctgtgaatggttttccgtttactgtgatgtgctactgtaaatatacctctttaattacttctggtctctttggtgacctgtttaaatttgtgtacattattgtacatagaataaaatgttttcacatttttatgaca

SEQ ID NO: 348929 - DNA, 1025 bp, Homo Sapiens
  misc_feature (882)..(883): n is a, c, g, or t
  misc_feature (889)..(889): n is a, c, g, or t
  misc_feature (931)..(931): n is a, c, g, or t
  misc_feature (976)..(976): n is a, c, g, or t
  misc_feature (989)..(989): n is a, c, g, or t
  misc_feature (996)..(996): n is a, c, g, or t
gggtccggaattcccgcggattatatacaaattatatatatgtacaaaacaatactatgcattctctatggctatataatgtacgtaaatctatttttaaaggttcagaggaatccataccaaagttctaacagcgagtaggaggtatagatgagagattaggggtgcaaatcaggattgggagggtggtcagagggaactttagctttatccataacattaatttttttaaaaaataaggtcttaatgtttcatttaatttaaaatatactgtcatgttgtgttttgtaaatcaactgaattgaggtactatttacttagatttattgcaccctttttaagtgtgtattttattgggttttgacagattcatacctctgtgcagccactatcacgatcaagatacaaatattttcattgcccccaaaattctcataccccctttcccaatcaattcctctacccctagccctaggcagccacagatttgcttttggttaccgattagatctatccattgtagaattcatgtaaatagaatactgtagtatgtactttgccttcttcctctctgcagatttttgagattgatccctgtgtgtcagttgtgcattttttttgttgctgagtagtatgttctatcttatgtcagatcattcacgtgagactttggcatgaaatgttaagcatccgacatctaaatagcaatattttgaatactggaaactcaggttaaagattttgtttccaagtagaaatgaaatcttattattttaataagtagctgacaatgacagaaagattggatttggatcagaatggctgttaggcttcaggtatgggaaacagctctcagatttataaattgggaaatcaccaggnntacttngccatatataggtcatatttgctgccatttgtacttaatttnctaaaatatattaaaatcccacattttaaaaatttataaaaagcnaagggactttggnggattgnacctggattgaaatccatgggaaatttgc

SEQ ID NO: 348930 - DNA, 1644 bp, Homo Sapiens
agtgcagcgcggggcggggcgggccggtgcgcctggcagtcggctgcgtcctcctgcgagcgccggagaggggctggaggcggggcgagggcgcggctcgaggcatccctgcagggcgctcctccgagtccctcggcgctctgagcccacagggaagaaggaggggccggcgtcagtgacgtcagcgagaccgaggtgagcgtgggcgttgccagtggtgctctgtcagtgcctatggattatggcagggaaagtaaaatgggtcactgatatcgagaagtcagtgctgatcaataactttgaaaagagaggatgggtccaagtgacagaaaacgaggactggaatttttactggatgagtgtgcaaaccatccgaaatgtgttcagcgttgaagctggatatcggctctcagatgaccaaatagtcaaccattttccaaaccactatgaactgacccggaaggacctgatggtgaagaacatcaaaagatacaggaaggagctggagaaagaagggagtcctctggcagaaaaagatgaaaatggaaaatacctctatctggactttgttccagtcacctatatgctgcccgctgactacaacctgtttgtagaggagttccggaagagcccgtccagcacctggatcatgaagccttgtggcaaggcccagggaaagggcatcttccttatcaacaagctctcacagatcaaaaagtggtcccgggacagcaagacatcttcgtttgtgtctcaatctaataaggaagcctacgtgatctctctctatattaacaacccgttactaattggcgggaggaagttcgacctgcgcttgtacgttctggtgtccacgtaccgtccactgcgctgttacatgtacaagcttgggttttgccggttctgcacagtgaaatacaccccgagtaccagtgagctggacaacatgttcgttcatctcaccaacgtcgccatccagaaacacggggaggactacaaccacatccatgggggcaagtggacagtgagtaacctgcggctctacctggagagcacccgcggcaaggaggtgaccagcaagctgttcgatgagatccactggatcatcgtgcagtccctgaaggctgtggcgccggtgatgaacaatgacaagcactgctttgaatgctatggctacgacatcatcatcgacgacaagctgaagccctggctgatcgaggtgaatgcgtccccgtctctcacgtccagcactgccaatgaccgaatcctcaagtacaacctgattaatgacaccctcaacatcgccgtcccgaatggtgaaatcccagactgcaaatggaacaagtcgccacctaaggaagtcctcggcaattacgagattctgtatgatgaagaattggcccagggtgacggggctgaccgggagctgagaagccgtcagggtcagtctctggggcccagagcaggccgatcgagagactcggggagagcggtcctcaccacctggaagtgagtcccacctggaccttatcaaaactactcactccacctgggcccctgctgaagccctattttgaaatttcccttttgtagagcttttttcctttcctaagccctgtaaataaatgaaggcacttctttgga

SEQ ID NO: 348931 - DNA, 857 bp, Homo Sapiens
  misc_feature (787)..(788): n is a, c, g, or t
  misc_feature (807)..(808): n is a, c, g, or t
ttaggggcagcaaaacataggctaggtacgaggctgggtgttaccagaatgagaagaaggaaagcggggccggttccttcaggacccgcctcagggggcaccgcggcggcttggggaccacttggagccccgtcctggggagaaaacagctcacgtctatggccctgactgcttaggcgggagctgcgtgcagctcagcttctccggggcatttttttctacacgctgggtgagctatgaacaggccaactgcaagggcgagcagtttgtgtttgagaagggcgagtacgcccactgggactggtggaccagcagccagaggacagactcagcagcctgaggcccatcaaagtggacagccaagagcacaagatcatcctctatgaaaaccccaacttcaccgggaagaagatggaaatcatagatgacgatgtacccagcttccacgcccatggctaccaggagaaggtgtcatctgtgtgggtgcggagtggcatgtgggttggctactagtaccctggctaccgtgggctgcagtacctgctggagaagggagactacaaggacagcagcgactttggggcccgtcaccctcaggtacagtccgtgcgctgcatccacgacatgcaggggcaccaatgtggtgcctttccacccctacaactagtgcccacccccaccatgccctccttccccaggacccagggtccggctgcccaaggaacccctccagaacctcccaggagaatgaaataaagcggtgactttccaaacttaaaaacccccnnaacccccccacatccacannaacccttggtccgggccgcccttcggcccctccgaagaagctttttcta

SEQ ID NO: 348932 - DNA, 526 bp, Homo Sapiens
  misc_feature (208)..(325): n is a, c, g, or t
agcggggcgtgcgtggcgtggagtccagaatgagaagaaggaaagcggggccggttccttcaggacccgcctcagggggcaccgcggcggcttggggaccacttggagccccgtcctggggagaaaacagctcacgtctatggccctgactgcttaggcgggagctgcgtgcagctcagcttctccggggcatttttttctacacggnnnnnnnnnnnnnnnnnnnnnnnnnnnnnnnnnnnnnnnnnnnnnnnnnnnnnnnnnnnnnnnnnnnnnnnnnnnnnnnnnnnnnnnnnnnnnnnnnnnnnnnnnnnnnnnnnnnnnnctgggtgagctatgaacaggccaactgcaagggcgagcagtttgtgtttgagaagggcgagtacgcccactgggactggtggaccagcagccagaggacagactcagcagcctgaggcccatcaaagtggacagccaagagcacaagatcatcctctatgaaaaccccaacttcaccgggaagaagatggaaatcatagat

SEQ ID NO: 348933 - DNA, 997 bp, Homo Sapiens
ccaattaaagggtttcaagccagtggccccggcccagttacagggttggtccctgcccgctggggaagggggattcccgtgttcgggacgtgaagatcaaccagtgtgtcgttcagggacacccggcgtcaccgcagctccctggagcacccagttccaactcccttggtccatgcggccgacggtggtgtactgagcggccaggtcggctcgggctgccgggggtgttggggacgaagtaaggcaccagcacgtcccagtgggtcgtaggcctggggggtccagtctgggatacgacccatgccgctctctccgttgccaaacttctcacagaaggttccgtactggggctgggagtgcccacagcggtgggggtcgtggaaggcgacgtagaggaagaaaggccggtcatcctgagtctgcaggaatttccggacgagcagcttaattctagtgatgttccgccccacctggaggacggagccattctcctccgtgtacgcaaagtcaaacgggtacacggtctccggccccacgtgcttcttcccgatgatgcctgtgcgcacaccagcttggctgagcagcagcggcaggctccgcaccttgtcgaaggagttgaagtggtgcacgtcctggtgcagcccgtacatcccattctgatgctggggcaggccagtgaggaggctggcgcggctgggagagcagctgctgaccgaggtgaaggcattgcgaaagaggaggctgcggcgggccaaggcgtccaggtgcggggtggcgatggcgctgttgttgtacgcgccactctcaaagcctccgtcatccgcgaggagcagcagtgcgttccggggacgcgcccggcagagccccaggactagcagcagcgcgcagcaggcgggcacggggcagctcatggcggcggcggctcggactcgggatcgggatccggctccggctctctggtctcccgctcgcgccccgcccctgccccgtccccggc

SEQ ID NO: 348934 - DNA, 1561 bp, Homo Sapiens
  misc_feature (185)..(185): n is a, c, g, or t
  misc_feature (992)..(992): n is a, c, g, or t
  misc_feature (1025)..(1025): n is a, c, g, or t
  misc_feature (1075)..(1075): n is a, c, g, or t
  misc_feature (1219)..(1219): n is a, c, g, or t
  misc_feature (1263)..(1263): n is a, c, g, or t
  misc_feature (1343)..(1343): n is a, c, g, or t
  misc_feature (1366)..(1366): n is a, c, g, or t
  misc_feature (1373)..(1373): n is a, c, g, or t
  misc_feature (1429)..(1459): n is a, c, g, or t
  misc_feature (1462)..(1462): n is a, c, g, or t
  misc_feature (1485)..(1485): n is a, c, g, or t
  misc_feature (1488)..(1489): n is a, c, g, or t
  misc_feature (1491)..(1491): n is a, c, g, or t
  misc_feature (1529)..(1529): n is a, c, g, or t
  misc_feature (1531)..(1531): n is a, c, g, or t
  misc_feature (1533)..(1533): n is a, c, g, or t
gggatctgcgaggaaggaagggggccacaggcaggccgcgtgggcccctagagagagcattgccctgggggccggagtatctggattcaagcttctaagttagctgcgtgaccctgcgccaatccgaagtttagtgactacctctcgcctaaggagtctggctgatctagggttctaacgcggantgaaagtgcggttcagctaaagagctcagatctgggatcgcctgtgaattgggatgggtgtgtaggcgccaagcccatccttaccgttagcacttgaccaggaggagactttacccgcctgcttggggaatgtcctcctacttgggacaagggcctgaattgttgtggctcaggtttagctcgcggtctccgcgccgctctccctcgtcggcgcgttggcagtcatgcctattgttaagtcaaacctactcgcttgtggagtcagcttttgcctgcctcctcctttccccccctcccaggctaactcaggtgagatggagccgctatagtcctgaattcaaggatcccttgattgacaaggaatattatcgcaagccagtggaggagctaactgaggaggagaaatatgttcgggagctcaagaagactcagctcatcaaagctgctccagcagggaaaacaagttctgtgtttgaagacccagtcatcagtaaattcaccaacatgatgatgataggaggaaacaaagtactggccagatccctcatgattcagactctggaagctgtgaaaaggaagcagtttgagaagtaccatgccgcttctgcagaggaacaggcaaccatcgaacgcaacccctacaccatcttccatcaagcactgaaaaactgtgagcctatgattgggctggtacccatcctcaagggaggccgtttctaccaggtccctgtacccctacccgaccggcgtcgccgctttcctagccatgaagtggatgatcactgagtgccgggataaaaagcaccngcggacactgatgccggagaggctttcacacangctgctggaggctttccataaccagggccccgtgatcaagaggaagcatnacttgcacaagatggcagaggccaaccgtgccctggcccactaccgctggtgggagagtctccaggaggagcccagggccctctgccgcaagaaacagtgtgggccactgccacgctgaaaactacctgtgggttaaggatgtngttcctttgtaagggtgggcaggcctcgttagaaagatgtggcngcatattcactatccgtgaatccctctttctttgaggctgggacttgctctctctgcccctatttccttgtaaagagggngcacattgacttgggaattgccnccagganactcagggctgttttctcttcccttaggttggggcggacctttggacatataaagnnnnnnnnnnnnnnnnnnnnnnnnnnnnnnnggnggagaggcgcggcggcgggggcnggnntngcttgtggggctgcattcagtgagactggctggaggananangctttttccagagttgacttatacaaaa

SEQ ID NO: 348935 - DNA, 2167 bp, Homo Sapiens
cgctgccaccccccagcgatttaatttaagacgacagtaaacataccaggtcataaggtagcgaggcctgggtgtgcggtaaattcaccaacatgatgatgataggaggaaacaaagtactggccagatccctcatgattcagactctggaagctgtgaaaaggaagcagtttgagaagtaccatgccgcttctgcagaggaacaggcaaccatcgaacgcaacccctacaccatcttccatcaagcactgaaaaactgtgagcctatgattgggctggtacccatcctcaagggaggccgtttctaccaggtccctgtacccctacccgaccggcgtcgccgcttcctagccatgaagtggatgatcactgagtgccgggataaaaagcaccagcggacactgatgccggagaagctgtcacacaagctgctggaggctttccataaccagggccccgtgatcaagaggaagcatgacttgcacaagatggcagaggccaaccgtgccctggcccactaccgctggtggtagagtctccaggaggagcccagggccctctgccgcaagaaacagtgtgagctactgccacgctgaaaactacctgtgggttaaggatgtagttcctttgtaagggtgggcaggcctcgtaagaaagatgtagcagcatattcactatccgttaatccttctttctttgaggctggaacttgctctctctgcccctatttccttgtaaagagggagcacattgacttgggaatttcctccaggaaactcagggctgttttctcttcccttaggttggggcggacctttggacatataaaggaagcagttttagtatcagaaaagatttattagaaaattctcacgctgaactggtgtagcatgtggtgcagcattcagtgaaactggctggaggaaataggcttgtttccagagttgtccttatacaaaatgtataaaaagcagtttctggtgtgacttgtgctctgcctccaccccttgacatcccaaaatatcccaccagtggctatgcttacccattttacagatgggtaaactgaggcaccaaggtagtagttgcactaatggttacacagtgcagtggctcttgggagttgcccttctctgcctggccgtggtgggttgtggtggggaaaggggctcagggcaggaccacggcataagtgggaaacatctcaccaggagatgggaaagtctagaagggaagacactcaaagtctggaagggaaaagtctttgggtgaggcagagactccactgccagctttagaggtgggtagaagaaaggccagttgctggtgaggaagcccctgatctggagggcctagtcggagacttcgctgtagtaatacttgtgggcagctggcgttgtcttccagccgcccgcccggaactcaatgatctccagcagcagcagctgggccagggagctgaggccagttgggagcaggaagccatcccggatccagcacaaagagctcatccatgcgctgcccattcattttctccagctgctccccaacccggtgcagctgcagcaccaaacagtccacctccgtgagcagtgggctgacacacggctgagctggactgtccatcctgcagccttctgtgcttgtgccagggctggggccacccacctcctcctccttgctcaaactgtctggctgggccagccggaagaggcagtcatagacagggttcaccagggccatcatgggcatgttgttcaccctcaggtagtcaaagatgttgcagataaaggtgacatagcagacccagccctgcagggagcgtgctcgcagctgctcccgagcctggtactcctgctgcagccggttgaggagtccacgtcggaagacactctggcctgcttgtttactctctgcctgaatgatggcgtagcacatgcgtcctgcttccttgctgaacacacagtcctgcagagaatggtccacaatcacattggccactttctccaagtccacagcacccggatctttgagtgctgtcttcagcagctgctgggtctctgcatcaaaggactggattttatactcctctctactgggctcccccatgactagccagccccggtagctctgacgggcgatcccgggaatccggaccggtccagcc

SEQ ID NO: 348936 - DNA, 1039 bp, Homo Sapiens
gtaactgaggcccccaagggtagtagttgccataaatggttaccccagtgcagtggcttcttgggagttgccctttctctgcctggcccgtggtggttgtgggggggaaaaggggctcagggcaggaccacggcataagtgggaaacatctcaaccaggagatgggaaagtctagaagggaagacactcaaagtctggaagggaaaagtctttgggtgaggcagagactccactgccagctttagaggtgggtagaagaaaggccagtgctggtgaggaagccctgatctggaggcctagtcggagacttcgctgtagtaatacttgtgggcagctggcgttgtcttccagccggccgcccggaactcaatgatctccagcagcagcagctgggccagggagctgaggccagttgggagcaggaagccatcccggatcagcacaaagagctcatccatgcgctgcccattcattttctccagctgctccccaacccggtgcagctgcagcaccaaacagtccacctcctcctccttgctcaaactgtctggctgggccagccggaagaggcagtcatagacagggttcaccagggccatcatgggcatgttgttcaccctcaggtagtcaaagatgttgcagataaaggtgacatagcagacccagccctgcagggagcgtgctcgcagctgctcccgagcctggtactcctgctgcagccggttgaggagtccacgtcggaagacactctggcctgcttgtttactctctgcctgaatgatggcgtagcacatgcgtcctgcttccttgctgaacacacagtcctgcagagaatggtccacaatcacattggccactttctccaagtccacagcacccggatctttgagtgctgtcttcagcagctgctgggtctctgcatcaaaggactggattttatactcctctctactgggctcccccatgactagccagccccggtagctcttgactgggctggcctcgtgccgaattcgccacccaggcctcgctaccttag

SEQ ID NO: 348937 - DNA, 397 bp, Homo Sapiens
tataaataagtagatttataccaatcttaatagaattgtatattttatgcaagaattaaatgctttacaacatgaagtataactcaacccattgtaaactttggtggcaatatggatttgaaactcgacagttctcttgtatttgcttcctaggtttctgcatgcaagttatgacaggtaggactgaaaaaacactgccttttgacttctagcatttagcaaccgagagtcgtagagtcaataaagctgtaagtgtcttcacttaatctgtggttctcctaaaactattatctgaaacctacagcatcccaccatgaaatatttggtaaatttatgttgtgacgtgttgcagcatgtaaataattataacttctctgcaataaaacatatttatatg

SEQ ID NO: 348938 - DNA, 1704 bp, Homo Sapiens
tcccttgatttggaggcttatcggagacttcctgttagtatactgttggccaactggcgttttcttccacccgccggcccggaactcaatgatctccagcagcagcagctgggccagggagctgaggccagttgggagcaggaagccatccgcggatcaccaccaaagagcgcagtccatgcgctgcccatgcaggtgtcggccagctgctccccaacccggtgcagctgcagcacccaaacagtccacctcctcctccttgctcaaactgtctggctgggccagccggaagaggcagtcatagacagggttcaccagggccatcatgggcatgttgttcaccctcaggtagtcaaagatgttgcagataaaggtgacatagcagacccagccctgcagggagcgtgctcgcagctgctcccgagcctggtactcctgctgcagccggttgaggagtccacgtcggaagacactctggcctgcttgtttactctctgcctgaatgatggcgtagcacatgcgtcctgcttccttgctgaacacacagtcctgcagagaatggtccacaatcacattggccactttctccaagtccacagcacccggatctctgtactgcgtgttacagcgggaaggcatcaggcgagagcaattactatagctcctctggcaaacggaatattctccatcttctgtctcaaagcaggcaactgtgcattcaagagacggggctttgagtgctgtcttcagcagctgctgggtctctgcatcaaaggactggattttatactcctctctactgggctcccccatgactagccagccccggtagctcttgactgggctgggaataaggacagcacctgaggagaagaggcgaagggagcggcctcaggtgtggagcgcagggcgggttccgtcctgcaggccctggacggggctgacggcgcgctcgggacagggactcctgggcggtccgtggcgtgcggtggttggctgaaggcccaccaggcttggcttctggtggggactgggcatcagccaggcacctgctgctcagtttagaaatccctcgcttgtgggattacacaagagcgagaagctgaagcaggaaagcgcccaccctccagtcccagcaggaggcaggagtagactggggcagggtgtgtgcgggcggacgttacagttgcttaaataaaccggcctgacgttgctggcccaggaagatgccgggtgagggccaggctgggaactccaagcggtgcgactctgtccccagcaggtctccgagcccctctccccaaccctctctttctggctttcgccgagtccttcggtctcaacacccgccgctgcatcccccggatggggccggcctgcgtgggtggggacgcaggcgccctgtccgccgcccctgccgggagcagcctgaactccccagacccgtgccagcttctccctgggacaggctggtcggatcggctcccgagtggcagtaacccggccctacgcactcgagactcctaattcctgagctccattctggagccttcctcttactggggggcaggatgatgcgccccggagaggtggctcccgccggaggctcccctctggccgtaggaggcgcctttagggtctccagccctcggccgttccccccgcgcccggaacgcccctcccggatcccgggaattccggacc

SEQ ID NO: 348939 - DNA, 1378 bp, Homo Sapiens
tcgaccgagggccgcgccagactgcgacggatacagggagggcaagggtttccttttggcgcttccctttggaccccggagtgaaaaactctaacgtccagatcagtggagagaaacgcagatttaggaccctgaggagtctttttcacccgtttcccgtcactcgctcaggcgcgccgagggcagtccttgtggggtcctcgtggccagccaagatggttgcccccgcagtgaaggttgcccgaggatggtcgggcctggcgttgggcgtgcggcgggctgtcttgcagcttccagggctaactcaggtgagatggagccgctatagtcctgaattcaaggatcccttgattgacaaggaatattatcgcaagccagtggaggagctaactgaggaggagaaatatgttcgggagctcaagaagactcagctcatcaaagctgctccagcagggaaaacaagttctgtgtttgaagacccagtcatcagtaaattcaccaacatgatgatgataggaggaaacaaagtactggccagatccctcatgattcagactctggaagctgtgaaaaggaagcagtttgagaagtaccatgccgcttctgcagaggaacaggcaaccatcgaacgcaacccctacaccatcttccatcaagcactgaaaaactgtgagcctatgattgggctggtacccatcctcaagggaggccgtttctaccaggtccctgtacccctacccgaccggcgtcgccgcttcctagccatgaagtggatgatcactgagtgccgggataaaaagcaccagcggacactgatgccggagaagctgtcacacaagctgctggaggctttccataaccagggccccgtgatcaagaggaagcatgacttgcacaagatggcagaggccaaccgtgccctggcccactaccgctggtggtagagtctccaggaggagcccagggccctctgccgcaagaaacagtgtgagctactgccacgctgaaaactacctgtgggttaaggatgtagttcctttgtaagggtgggcaggcctcgtaagaaagatgtagcagcatattcactatccggtaatccttctttctttgaggctgggacttgctctctctgcccctatttccttgtaaaagagggagcacattgactttgggaatttcccccaggaaaatcccgggctgttttctcctccccctagggcggggggggacccccttgcgaatctcacacggccgtagtccttttgcctcccgaaacacgttttcttcccgaatatcttccctccggcccccactgggggggacccccgtgggcggtccgagcctttcccccccgcgacaatcggcggctggaccgcgc

SEQ ID NO: 348940 - DNA, 820 bp, Homo Sapiens
tcccgggtggtgaatcggcacgaggccgcagtgaaggttgcccgaggatggtcgggcctggcgttgggcgtgcggcgggctgtcttgcagcttccaggctaactcaggtgagatggagccgctatagtcctgaattcaaggatcccttgattgacaaggaatattatcgcaagccagtggaggagctaactgaggaggagaaatatgttcgggagctcaatgaagactcagctcatcaaacgctgctccagcagggaaaacaagttctgtgtttgaagacccagtcatcagtaaattcaccaacatgatgatgataggaggaaacaaagtactggccagatccctcatgattcagactctggaagctgtgaaaaggaagcagtttgagaagtaccatgccgcttctgcagaggaacaggcaaccatcgaacgcaacccctacaccatcttccatcaagcactgaaaaagctgtgagcctatgatcgggctggtacccatcctcaagggaggccgtttctaccaggttccctgtacccctacccgaccgtgcgtcgccgcttcctagccatgaagtggatgatcactgagtgccgggataaacaagcaccagcggacacttgatgccggagaagctgtcacacaagctgctggaggctttccataaccagggccccgtgatcaagaggaagcatgacttgcacaagatggcagagggcaaccgtgccctggccactacagctggtggtagagtctcaggaaggagccaggccctctgcgcagaaaccgtgtgagcctaatggcacgctgaaaactaactgt

SEQ ID NO: 348941 - DNA, 966 bp, Homo Sapiens
  misc_feature (71)..(107): n is a, c, g, or t
  misc_feature (798)..(798): n is a, c, g, or t
  misc_feature (801)..(803): n is a, c, g, or t
  misc_feature (812)..(812): n is a, c, g, or t
  misc_feature (819)..(820): n is a, c, g, or t
tcaccccaccaccaccaccccccgatgatacactcactatagggcgactggagttaacgcggtggcggcgnnnnnnnnnnnnnnnnnnnnnnnnnnnnnnnnnnnnnatcaggccaaatcggccgagctcgaattcgtcgagagcggggggtgtggagaggcccggggccaggaaagcagagacagacaaagcgttaggagaagaagagaggcagggaagacaagccaggcacgatggccaccttcccaccagcaaccagcgccccccagcagccccaggcccggaggacgaggactccagcctggatgaatctgacctctatagcctggcccattcctacctcggaggtggaggccggaaaggtcgcaccaagagagaagctgctgccaacaccaaccgccccagccctggcgggcacgagaggaaactggtgaccaagctgcagaattcagagaggaagaagcgaggggcacggcgctgagacagagctggagatgaggccagaccatggacactacacccagcaatagagacgggactgcggaggaaggaggacccaggacaggatccaggccggcttgccacaccccccacccctaggacttattcccgctgactgagtctctgaggggctaccaggaaagcgcctccaaccctagcaaaagtgcaagatggggagtgagaggctgggaatggaggggcagagccaggaagatcccccagaaaagaaagctacagaagaaactggggctcctccagggtggcagcaacaataaatagacacgccccgaccaaanaannnaaaagaaanaaaaaannaacatgttgggccgccctcggcccttcgagaactttctagacccattccttttggcggccgggccccagtaggaaaggggaacatgggcctagctggttccctaggaaaacccgggccatgaactagggcttggaattctccccaa

SEQ ID NO: 348942 - DNA, 545 bp, Homo Sapiens
  misc_feature (20)..(20): n is a, c, g, or t
cgtgtgtcccaggccgtcgnccccgctgtcgcgctgcgtctgctcctagcatgcctttagatggtacagccttcagccggggcttcgggagacagtgcagccaccgagcatctctgctgagcttctccgccgatcctccttttctagcaggcagctcttctaggccacgtccaggtcgagggggaaaatggcgccggcgcccctaggcgtcccggaggagcagttgctggggtgtcgatctagagtgctttctcggttactcttcattgcccagaccgctctcctcctgttgcccgccgccggagcaggtctctgccccgcgccctgctcctgccgcattcctctcctggactgcagtcgcaggaaattgcccgcaccgagctggagggcgctgtcgggcttgctgccccccgacaccgctatcctggatttcagtcataatcggttgtctaactggaacatcagcttggaatcacaaacattacaggaagtgaaaatgaattacaatgaactaacagaaatcccgtattttggagaacctacat

SEQ ID NO: 348943 - DNA, 948 bp, Homo Sapiens
  misc_feature (580)..(580): n is a, c, g, or t
atagggccgctactactactatgctgcgaagaaagacgacagaatggggggcgtcggggcttcggcgggcattagcagcagctgagaggcctgtgagaggttctggggcgccaccgcagctcattctgttcagcgggtatagggctcctctaggcccagtgggttgctggatttttaacagccacaagaaaccaacactaatgcagtgtgagcccctcagcgtggtctgtactgggcactgattaatgcctacttggtatgagacacttccaagccatgagccggctctacccctcttcctggaatgccttcatctaacctccattcctgccattatccttccacattcagctcagatatcccttcctctgggaagctctcccgacttgacagaaataacttctccctcgtgtgctgtgcagatcctgtgcagactccaactgggtccttatgtaattatgcttacggtcggtccacctgcctctacactgtgagggcaggaactgtgtcttgtttcttgcgtgtggctttggatgcaaagcaacgtacctggccaaactggcattgaggagatatctgntggattaagtgactcgaggtggagcctccccaaaaggagaagctaggcctctcttccccatcacctgcctcaccatgtctaataagatgtccactttcagccgcaagagattgttctcttcctccaactgctgggttccgcctgcgaaaggcgctgaacctccctccggtccacaccgggcactaacccctgtctctggaggaaggccagaaccagttaaaggggggatttcctcctacaatcttgtttgacaaaatgggcaggaagtgcagctcacctgttatccacgtgggcattttcaacctttcaggctttgcctgccaggttcatagtcggggatccggattccaagcccagtcaacttccgg

SEQ ID NO: 348944 - DNA, 1113 bp, Homo Sapiens
  misc_feature (550)..(550): n is a, c, g, or t
gtcaaggtaactctgggctacagagtccttgctgggggttcggggagcgcttggaccccggcttctgggacgcgtcaggagaagggagcactggctttgctttcatcaggccaaagatgcctttctttgggaatacgttcagtccgaagaagacacctcctcggaagtcggcatctctctccaacctgcattctttggatcgatcaacccgggaggtggagctgggcttggaatacggatccccgactatgaacctggcagggcaaagcctgaagtttgaaaatggccagtggatagcagagacaggggttagtggcggtgtggaccggagggaggttcagcgccttcgcaggcggaaccagcagttggaggaagagaacaatctcttgcggctgaaagtggacatcttattagacatgctttcagagtccactgccgaatcccacttaatggagaaggaactggatgaactgaggatcagccggaagagaaaatgaagaccccagagacatttattggggagtaggatgtggctgagtgctttgttttnggccagactagcggattcagtcctggaagagagtatcatataatgagacccacaggcactggcacccttgggttggcaatagaaggtgacatggaatggagaaaaccaagattccagatggggatagtaactagaaggtgcttcagatgcactgcctgcgggtgccagtctgaaaaccagaccgcacagaggcctggggctgctgatgagctttttggtgctctccacacacaagctcgcaaacacacatgtcccagaatagctctgttgggttgtgttgggagaagcggctggagttcattctctcacccccttatgttggtgtttggcgtgtgacagcagttctacagagctctgtgttggggtcatggatgagcggctctcttggctcttaaaggcaggcctctctcttcttgcctttaaagaatcctccttcctcacacctggcctcctctggcttcagcttctcagcagcaagcaccagccttccacaacaacactatatttttatgctactttcctgtttgcactactacttttttattaaacgatgttaaataatc

SEQ ID NO: 348945 - DNA, 683 bp, Homo Sapiens
gggaggcggcaggaggcgggtgggtcaaggtaactctgggctacagagtccttgctgggggttcggggagcgcttggaccccggcttctgggacgcgtcaggagaagggagcactggctttgctttcatcaggccaaagatgcctttctttgggaatacgttcagtccgaagaagacacctcctcggaagtcggcatctctctccaacctgcattctttggatcgatcaacccgggaggtggagctgggcttggaatacggatccccgactatgaacctggcagggcaaagcctgaagtttgaaaatggccagtggatagcagagacaggggttagtggcggtgtggaccggaggaaggttcagcgccttcgcaggcggaaccagcagttggaggaagagaacaatctcttgcggctgaaagtggacatcttattagacatgctttcagagtccactgctgaatcccacttaatggagaaggaactggatgaactgaggatcagccggaagagaaaatgaagaccccagagacatttattggggagtaggatgtggctgagtgcttttttttggccagactagcggattcagtcctggaagagagtatcatataatgagacccacaggcaattgcaaccttggttggcatagaaagtgacatggaatgagaaaaccagattcc

SEQ ID NO: 348946 - DNA, 697 bp, Homo Sapiens
ggagatcatccgggccgacttccatccagatatcacgcctctcacatatagtagtcttctgaattatgaagatttataaagttacttccaaaagaagctacataaataagaaagttatctatttatagaaatatctatttagcagttccataatttaaaatattcaaatcaaattgggtaggactggtttgcctctcactcccacagactatatttatacctcagacacagcaagttacatttaaacaatgagtgtagtactacttaactaaaatggaaaaaatagtactcttaacataatccctaattttttcatgaacataaaactccaagtcatttatgtgaactatatctcaatgtagctgtaggaaaaataaaaacctgtgctaacctggactttggtctcatttaagatttggttctggaatgcaaatatggtttttgaaagcccaataaaattaattcttgtatagtctgtatatattgtttacaaggactacaaacactgcatcacaaatcggaggccttggtaaataactaagtgtccaacatagaaaataactatttggtcaaaagtataaaaggtctgaccttatttgaaatacgaaaaagctgagtacttggaagatacgtgaaaatactcagcatagatattatgaaaagctgaataacaagtaaccttttttctcaaattatt

SEQ ID NO: 348947 - DNA, 946 bp, Homo Sapiens
  misc_feature (717)..(738): n is a, c, g, or t
ctgcggtctgaggcaccggctgaaccatgtcggagatcctgtgccagtggctcaacaaggagttgaaggtgtcccggaccgtgagtcccaagtcatttgcaaaggcattttccagtggctatctacttggagaagttctacacaagtttgaacttcaggatgatttttcagaattttggacagcagggtttcaagtgccaaacttaataatttttctcgcttggagccaacacttcaccttctgggtgtgcagttgatcagaatgtggcccatggcatcatcacagaaaagcctggggtggcaacaaagctgttatatcaattgtacattgctcttcagaaaaagaagaaaagtggactgactggagtggagatgcaaaccatgcaacgtctgacaaatttaagacttcaaaacatgaaaagtgatacttttcaagagagacttagacacatgataccacgtcaaactgatttcaatctgatgcggattacatacaggtttcaagaaaaatataaacacgtgaaagaagatcttgcccatttgcattttgagaaacttgaaagatttcaaaaactcaaggaagagcaaagatgtttgatatcgaaaagcaatacttaaacagaagacgacaaaatgaaataatggccaaaatccaagcagctattatacagattcctaaacctgcatcaaatcgtactttgaaagcactcgaagccnnnnnnnnnnnnnnnnnnnnnngaggcagaagatgtggttgatgaaatttaagaagtttcgcagacatttaataacaaaggttctccaagcaaaagaaagtgcatccaagacttttttagaatacagcaggacagaaaaacaccgatttgtgtaatacttatccgaatgatgagtacatttaaaaattcggaaaggtggataaagattttggcgaaagaaacggggaaac

SEQ ID NO: 348948 - DNA, 1070 bp, Homo Sapiens
aactgaaagtgcaggtatgcagccgtgggtgtgggagattagctggctgctgtctcttggtggagagggaaaagcttggcctggtcctcagcctcatagccacacggcaggtcactcctattgtcattgatatctgtggcatttccattgtccatgttggccttctggtaggaagccaaggggccgccagaagatgtggctcccactgctggtacaggagtttgcaaagtacatatctgaggtggagctgggtgtggcctgcaggtagagattctggtagttctggaagaggctgttggtgtaactgatgcactcagggctccgggtgccataggggttggtgggtgaggatgctgggtagtggccaggccggacgggtttggcaatctgggcagaatggccccgtttgcccgagctcttgtagcgaacggcctccttgatgcggtccacctcctgctggtaccggcgcttgtccttcatggcgccctccttggcctccttcagtgcaccctccagggccttaactctctcagccgtagccctaagtcgtttttccaatttaggaagctcacaacgcagatctgcattgtcacgtaccagctgtttgtgaacctttgtaagctgttccaggttgttctcaagaaaggaaatcttctgcttttgggagtgaatccccccactgtcttcgggctccatttctgcacttttcttgactcgagtcgtgacgtcttgaacgaacagcttgcgaaggttgtggagggtctggagttcccgggcaactgtctcctccagacccttgaggtcctgcttggactgctcatgtcgctcgtacagaaatgtcagctcctgcagcttggtgctcttctcgtgttcttcgctcttcagcttctcgtagtcagcctgaagcttctctagctctaactggagcttctgatttaggtctttgagctcatcaatggtcttctgcttctcgttgatctcgtcccggagccgggccagctgccggtgatgggcctcccggtgactctccatctgcagctccagagcttcttcacttcatctgcatcctg

SEQ ID NO: 348949 - DNA, 877 bp, Homo Sapiens
ggtagtcagctcggtaccgggtcagtacggatgtggaccgcatcaaggaggcgttcgctacaagagctcgggcaaacggggccattctgcccagattgccaaacccgtccggcctggccactacccagcatcctcacccaccaacccctatggcacccggagccctgagtgcatcagttacaccaacagcctcttccagaactaccagaatctctacctgcaggccacacccagctccacctcagatatgtactttgcaaactcctgtaccagcagtggagccacatcttctggcggccccttggcttcctaccagaaggccaacatggacaatggaaatgccacagatatcaatgacaataggagtgacctgccgtgtggctatgaggctgaggaccaggccaagcttttccctctccaccaagagacagcagccagctaatctcccacacccacggctgcatacctgcactttcagtttctaagagggactgaggcctcttctcagcatgctgcaaacctgtggtctctgatactaactccctccccaacccctgttgttggactgtactatgtttgatgtcttctcttacttactctgtatctctttgtactctgtatctatatatcaaaagctgctgctatgtctctcttctgtcttattctcaagtatctactgatgtatttagcaatttcaaagcatagtctaccttccttatttggggcaatagggaggagggtgaatgtttcttctttctcatctactcgtctcacactgagtggtgttagtcactgagtagaggtcacagagatgacaaaaggaaaaatgggagctagagggttgtgacccttcatacacacacatccgtactgcccg

SEQ ID NO: 348950 - DNA, 1424 bp, Homo Sapiens
  misc_feature (44)..(44): n is a, c, g, or t
  misc_feature (415)..(415): n is a, c, g, or t
  misc_feature (1226)..(1281): n is a, c, g, or t
tgcgatccccgggctgcaggaattcggcacgagcaatatgactntagttagaaataattcgtaatgaaaattgtgatgttctgagcatcttttaaaatgtacattaacaaaacagtattcagaaacaaagctaaaccggaagcctgagaagaaacagttatggtcggacatgaaatttagtaacagacttttggtaaatcatgtcaaattgggaaatttaccaaatatcctatttttcttaatctgatgaaaaacagatttattttaagtgacatagagttcctggcatcaaacttttggggtaacttatcactcctaaataatgttcataactgtgtttttatactagtttgtaaaacactttaataaggtatcataaggtagtataaggtttatctaatagttactttcattntaggtttgtatccctatacagaggaccatgtcatacatacaaagtacaaagacttaatgagtcaacatcctataaattctgtattcaagcttgtaatgaagctggggaaggtcccctctcccaagaatatattttcactactccaaaatctgtcccagctgccttgaaagcccccaaaatagagaaagtaaatgatcacatttgtgaaattacatgggagtgtttacagccaatgaaaggtgatccagttatttacagtcttcaagttatgttgggaaaagattcagaattcaaacagatttacaagggtcccgactcttccttccggtattccagccttcagctgaactgtgaatatcgcttccgtgtatgtgccattcgccagtgccaagactctctgggacaccaggacctcgtaggtccctacagcaccacagtgctcttcatctctcagaggactgaaccaccagccagcaccaacagagacactgtggaaagcacaaggacccgacgggcactgagtgacgagcagtgtgctgccgtcatccttgtgctgtttgctttcttttccattttgattgcctttatcattcagtactttgtaatcaagtgaaaatataactttattttttaactctattacattttattttgtcatgtactaaaattatttctgtattgcttttataaaaaacagtggcatttagcactggcattgagactatagcacatcatttttgccattttcagtgcttatattgttaggtagaggctggcactttattagaatgcaagccacaaaaatatcaannnnnnnnnnnnnnnnnnnnnnnnnnnnnnnnnnnnnnnnnnnnnnnnnnnnnnnnaacaaatgccttcttatagaaaaactttctaagaggcaacaatttagaatggatattttgacgaatcggcatgagtgtaacagtgataacctgatctgtttgttttaaagattattaccaaggtgaaaaattcagaatgaata

SEQ ID NO: 348951 - DNA, 750 bp, Homo Sapiens
  misc_feature (107)..(143): n is a, c, g, or t
agcgtggtgcactgagtgacaagggccatacatttcttgcatataacatcacccactctaatatgctctatgaaataacactctatggaaaacagtgaagaaagcannnnnnnnnnnnnnnnnnnnnnnnnnnnnnnnnnnnnctcctgcattccaaaggcaaccaccagtaacaatttcatatatgattttctagtctattcaataagcaaaccgtttgtagcctactttttagcttagcagatctagagcatattcagaggtcgatatttattcctctgtaacagattatgtaatggctgcataatccttctatcatctaaagttaccataatgaatttgaccaatccctattggaggacatgaggttgtttccatttgccaattgtcacagtttactgtggttaaagttgttatgctcaataataacaataagtaatatttacaagctatttactaagcaatgagcactgagtaaataaagcacttttcatgaattatgtcatttaacctctcaaagaactaaatgagacaagtactattattatcctggctctgtctgtgaggaaactgagccttagcagcataagtagtgtgcccaagccatgcaactctatatcgagttctacaaataacagctattacaactatggtcaactctgcacagtaacagggatatcaggggaaacatcactgagtagatgtcactagaaacctggtcccttgtgcataatgcctgcctgtctcttt

SEQ ID NO: 348952 - DNA, 795 bp, Homo Sapiens
  misc_feature (777)..(777): n is a, c, g, or t
ccatagtatcagttcaagctaagaaagccttaagaattcaataactcaaaatctctttgagatttaaagttaaaaagtaatatgtttctaataatttctaatgtgcaggattaatgacaactgtattttgcattggcaaattatctcagccagaagagattcaaatgattttcgtcaatgccagtttataaactagcagcacatgtcaatgccaagcttgtgaatggattggctgagaaaaattatatgagttagaagggatctaagtgctatactggtcactgattctatttcacaaaagctaccatttttaaaagctgaaaatgtaattggtgttgacaaaaacatgttaagttcaattactctgtatagctaaatatagaaaattggttaatgtttaaagcaacttcttatttgttaagaagataattaaaaatagttaaaactgaacaattagctatacttttatattattaaaatccaatgaatttaacaaatgaaacccacaggaaaagagatgatataattcaaggcatagatttgacatgtcagaatacggcaaaaacaataaagatagcatcagtaaaacagttgtaaaataagtaaacaattttcaagtgtgcaaaactagtcaggaataaaagtgctatgtgtggatacctgggttttcaaatatttgtttcaaaaactttcagctggatgggtggaaaaactagaaagtattatataagtaaaaattttaaagaattatataaaaccctactttattatcctacnttatggccctggttatgg

SEQ ID NO: 348953 - DNA, 917 bp, Homo Sapiens
  misc_feature (788)..(788): n is a, c, g, or t
  misc_feature (797)..(797): n is a, c, g, or t
  misc_feature (847)..(847): n is a, c, g, or t
  misc_feature (890)..(890): n is a, c, g, or t
  misc_feature (898)..(898): n is a, c, g, or t
agaaccatgcttcctggtttttcatacatccaaggaagaagtcctggtgtgggttgtttgacaccttctttccactttcaccttttattttttattccttcctttctacccccatccagtcgagcaaatgagcaattttgtgtttctaatacaggatctggaagtagtgctttctaatcctcatttcctgtaggatgttcctgcactataacaagattatgttttcttccttctgcagcagctttctgcttcttgggtactactagctattgttcaattcaggtgaggcctgtgatgacatatatgtagcatgtgctctgcgctccctgcaagctgagcagatacaaccaatgcatcactgtatactcttgctgagaatgtggatgcagcctcacagatctttgcaacactccaaccagccaggaccagttgatcagaactgatcttattggtctgataaccaatcttatttgtgaactgattcatatctgtctttccactcttggttctcttgccgtaggaacaaaaacagtttaggaagcataattacgaacatttaggaaccaatatgtataagtaattcggagactccaattcacctgcccctcccccatcccaggttgtggaggctcgaggaagctgacttcttaggctaaaggacaaaaaaatctctttacctccttggccattttcatgttctctgccaattactataggcagtcttcattttgcagaggtgaggtaagacttcatcttattcttcatgtaatcccaccttctaacaaaanataaataanttttaaattcccagggggagtgttctttgtgtatttctagccgggaaacnggtgcttaggccttaggagggaggtcccttcctggccaagggnagtggggnaactggacccgttttctgg

SEQ ID NO: 348954 - DNA, 701 bp, Homo Sapiens
taagatgcctatcacctagagtgggagccagccagtggtaactattggaataaatcaattgtttctaaggcctgttccaggtcattccttatttccttgaattgactttggagttcctcaaaatgaacagccaccagtgcagtgagtgttctaagtgtgtctgctgtattatccatctgaccaaaccaccatcatacgtgccgatgtgtgacatgaaataactggatattccaactcgatacctggcagggataatcacttatgtgcactactagcagaagggttgcacatacgtatttgttaactgactcactgagacagaatgccatataggatttcatgtctttaaaagattgaagaccactgtttctcttataaagttgtttccttattcagtttttcagcccctttgcttggtcaagtagatcaacaaaagggaaactggctttcctgcattgtgtcagcattctcatattgcaagataagtctggtttgcctggaacagtccagatttaagttcattacaagataattattaataatgccctccatttactctcaagagtgtcccagtttggatggtcaattctatgatcaccataatgagagttttttttaagatgagtctgtggtactcatcagtaacaacgtttcctttctgctccccttctccctggtttaacaaaggctcagcaccaaca

SEQ ID NO: 348955 - DNA, 1461 bp, Homo Sapiens
  misc_feature (140)..(157): n is a, c, g, or t
aatctatcccagatcctttcccagagagaaacttggcgatcacgttttcacatgatgctcacgctcagggcgcttcaattatccctccccacaaagataggtggcgcgtgtttcagggtctctcgtctctctcctacagnnnnnnnnnnnnnnnnnntgtcattagaagaggcgtaacacgtcagtccgtccccaggtttgtgtttcctggagtggccgaaagagatcagttctaacctgctctgcaggaataacggtcctgcctcccgacactcttggcgaggtttttgtacagtttgctccgggagctgtttcttcgcttccacctttttctcccccacacttcgcggcttcttcatgctttttcttctcaccatttctggccaaaactacaaacaagacttcgcagatcgagcctgcgtgctgccgaagcagggcgccgagtccatgcgaactgccatctgatccgctcttatcaatgaagcagccgatcatggcggatggcccccggtgcaagaggcgcaaacaagccaatcccaggaggaaaaacgtggtgaactatgacaatgtagtggacacaggttctgaaacagatgaggaagacaagcttcatattgctgaggatgacggtattgccaaccctctggaccaggagacgagtccagctagtgtgcccaaccatgagtcctccccacacgtgagccaagctctgttgccaagaaaggaagaagaagatgaaataagggaaggtggagtggaacacccctggcacaacaacgagattctacaagcctctgtagatggtccagaagaaatgaaggaagactatgacactatggggccagaagccacgatccagaacgcaattaacaatggtacagtgaaaaatgcaaattgcacatcagattttgaggaatactttgccaaaagaaaactggaggaacgcgatggtcatgcagtcagcatcgaggagtaccttcagcgcagtgacacagccattatttacccagaagcccctgaggagctgtctcgccttggcacgccagaggccaatgggcaagaagaaaatgacctgccacctggaactccagatgcttttgcccaactgctgacctgcccctactgcgaccggggctacaagcgcttgacatcactgaaggagcacatcaagtaccgccacgagaagaatgaagagaacttttcctgccctctctgtagctacacgtttgcctaccgcacccagctcgagcggcatatggtgacacacaagccagggacagatcagcaccaaatgctaacccaaggagcaggtaatcgcaagttcaaatgcacagagtgtggcaaggccttcaaatattaacaccatctgaaagaacacctgcgaattcacagtggtgaaaaaccttacgagtgcccaaactgcaagaaacgtttctcccattctggttcctacagttcgcc

SEQ ID NO: 348956 - DNA, 1033 bp, Homo Sapiens
gggcacagactgtgtttatgactcaaccgttggttggaaaagactttgtttcatgtgtatttgaaagatggaattattttttccttcctgacctaaccttagaactggattagggtgggatctttgaaaagctgacatttgctgctatcagttccaacactaaattcttaagtagttgcccaagggccagctcagtttatccttcggagagacaaggatatgcatgattcttaaccaagctatatgttaaaaaaaattggaaaatgcagtacattttttattatacaaactacagaatgaatatgcaagttttatttatcaaaatgtaatggatttttaaaggctgagaaattttccttatacctaccttttcagttattttaattataccaaattatcaactagaatagcttcatccatatgaaatataaaatgaagagacacctagctctatcaggcttaggattctttgaacttatttccactttaatttctcagtggaagttaagaggggtgagaaaacaaagaaggggaaaaactgacaactaacaaaaccagcaccacatcgctaggtggtgcttactaattaccttctcaggattttcctcagattgaaaagcttatgaggatttcttgggagtcttaataacctgcctgttagtacagagctttcctgatgatatttactcttgagcacatgtggttgtaaaaccttaactttctttctccaggagggtggtgatagaaacagatggtagtatttatgaactgatgttctcgtgaaatgttgagggtggggagaaaagactttaagggaggagagccatctattttgttcctaaagccacctctcagcagaatcgtcatgtttttctgatgcaccgctctgcttcatgcccaagatgacttgcgaggcaatctcaggagctgtggacttaaccattgcaaagcacactgtctttctcagcgttctctgcaagtcagtaggtgttagtatggttgcaaaagtcactgtctcagcaaagttgaactg

SEQ ID NO: 348957 - DNA, 653 bp, Homo Sapiens
ataatcagggaaatgcaaaataagaaaaggttctttttcgcccaacagataaaaactatcaagtgtaggtatggttatatggggaaatgaacattctccatacacttggtgaaaatacagttatgaaggcctttgggaagactgaaggtggacagagaacaaaccctttgatccaaaaatccaccttactggactccagactaaagaaatattcacacacatgcacaaagacatctgaataggatgtttactttggcaatgtaatagcgagaggaaaaaaaattaagggaataaataatggcattttcatagtatttaatcatattcaaccattaaagaaatttaaagacctgttatctttttttgagaccaaaattttaaaaagctacagaatatgagatcctatttatgtaaaaagtgtttttatgtgtatgtatattcgtacggaaaggtgactagaggatgtatgttaaactgtggtaagtggaatgtgattggtagcattggagaaaagggtctctctattcaaagaactgtgttttttatacaatgagaaggtagtcattagactttcataattaaaaaaaggaaaatgggcaaaagcaattcataataggaaatgcaaatggccaagaaacatgaaaagatgttcc

SEQ ID NO: 348958 - DNA, 516 bp, Homo Sapiens
catatgtttccagggatccagagacatacttttcttcaaagaagatcttttcctttcttttttcttctttttggtttggtacccaaagtttaaaacagaagtaaggaactaggaactgtattaagacctccttttgaaggacatgtaagatttgtactttgaagatggtaaatgttaaatctatgatgtgacagtaacctctagctgcaaatacaagtttcttctcttaacatttgactcacaaagggagatggatcgtagcaaatatccaagtaatgggtaaggccctcagagctgggttttggctttaacacgctatctatacaattgaccacattctcgaacctctttacaagggggaaaaaagtaatccaatcctttgattgttaaatttaattagaatagatatgtacatataatactgtccaggtcaactggattttatagtgatatataaacaaacattcttcattcacgttgattaaaaaaaaatcaatgatccatttacctgtggaa

SEQ ID NO: 348959 - DNA, 2945 bp, Homo Sapiens
ggcggcccgcgcccctgctaggctgcggcggcatggcccgcgcgcccggcgcgacctctgcggattgcatcggtgtgtggcggcggggcatgcccagagcaccgggcacggccttcaatgggcgaggacacggacacgcggaaaattaaccacagcttcctgcgggaccacagctatgtgactgaagctgacatcatctctaccgttgagttcaaccacacgggagagctgctggccacaggtgacaagggcggccgggtcgtcatcttccagcgggaaccagagagtaaaaatgcgccccacagccagggcgaatacgacgtgtacagcactttccagagccacgagccggagtttgactatctcaagagcctggagatagaggagaagatcaacaagatcaagtggctcccacagcagaacgccgcccactcactcctgtccaccaacgataaaactatcaaattatggaagattaccgaacgagataaaaggcccgaaggatacaacctgaaggatgaagaggggaaacttaaggacctgtccacggtgacgtcactgcaggtgccagtgctgaagcccatggatctgatggtggaggtgagccctcggaggatctttgccaatggccacacctaccacatcaactccatctccgtcaacagtgactgcgagacctacatgtcggcggatgacctgcgcatcaacctctggcacctggccatcaccgacaggagcttcaacatcgtggacatcaagccggccaacatggaggaccttacggaggtgatcacagcatctgagttccatccgcaccactgcaacctcttcgtctacagcagcagcaagggctccctgcggctctgcgacatgcgggcagctgccctgtgtgacaagcattccaagctctttgaagagcctgaggaccccagtaaccgctcattcttctcggaaatcatctcctccgtgtccgacgtgaagttcagccacagcggccgctacatgctcacccgggactaccttacagtcaaggtctgggacctgaacatggaggcaagacccatagagacctaccaggtccatgactaccttcggagcaagctctgttccctgtacgagaacgactgcattttcgacaagtttgaatgtgcctggaacgggagcgacagcgtcatcatgaccggggcctacaacaacttcttccgcatgttcgatcggaacaccaagcgggacgtgaccctggaggcctcgagggaaagcagcaagccccgggctgtgctcaagccacggcgcgtgtgcgtggggggcaagcgccggcgtgatgacatcagtgtggacagcttggacttcaccaagaagatcctgcacacggcctggcacccggctgagaacatcattgccattgccgccaccaacaacctgtacatcttccaggacaaggtaaactctgacatgcactaggtatgtgcagatcccggcccctgccacccagcctcatgcaagtcatccccgacatgaccttcacgaccgcaatgcaaggaggggaagaaagtcacagcactgatgaggacagctgcagaggtggcagtgtgtggacacaggaagtttgggccccctccctgccccagctttcctaggccagaattgtgtttggcagtaattgtctgtttaagagagatagataacaagaggcagaggacagcgttcaccgtcgcgacactcataaaatggacatgactgtggagtcttacagttcagggttctttcattcacgtcccttcctgtctcggtctgcggtcttgaccacatcaataggactttttatgcgtccgggttaatttttcactccagtgtgtcctgttgcagggaccggagctgatgggagctgcttctcccccatgcctcactggtcccagatcagggctccagggacagatgatgagtctcaaacgagccagccaggggttcttttggttataaatggggcaattcgccctgtctcagagctgatgacctcaccgttgttttttggatggtgaattcatgctgagaatttgcagatgcaagctcctctcctaggtcttctgaatgtcttgaaacatcccaggtcccaggtctggtgcggtttcccgagaggagcggagtggggtttgtcttctgtgtgcctgtgtcctcatctgattcacctgccatttgctgagcctctgctgtgtaccaggcgtggtgctcagccctagaggcagttgacttaccccctgcagccctccctgccgcctcacccttcagcattcactgggcaccttcccggagcggacactgactcccatgcacgattttttggaatcttcctcctgactgtgaggtgggtgttcattcatttcctccataaacaccaacttctcgaagcgtgccaggctctgggctggatgctggggataagcgggaacccttaggatcccctctgtccacgagaagaagctgaggctctgagcggatgcacaggtcacccatggcaggtgccgtgcagtggtgtcaggaacccgtccgggtcttcacacaaggttctctccagtccatctcgtgggcggctcatgttagagcgacattcaaatggaaggtttggaaaggaatgcctctgtcttgtgaagtaggacaagggtccgggagaactgagacgcaggatggaagacagagaagaccccccggagctcctcgctctgcttggtggcttcaggagtgcggccctccccaggactccacttcatcctgggcttgcaccctccttgagccaatgcactgaactgcctttgaaaggaaattgcatgttctgaccattttagggatacctttactttaaggaccacacagtcccagaggacacatccctcgggaactctgccctctgacaatgagggccacagagaaaggtggtgtttccatgggta

SEQ ID NO: 348960 - DNA, 543 bp, Homo Sapiens
  misc_feature (28)..(28): n is a, c, g, or t
cacccagaacaggaacacctacccaggnaaacaccaccttctctgtggccctcaatgtcaagaggggcaagagttcccgagggatgtgccctctgggactgtgtggtccttaaaagtaaaggtatcctaaaatggtcagaacatgcaatttcctttcaaaggcagttcaagtgcattggctcaaggagggtgcaagccccaggatgaagtggagtcctggggagggccgcactcctgaagccaccaacaagagcgaggagctccggggggtcttctctgtcttccatcctgcgtctcagttctcccggacccttgtcctacttcacaagacagaggcattcctttccaaaccttccatttgaatgtcgctctaacatgagccgcccacgagatggactggagagaaccttgtgtgaagacccggacgggttcctgacaccactgcacgcacctgccatgggtgacttgtgcatccgctcagagcctcagcttcttctcgtggacagagggatcctaatggctcccggagggttaagccccacg

SEQ ID NO: 348961 - DNA, 713 bp, Homo Sapiens
  misc_feature (699)..(699): n is a, c, g, or t
ttgacggagatggagttgatgtggtaggtgtggccattggcaaagatcctccgagggctcacctccaccatcagatccatgggcttcagcactggcacctgcagtgacgtcaccgtggacaggtccttaagtttcccctcttcatccttcaggttgtatccttcgggccttttatctcgttcggtaatcttccataatttgatagttttatcgttggtggacaggagtgagtgggcggcgttctgctgtgggagccacttgatcttgttgatcttctcctctatctccaggctcttgagatagtcaaactccggctcgtggctctggaaagtgctgtacacgtcgtattcgccctggctgtggggcgaaatttttactctctggttcccgctggaagatgacgacccggccgcccttgtcacctgtggccagcagctctcccgtgtggttgaactcaacggtagagatgatgtcagcggaaacttccatcagctgaggtggcctcaacgtgtccgcctcacgcatcctgagagaggtgactaacacaggtcatttcaaaaaaggtcttctttctattttacttctgctgtgtgctgtctggaggccggtgtggcagcccaagcctgcagccgcaggcccttctccctgcttctgggtgatgagaagtgaaccccaacggcgagggccctttgccgcagnctctgcaccaccgc

SEQ ID NO: 348962 - DNA, 748 bp, Homo Sapiens
gtgaagcctgctctaaatagataaaataagaaattactacagagggctctttagaaattgtatttaaaaacaagacaatccatatttacctaagatttacagaatgtatgtctataaaaggagggatttctggactagatgatgatgaaaaatgttcatataaaggcacctccagcttcgagttgccaacacaggaggaagaatgctccctgctgttcagatgctgatatgtgtcctgtgcttcctggatggccagtgggatcataagctggtagaagcaagaccttcatccactgacttcatatttcttccacatcctgaactgtggtgtttgactttaaaaataaattaaagcaaatagaaatgtttccattgagattttggcaaaaacccacatgacatttgcgtctgcagagtagacttggaaggcatgcacctggaggccaagtggtattctctggactctctgtccttgcatttgcgtggctgccccgaggactcgcttcttcctggatgtgaagcagaggcacgatggggctgactgagaggctgaaatgtgcttctcttcacagttacatagttttcttctaattaaaaataaattttaagtggtagattatgaaaattccatttgaatcaagattttaaaaattcaatatcaaaccagttgttactgtcttcactctccgttgtttacgattgtgtgcttttcctgaataaagaatgactggagagacattaaaaaaaa

SEQ ID NO: 348963 - DNA, 736 bp, Homo Sapiens
agcttgatctgaggaatgctgattttgagattttcaaagtagtatcgaattggtgttccaccttgctcagctgtctttgcatggaggtttcatcatatttttccacctctgattctgcttgatcgtagccaaagaaacttagcagcttgaggagcagtttctcctcaatttgcactgtgaatctctgagctgtgatcatcagatgcttgtagatgttggtcagtgcactcttactggggaacttcactgcgttgacttgcacagctgggccggtctcgatgacctcattctcattgctcaggggagtcacatagagcatgaagggctgcgtggtaccaatgagctgattgtccacctgtacatcctgtatgctgagttcaagcatgtgactggttgccagctgtgtatagtgcacattgattcctgtaagacttgcaaagaccagttcttctgggactttattaattaaggacaacccaattccaccttctaacctcacaagcacttccaattcctgctctgtatctggattctttaatttctgcagctcttgttcggtgacaggaagttcatccacttcatatgaacggctgcttttccggtggcagaaatctgttatctggagtgctctagttggtccatctgggatgactctgatggataacattccagaaccaggtctcattttttgattaataaattgttgttcaggtgaactgtgagtacggatcctcta

SEQ ID NO: 348964 - DNA, 796 bp, Homo Sapiens
  misc_feature (136)..(467): n is a, c, g, or t
tggaactgaagttgccacagccttttaattacagattaactgcctaacagctgtcttaatatctggcccttttcatcaggatggtgctgtggtttgggctggaaattgtttagagcctgagagacacgacaactgnnnnnnnnnnnnnnnnnnnnnnnnnnnnnnnnnnnnnnnnnnnnnnnnnnnnnnnnnnnnnnnnnnnnnnnnnnnnnnnnnnnnnnnnnnnnnnnnnnnnnnnnnnnnnnnnnnnnnnnnnnnnnnnnnnnnnnnnnnnnnnnnnnnnnnnnnnnnnnnnnnnnnnnnnnnnnnnnnnnnnnnnnnnnnnnnnnnnnnnnnnnnnnnnnnnnnnnnnnnnnnnnnnnnnnnnnnnnnnnnnnnnnnnnnnnnnnnnnnnnnnnnnnnnnnnnnnnnnnnnnnnnnnnnnnnnnnnnnnnnnnnnnnnnnnnnnnnnnnnnnnnnnnnnnnnntgttatagaaagaattcagagtctcgttttcacagtacctatctacttttcctttggccaatatagaatagggcctatggtataattcaaatagattacatccgtcgattgtgtcctgataatactcagtgaaagagtccatccttatcttaatatgtatgaaatttaaaaatagccatctttgtacttttttgcaagtttctctataagcttgaaaatagtcatgtgatacttcgacaaacatcatatgccttgcagtttttctcggtcgtgttctcagggttgagtagtccccttagctacctaactttactttcaatacaaagcac

SEQ ID NO: 348965 - DNA, 694 bp, Homo Sapiens
  misc_feature (245)..(282): n is a, c, g, or t
  misc_feature (478)..(523): n is a, c, g, or t
tttgaaaggctctttatagcggcgaatggaattcatggtcggatgaggtcctactctaggggagggaggagggagcagaggtggacagggtgcagtataggatttacactgtttgaagcatctaacgaagggcaacagtttttggcaacccaattcacagttttgtaatttacaagagatttctttgaaaggaaataggaaggcaaagaaagcacacataccctaccggcaacacttcttgcctnnnnnnnnnnnnnnnnnnnnnnnnnnnnnnnnnnnnnnccaacaactattcccttgcttttgctttcttgtgtagatgactaaaattttgctctcatgctcaaattaagactggatcacggatagggaagatctgccctaacattgaagatttacttcctcctcttcagagctgacatttgtactgcgcactactcttatctttatcagcctaggtgtcagaaggggcttagtnnnnnnnnnnnnnnnnnnnnnnnnnnnnnnnnnnnnnnnnnnnnnnggcagtttacaaagaacagactgtcagctttctgtctggtatcaaacaacttgaatacagctctaagtaaattaaaacatttatttttatgtggcctggcatctactgtcatttcatcctggaatagattgtcatcttgatagcccacaaaattttcatgatgatatgaga

SEQ ID NO: 348966 - DNA, 2006 bp, Homo Sapiens
  misc_feature (174)..(174): n is a, c, g, or t
  misc_feature (209)..(209): n is a, c, g, or t
  misc_feature (253)..(253): n is a, c, g, or t
tatttgtaaagggacacgaaggtaggaatcttttaatcgtgggttagcttggttaacagggaacgttttaataatcaagatactcagacaactcacagaaacaacttctgtaataactggaaatactgctgttatcgtttagccaacaattacttactggggacatcctttgtnatgctaacatggaattattcctggacccttctgcntccctggttttagttaacctaggatgcggaatgcctcctttacnacactagattaaacctagcatctggggtgggtacgtttaaacagtcacacatgtgcctgttaggttgtgaaagttttgaattaaaaacaagcagtagcagcagaggccacagaacttatgggagtcttgtatatcttccaggcatgtcggtgtaaacctgattgtctcgacattttctgtttaattgattggtgctgtgaggagttcggctgctcgtgataaaacagcgtactccagttttaagtcatcgggtaaaataataggacagtgatttccatctgtgcttcagtacccactttgtgttcttttcttgaaaagtcatactaaaggttaatttcaagtaaaatgaatttccttccaagtagcctattagtaaaacacaacttagtgtttcatccattggggtgagcatatactgccctttgcagccctgcctgtgttctgattggctccattcatgagcaaaggtgattgtgagctgtatattacacaggtgtcgcccaggtttcgtaacctccactttaatgcagtaagccgcaagaatgacttctgcaagtgaaatgaggaagcttcactagcttgctccattggaaggtaaactgaaattttatacgttgaagcttaaaatctaaatttatgtatgtttggaaatggaatggacattaacataaaatgtattttatcaaaaaggtgtttagactttgaccaaatacatgttggtattatcatgttaatgttctctgtttataaaaattgagtggagatagatagactcggccattctgtgggctgatgagaattctgggctttgttttgcaccaggggtaggaaacagagaacatgtctgtatgttacttaatctccatagcaaaatcccaaacagcattagcagatcgaattgtttcttctaagacttcctttttctgaatgtgtgcacatcccttctcgtgctcacacacttgcccacacactcacttcttcctgcgctgtggctgctctaagcagggctgtgcatggtgcaaagctgcagtcagtgagcctggcagcctgtggtttctgttatggaaatggttccatggtgaaacacatccctgacccttcacagacttacacatttactcaccaggaggtggcagcggtgtgggaggaggagtgttgaccttggacgcaggagagacacctgggttctagttcaagtcggccaaggactgtgtgaccttgacaagtctaactggtctgtgaacaaggggcatttgcccttccagctgtaaacactgcccttctgtgcctgccttatgtgtgtgtgtgagtaaggagcaacagtcaaggaaacttttagggattcgagaagaaaatacatgtgggatcttgccaaggtgctgcctttaggatgctgacccctgcactaccttagaacatgttgatctgtgagtgcccaagcccctgagggctcgatctcatggggcagatgaaattctcttccttagaggaaagggaaaggtgaggccccagaggacttatctcagctgtacatgctctgcctgtggagacatggcttttctttgtgctgtggcagactggggctttggaagtggtgtatgtttaacttacctgagagtgagagatgtgtaggaagaatagctggaagaaagtgaaagatgagtgccagtacttttggcctgttatccagtagagagaaagtgacagtgaaagtaacgtgagagagaaagagtgtgtgtgtatatgtgagaga

SEQ ID NO: 348967 - DNA, 2281 bp, Homo Sapiens
  misc_feature (262)..(297): n is a, c, g, or t
  misc_feature (511)..(511): n is a, c, g, or t
  misc_feature (524)..(524): n is a, c, g, or t
  misc_feature (2160)..(2210): n is a, c, g, or t
ttttttttgagtttgaaaggctctttaatagcaagcgaatggtaattacatggtcggatgaggtcctcactctcaggggagggaggagggagcagaggtggacagggtgcagtataggatttacactgtttgaagcatctaacgaagggcaacagtttttggcaacccaattcacagttttgtaatttacaagagatttctttgaaaggaaataggaaggcaaagaaagcacacataccctaccggcaacacttcttgcctnnnnnnnnnnnnnnnnnnnnnnnnnnnnnnnnnnnncccaacaactattccttgcttttgcttcttgtgtagatgactaaattttgctctcatgctcaaattaagactggatcacggatagtgaagatctgccctagcattgaagatttacttcctcctcttcagagctgacatttgtactgcgcactactcttatctttatctgcctaggtgtcagaaggggcttagtaaaaaatgaaacttgagaaanaaaacaaaacagnaaaacagggaaaggcagtttacaaagaacagactgtcagctttctgtctggtatcaaacaacttgaatacagctctaagtaaattaaaacatttatttttatgtggcctggcatctacttttaatcgcttgtgcctattcagccttatagtgctttaaatggggtttctaacatgaaatgctcatgggtactatattttcgtaatccagatttaaataaaaatataaaagacaacatattatgttaaataatatgttgtcttttatatttgcccagtgagcagaagctatagatattttaccatggacacccattgccatggacaccacaggctaccagcattctggcaggtttcagaattactctctataaaatctaaaagacttcagcttcttgtgtcatacctgttatcactaaactgggagaagtgactgggtctttatgaaaaaggatcagtttttaattcaaagaaattttaggcttctccgaagactgggtgatcagcaatggcatctctttggagctaacacccactgcaggggagaggggtctgtgatcgcttaagcattaattgtgctctttctacaaccttgaagcacagtgaggaggttggccctgccctctggcctgagggggcactcctgcttcctccccgctgccaaggacacccaagtttgctttgtgatttacctgccgggtgcctggagcccctctcagatctgcctgcatttgggaaagacaggcttctcaggctggcagctggttttactgaaggaaagagccctaccagatgagcagggttcctgttggtctccttggctggggggcacttttaaagtggcaaagccatgccaacacaaggcattgcctctcaacatacagtcagttcctttgaggaaagcaggcccccagtgagacagccgtgaaaatgaaaacagttttcctggggctcaggtggtaactgtcagaccccaactctcccattctcccttattcatctcctcccaccccaagttaagtcctgcctattccttcatgcctctctgtaagaaatcagatctgttcataccagtttcccaacttgtgaattttaacatgcaaagcctattcctaaaatataaattccaatgacacttgggaccacagctcccctaggtccatgtacattgtgctcttatgaaacagaaacaatattcagaaatatattgtgctagagacggtttctgtttatacatgaaagatgacagcaactataaaggagagaagttttcgttgaagtacactggaaatctaattctggcaccaggacacaaggaggatccctacataagagacttttccattgcaccatgtgctgctttgggcctgggagacaggagtggacacctgagtgcaggtgaatccacagtggtgacaggcactacacggggcctcacctccctccctggctccgtacttcactctgattccttgacgtctgctcgatatggtgatcaggctgcggaaaccaggcggccataagaacaatgtctctaggattcactcaaacccaggatcacggttttgtaatgttatcaaggcatgattttggatttcagagctggcccagtgaacaacaagcaatcaagcattcctnnnnnnnnnnnnnnnnnnnnnnnnnnnnnnnnnnnnnnnnnnnnnnnnnnngttactttcactgtcactttctctctactggataacaggccaaaagtactggcactcatctttcactttct

SEQ ID NO: 348968 - DNA, 834 bp, Homo Sapiens
  misc_feature (262)..(307): n is a, c, g, or t
  misc_feature (519)..(531): n is a, c, g, or t
gggcaatataaaagacaacatattatttaacataatatgttgtcttttatatttttatttaaatctggattacgaaaatatagtacccatgagcatttcatgttagaaaccccatttaaagcactataaggctgaataggcacaagcgattaaaagtagatgccaggccacataaaaataaatgttttaatttacttagagctgtattcaagttgtttgataccagacagaaagctgacagtctgttctttgtaaactgccnnnnnnnnnnnnnnnnnnnnnnnnnnnnnnnnnnnnnnnnnnnnnnactaagccccttctgacacctaggcagataaagataagagtagtgcgcagtacaaatgtcagctctgaagaggaggaagtaaatcttcaatgctagggcagatcttcactatccgtgatccagtcttaatttgagcatgagagcaaaatttagtcatctacacaagaagcaaaagcaaggaatagttgttgggttttggattaggttgtggnnnnnnnnnnnnnaggcacaaaagtgttgccggtagggtatgtgtgctttcttggccttcctatttcctttcaaagaaatctcttgtaaattacaaaactgtgaattggggttgccaaaactgttgcccttcgttagatgcttcaaacagtgtaaatcctatacttgaccctgtccaccttctgttccctcctcactcacctgagagtgaaggacctcatccgaccatgtaattttaccattcgcttgctattaaaagagcctttcaaagtctaaaaacacacacatacaaaacaccaaaatcaaaactacaatac

SEQ ID NO: 348969 - DNA, 447 bp, Homo Sapiens
  misc_feature (82)..(82): n is a, c, g, or t
  misc_feature (213)..(253): n is a, c, g, or t
aacaaccaatcccctggcttttggccttccttgtgtaagatgaaccaaaattttgcctccccatgcctcaaaattaaagacnggatccacggataagtgaaagatcctgcccctagcattgaaagatttacttccctccctcttcagagctgacatttgtactgcgcactactcttatctttatctgccctaggtgtcagaaggggcttagtnnnnnnnnnnnnnnnnnnnnnnnnnnnnnnnnnnnnnnnnnggaaaggcagtttacaaagaacagactgtcagctttctgtctggtatcaaacaacttgaatacagctctaagtaaattaaaacatttatttttatgtggcctggcatctacttttaatcgcttgtgcctattcagccttatagtgctttaaatggggtttctaacatgaaatgctcatgggtactatattttcg

SEQ ID NO: 348970 - DNA, 546 bp, Homo Sapiens
  misc_feature (62)..(113): n is a, c, g, or t
ccttacattatgttctagtagttaagtttccaaggacagtgatcactagtctaccatagacnnnnnnnnnnnnnnnnnnnnnnnnnnnnnnnnnnnnnnnnnnnnnnnnnnnntataaaaatgactacttgtattgttaattttgtgtattctagtgaattaaatccgcttcggcatcatttactcccttaggtatttgactttgtgtcaaatgttttggcaaggataaaattataacagactttcttgaacaaccaaaatgtaatctattaaggattttccttcacttttgataaaataagaaaaaaggaatttaaaaccttgcatcctaatgtaaaatagaattatatggtgtttaatatcagtgtccctttagctattatattaaactactatagttaataaattttatcattattttgtatgttggtttttaacaatttcataaagctataaaaagatacttgggtcagataaagtttcctctgcttttaattttaataaagtattattatgtatatgatttctttttacctattatatata

SEQ ID NO: 348971 - DNA, 580 bp, Homo Sapiens
gttgctaaactgtcttcaccctcagggaataagagaaagtcaacttaaagagagactagagaagaggtaccaggacattattcactctattcatctagcacggaagccaaatttgggtctaaaatcttgtgatggcaaccaggagcttttaaacttccttcgtagtgatctcattgaagttgcaacaaggttacaaaaaggaggacttggatatgtggaagaaacatcagaatttgaagcccgggtcatttcattagagaaattgaaggattttggtgagtgtgtgattgcccttcaggccagtgtcataaagaaatttctccaaggcttcatggctcccaagcaaaagagaagaaaactccaaagtgaagattcagcaaaaactgaggaagtggatgaagagaagaaaatggtagaggaagcaaagcttgcatctgcactggagaaatggaagacagcaatccgggaagctcagactttctccaggatgcacgtgctgcttgggatgcttgatgcctgtatcaagtgggatatgtccgcagaaaatgctaggtgcaaagtttgtcgaaagaaaggtgat

SEQ ID NO: 348972 - DNA, 564 bp, Homo Sapiens
cggtttgcagggctgaaatttccaatcccaggccactgaactcgagactgggctcccaaaccaatgctctgggctattttcttagatcaactatttgcaatgatgctttccaaaactttgttacaggttaatcaaaacacaaaatgctgaaaaaactgagtcccttattgtcatcaggacatcacttaaagcaagcttgtccaacctgccttattttgttgttgttctgttttgttttgttttaggctttcagcagcctgaagccatggtttttagtttctgtctctagtgataagcagaaaagagggatgaggaaggggctttactggcccatccagaaacagaaactaagaacccatgactgtattctctcccttgaacaactgtaactagagcaaacctctttgccaatttaactggcatactaaaataatgaaattgtgagaatttcctttgagattagtaactgtaccatccatatacaaaacactatattgctttgctgaaacctgaaagtgagcaaactgatagaaatgcatataacaggccgggcgtagtggctca

SEQ ID NO: 348973 - DNA, 804 bp, Homo Sapiens
  misc_feature (83)..(83): n is a, c, g, or t
  misc_feature (507)..(515): n is a, c, g, or t
ggttccttccctgcatcaagtatgggaatactgcaagaggctgggtcatagaggtgggcaaagacggtcggctaacacaaaantgggccttgtcttaactctactctccaactgggaggaaaccccaagggggcgccgcaccccttgggcagaggagctgggcttgtgtgaaggagtggggcagacagtctgcctggccacgtcaccccaggccaggccccttagggcggggggtgatcctagagagcaggctgggggcctgccccctctggtttgatctccaatcctgcctgaggtctcaggaccccgtgcttcggctgcccctgggccccttgcccactgccccactgaggaggcagcagggaggggcggactcagaggaggggaggggagcaagaacaacagcagaagaatctcgtctgtacagtacgggccgtttgagtcattattattacaatatactttgacaaaaatagaatctcatttcatatcaatacaacaacaacnnnnnnnnncagtttcctggactgttacaccgctaacgttttccaaaggtcgctatttacaattacagtagccaagagggaaggtgggatgcagcctggaggtggtgggacaaggaggtagccagagacaataggggcgccaagagccaaggaggtggggtcaggagcagaaggagctaaccaggagaagctagggagaggggccaaggaggaatgagggaggtgggaccttctacggacccactccgtaggccctcccaccccacagaccatcccagtgttgactcccccaggtagt

SEQ ID NO: 348974 - DNA, 1149 bp, Homo Sapiens
  misc_feature (17)..(17): n is a, c, g, or t
  misc_feature (21)..(22): n is a, c, g, or t
  misc_feature (29)..(29): n is a, c, g, or t
  misc_feature (35)..(35): n is a, c, g, or t
  misc_feature (39)..(39): n is a, c, g, or t
  misc_feature (41)..(41): n is a, c, g, or t
  misc_feature (44)..(44): n is a, c, g, or t
  misc_feature (47)..(47): n is a, c, g, or t
  misc_feature (51)..(51): n is a, c, g, or t
  misc_feature (53)..(53): n is a, c, g, or t
  misc_feature (56)..(56): n is a, c, g, or t
  misc_feature (74)..(75): n is a, c, g, or t
  misc_feature (86)..(86): n is a, c, g, or t
  misc_feature (94)..(94): n is a, c, g, or t
  misc_feature (96)..(96): n is a, c, g, or t
  misc_feature (102)..(104): n is a, c, g, or t
  misc_feature (112)..(112): n is a, c, g, or t
  misc_feature (115)..(116): n is a, c, g, or t
  misc_feature (119)..(119): n is a, c, g, or t
  misc_feature (129)..(129): n is a, c, g, or t
  misc_feature (139)..(139): n is a, c, g, or t
  misc_feature (145)..(145): n is a, c, g, or t
  misc_feature (149)..(149): n is a, c, g, or t
  misc_feature (151)..(151): n is a, c, g, or t
  misc_feature (153)..(153): n is a, c, g, or t
  misc_feature (1111)..(1112): n is a, c, g, or t
taggatggagggggggntttnngcggagnaaaaanaggngnagnagntggnanagntgaaagttggttggaggnngaggtttgtgnaaaggctnantgaggnnncgcaacanggnnagnaggtcgggtncgcctccttncagcantgtntntnggcagcagccagcagccccaccaggagtgccagggcctggtcaaagccatacccgtgccccaggaatgcctggcatagggcagacacggtgccaccagcaatgaggtgccgaggccctctgggtgtgcctgctacagccgtcaggcactggtaggtgtcatcaatcatggagcggcgggcagcatcgtccgggtccccccgggctgtgaggaaggtgctaagaatgggaatcttgttcaggacttggggatgggcggccagttcagggtcactgcagaagcaggccagcagggccacacccaaagcccgcagaacatggtcagggcagccatccggcgcctccttggtggtcaggagacgattggggaaggtgaagccgacagcatcgaagatccgccgccgagttttggcatctatgtcacctgctttgactgccttggtcactagcagcagggctgcaaactgctcgctgtcattcttggcctcacggagggctcccaggtagcgctccagggtggggtttcggccctctgcctggttcagagctggctcgcaatccgaggccatgatgctcgccttgcccaacaggctgcggccccgagcggcgaagtcttctcccagcgcgatgctccgggagcctcgggccgctgctcacaccgcgttgcccactcctggctccaggctgctgcagctccacccccacccccgcaccgctcttgacgaatccgcggctgcttcactccgggctctggccaatggcaagtcagggtgctaagcagtagggggtgccgccgttgccgccatcttgcttgtgggtattgcccgagtctgggggctggggctcgagcgaaggaggcaaggtgcagactgcctctggagagcgggcggcgagaggctgggggcccagattccttcgcttgtgcgtagttttacccgcccagcactgcccctcctcccnnttggtctcgcggccggcattgcccttcccgggggagg

SEQ ID NO: 348975 - DNA, 939 bp, Homo Sapiens
agcggagcagcggcccgaggctcccggagcatcgcgctgggagaagacttcgccgctcggggccgcagcctggtgagctcagcccccttcgggccctcccctgcatcccagccggggcctctccgagccggcgctgatcgatgccgacacaccccggggaccctatcgcgactccatcgcgccatatcgcgacaccatcgtgccctgtcgagactccattttgtcacagcccttttcaatatatatcttgtttattattaatttgccctgtcatctttgggggctgtctcccatgtcgtgattttgacgtgatctctccgtgacatcaccgcgccatcgtgaagtgtgatctcatcgccgccctgtcgtgacttcatcaatgtcgtgttgtgacctggctgcggcgggacagttgggcaaggcgagcatcatggcctcggattgcgagccagctctgaaccaggcagagggccgaaaccccaccctggagcgctacctgggagccctccgtgaggccaagaatgacagcgagcagtttgcagccctgctgctagtgaccaaggcagtcaaagcaggtgacatagatgccaaaactcggcggcggatcttcgatgctgtcggcttcaccttccccaatcgtctcctgaccaccaaggaggcgccggatggctgccctgaccatgttctgcgggctttgggtgtggccctgctggcctgcttctgcagtgaccctgaactggccgcccatccccaagtcctgaacaagattcccattcttagccaccttcctcacagcccgggggggaccggcacgatgctgcccgccgctccatgattgatgacacctaccagtgcctggacggctgtagcaggcacacccagagggcctcggcacttcattgctggtggcaccgtgtctgccctatgcaaggcatacct

SEQ ID NO: 348976 - DNA, 855 bp, Homo Sapiens
agcggggctaccggagcatcgcgctgggagaagacttcgccgctcggggccgcagcctgtgtgatctcatcgccgccctgtcgtgacttcatcaatgtcgtgttgtgacctggctgcggcgggacagttgtggcaagagcgagcattcatggcctcaggattgcgagccagctctgaaccaggcagagggccgaaaccccagccctggagcgctacctgggagccctccgtgaggccaagaatgacagcgagcagtttgcagccctgctgctagtgaccaaggacagtcaaagcacggtgacatagatgccaaaactcggcggcggatcttcgatgctgtcggcttcaccttccccaatcgtctcctgaacaccaaggaggcgccggatggctgccctgaccatgttctgcgggctttgggtgtggccctgctggccatgcttctgcagtgaccctgaacttggccgaccataccccaagtcctgaacaagattcccattcttagcaccttcctcacagcccggggggacccggacgatgctgcacgacgctccatgattgatgacacctaccagtgcctgacggctgtagcaggcacacccagagggcctcggaacctcattgctggtggcaccgtgtctgccctataccaggacatacctggggcacggctatggctttgaccaggccctggactcctggtgagggctggtggctgtgccgagacacagtgctgcaaggaggcggagaccgacctgtggacgtgttaaggggactcagtgaggattaccaaaggtgagatgcataaagttgagctctgccagagtgccctatttgacccaaaaacgtaacctg

SEQ ID NO: 348977 - DNA, 4051 bp, Homo Sapiens
  misc_feature (51)..(87): n is a, c, g, or t
tgacactgtcatcactataggggaattggagctctaccgcggtggcggcgnnnnnnnnnnnnnnnnnnnnnnnnnnnnnnnnnnnnnatcaggccaaatcggccgagctcgaattcgtcgagagcgggcagagctgcagccgccgagccggacgtgtccgcgaagatggcgggccggagcatgcaagcggcaagatgtcctacagatgaattatctttaaccaattgtgcagttgtgaatgaaaaggatttccagtctggccagcatgtgattgtgaggacctctcccaatcacaggtacacatttacactgaagacacatccatcggtggttccagggagcattgcattcagtttacctcagagaaaatgggctgggctttctattgggcaagaaatagaagtctccttatatacatttgacaaagccaaacagtgtattggcacaatgaccatcgagattgatttcctgcagaaaaaaagcattgactccaacccttatgacaccgacaagatggcagcagaatttattcagcaattcaacaaccaggccttctcagtgggacaacagcttgtctttagcttcaatgaaaagctttttggcttactggtgaaggacattgaagccatggatcctagcatcctgaagggagagcctgcgacagggaaaaggcagaagattgaagtaggactggttgttggaaacagtcaagttgcatttgaaaaagcagaaaattcgtcacttaatcttattggcaaagctaaaaccaaggaaaatcgccaatcaattatcaatcctgactggaactttgaaaaaatgggaataggaggtctagacaaggaattttcagatattttccgacgagcatttgcttcccgagtatttcctccagagattgtggagcagatgggttgtaaacatgttaaaggcatcctgttatatggacccccaggttgtggtaagactctcttggctcgacagattggcaagatgttgaatgcaagagagcccaaagtggtcaatgggccagaaatccttaacaaatatgtgggagaatcagaggctaacattcgcaaactttttgctgatgctgaagaggagcaaaggaggcttggtgctaacagtggtttgcacatcatcatctttgatgaaattgattgccatctgcaatgcagagagggagcatggctggtagcacgggagttcatgacactgttgtcaaccagttgcggtccataaattgatggcatggagcagctaaacaacatcctaggtcattggaatgaccaagtagaccatatcgtggtagatgaggctcttcttagacctggaagactggaagttaaaatggagataggcgttgccagatgagaaaggccgactacagattcttcacatccacacagcaagaatgagagggcatcagttactctctgctgatgtagacattaaagaactggccgtggagaccaagaatttcagtggtgctcaattggagggtctggtgcgagcagcccagtccactgctatgaatagacacataaaggccagtactaaagtggaagtggacatggagaaagcagaaagcctgcaagtgacgagaggagacttccttgcttctttggagaatgatatcaaaccagcctttggcacaaaccaagaagattatgcaagttacattatgaacggtatcatcaaatggggtgacccagttactcgagttctagatgatggggagctgctggtgcagcagactaagaacagtgaccgcacaccattggtcagcgtgcttctggaaggccctcctcacagtgggaagactgctttagctgcaaaaattgcagaggaatccaacttcccgttcatcaagatctgttctcctgataaaatgattggcttttctgaaacagccaaatgtcaggccatgaagaagatctttgatgatgcgtacaaatcccagctcagttgtgtggttgtggatgacattgagagattgcttgattacgtccctattggccctcgattttcaaatcttgtattacaggctcttctcgttttactgaaaaaggcacctcctcagggccgcaagcttcttatcattgggaccactagccgcaaagatgtccttcaggagatggaaatgcttaacgctttcagcaccaccatccacgtgcccaacattgccacaggagagcagctgttggaagctttggagcttttgggcaacttcaaggataaggaacgcaccacaattgcacagcaagtcaaagggaagaaggtctggataggaatcaagaagttactaatgctgatcgagatgtccctacagatggatcctgaataccgtgtgagaaaattctggcccctcttaagagaagaaggagctagcccccttgattttgattgaaaatgaactatttgaaacacacagtgaccaagggaagtgaccaaggtgaagatggcctaggatcttcactgtcttactcaagatactggactaagtggaacgttctctaccttcaacatgtgctcgctctgcatgattagtgcaataaaactcccttccttatgcatactgagatagcttagtgtctcgtggaaggtgtcaatttggtttagaatgctgcgcttaccttcccatgcaggctaaagtgattccttcttgctcagtccctctgggtgggaaccatccagtacttgtggacactacacgtttcaacctctctactagcaccatcacccttgaaaactctcagtcagtgtcatgaatgttgcatgacaacagttggccgattagaaggcagactttctacatgcaaatctggcttagtaaatcgaggtgtgggccagagatcctctgacagctgtcctgagctaacactaaaagtcactgggtatttggttaaaggtctcccacaagactggtattctctttgcctgaagaaacaaggcattgaatctctaaaatgctgttctcaatcattgtcagagatgttttcaagttgcagtcagaagatctttcttaatagaaagtcagatgactaccgtgttggttgtgacttccccttaagtataactaatttgctctgtggtaagagatatgctcattattaccacttagaagatgttgttaaaaacatgtgaaagataggtatggaaaaagcatacacccccaaacagaaaggagttattaaagtaatttacaaacctctcagcactaattagtgtccaactccaagtgggtcaattccttagtataatattaaggcttactagtatcactgctttttccttagcttaatgacttacttagaatttatcctttattttaaatgatctgtactatctagtgtctaaaacactattctccagaaaaatcaatcattttctagccctctccctcagtcctttattgtccattccaatacattgaacacatttcctttaccctccacacacttcttccaaaaggaagcacccgttgagtccttttgagggtgatttgtcttacaactgactgacttagcaggaatttaattaggtcatatttggtgatgagacttatggagtgtgcctctctctcccaactgctgcttaaaatgcaaggacaagcaattagaagccatcctaaggtgcttacctcacacgccacccatgaggcttgtggccacagtggcacttgggtgtggctcctctgttatttgtcctcatgtgagaaagcagatcatctccaaatcttgccatttgtatacttttggtggagacttggatgtcatatcttctttgttttgggttttcttccctagcttattttgtggcttttaaagaagtggattgtattgtgagatcctgtgattcctggtggccagtatcctggattcctctaagatcttgcctctttcctcctcatgaaagcagcacacattgtgttaacttatgtctcttgttaaatgagcttaatgtctttgtgttttgtccaaaactgtattgaaaaaatattgtttaatgcaaatgaaggaatgcaataaagagtaaatatacttgaaaaaaa

SEQ ID NO: 348978 - DNA, 483 bp, Homo Sapiens
  misc_feature (13)..(13): n is a, c, g, or t
  misc_feature (29)..(29): n is a, c, g, or t
  misc_feature (285)..(285): n is a, c, g, or t
ctgccttaaaaangcaaggacaaagcaantagaaagcccaaccctaaggtgccttaccctcaaaacgcccaccccagaaggcttgtgggcccacagtggcacttgggtgtggctccctctgttaatttgtccctcatgtgaagaaagcagatcatctcccaaatcttgcccaattgtaaacttttggtggagacttggatgtcatatcttctttgttttgggttttcttccctagcttattttgtggcttttaaagaagtggattgtattgtgagatcctgtgantccctggtggcccagtatcctggattcctctaagatcttgcctctttcctcctcatgaaagcagcacacattgtgttaacttatgtctcttgttaaatgagcttaatgtctttgtgttttgtccaaaactgtattgaaaaaatattgtttaatgcaaatgaaggaatgcaataaagagtaaatatacttgaaaaaaaa

SEQ ID NO: 348979 - DNA, 621 bp, Homo Sapiens
ctttaagtttctggggaaaaatgaagatggcaaaggaagatgtccctttgacccagcacacagctacacatccgtcatggttgatggagaactttattcggggacgtcgtataatttttttgggaagtgaacccatcatctcccgaaattcttcccacagtcctctgaggacagaatatgcaatcccttggccgaacgagcctagtttcgtgtttgctgacgtgatccgaaaaagcccagacagccccgacggcgaggatgacagggtctacttcttcttcacggaggtgtctgtggagtatgagtttgtgttcagggtgctgatcccacggatagcaagagtgtgcaagggggaccagggcggcctgaggaccttgcagaagaaatggacctccttcctgaaagcccgactcatctgctcccggccagacagcggcttggtcttcaatgtgctgcgggatgtcttcgtgctcaggtccccgggcactgaaggtgcctgtgttctatgcactcttcaccccacagctgaacaacgtggggctgtcggcagtgtgcgcctacacctggtccacagccgaggaggtcttctcccacgggaagtacattgcagagcaccacagt

SEQ ID NO: 348980 - DNA, 391 bp, Homo Sapiens
aagaagccttgaagaaatgtgctcaggattacttagccagagttaaacaagaggagcagcgataccaggccctgaaaatccacgcagaagagaaactggacaaagccaatgaagagattgctcaggttcgaacaaaagcaaaggctgagagtgcagctctccatgctggactccgcaaagagcagatgaaggtggagtccctggaaagggccctgcagcagaagaaccaagaaattgaagaactgacaaaaatctgtgatgagctgattgcaaagctgggaaagactgactgagacactccccctgttagctcaacagatctgcatttggctgcttctcttgtgaccacaattatcttgccttatccaggaataattgcccctttgcagag

SEQ ID NO: 348981 - DNA, 1578 bp, Homo Sapiens
  misc_feature (380)..(388): n is a, c, g, or t
  misc_feature (417)..(473): n is a, c, g, or t
  misc_feature (1071)..(1096): n is a, c, g, or t
ttgagttgtacaacagaacacttgtacaaaatagattttaaggctaacttcttttcactgttgtgctcctttgcaaaatgtatgttacaatagatagtgtcatgttgcaggttcaacgttatttacatgtaaatagacaaaaggaaacatttgccaaaagcggcagatctttactgaaagagagagcagctgttatgcaacatatagaaaaatgtatagatgcttggacagacccggtaatgggtggccattggtaaatgttaggaacacaccaggtcacctgacatcccaagaatgctcacaaacctgcaggcatatcattggcgtatggcactcattaaaaaggatcagagaccattaaaagaggaccatacctattnnnnnnnnntgtggagttggagggctaacatatttaannnnnnnnnnnnnnnnnnnnnnnnnnnnnnnnnnnnnnnnnnnnnnnnnnnnnnnnntgtacattacattttgcttattttcatataaaaggtaagacagagtttgcaaagcatttgtggctttttgtagtttacttaagccaaaatgtgtttttttccccttgatagattcgctaatattttaaacagtcctgtaaaaaaccaaaaaggactttttgtatagaaagcactaccctaagccatgaagaactccatgctttgctaaccaagataactgttttctctttgtagaagttttgtttttgaaatgtgtatttctaattatataaaatattaagaatcttttaaaaaaatctgtgaaattaacatgcttgtgtatagctttctaatatatataatattatggtaatagcagaagttttgttatcttaatagcgggaggggggtatatttgtgcagttgcacatttgagtaactattttctttctgttttcttttactctgcttacattttataagtttaaggtcagctgtcaaaaggataacctgtggggttagaacatatcacattgcaacaccctaaattgtttttaatacattagcaatctattgggtcaactgacatccattgtatatactagtttctttcatgctnnnnnnnnnnnnnnnnnnnnnnnnnnatcaaatgcagggcccctttctgatctcaccatttcaccatgcatcttggaattcagtaagtgcatatcctaacttgcccatattctaaatcatctggttggttttcagcctagaatttgatacgctttttagaaatatgcccagaatagaaaagctatgttggggcacatgtcctgcaaatatggccctagaaacaagtgatatggaatttacttggtgaataagttataaattcccacagaagaaaaatgtgaaagactgggtgctagacaagaaggaagcaggtaaagggatagttgctttgtcatccgtttttaattattttaactgacccttgacaatcttgtcagcaatataggactgttgaacaatcccggtgtgtcaggacccccaaatgtcacttctgcataaagcatgtatgtcatctattttttcttcaataaagagatttaatagccatttcaagaaatcccataaaaaa

SEQ ID NO: 348982 - DNA, 388 bp, Homo Sapiens
ggttttccagccctagaaatttggatacgcctttttagaaaatatgccccagaatagaaaagcctatgttggggcacatgtccctgccaaatatggcccctagaaacaagtgatatggaatttacttggtgaataagttataaattcccacagaagaaaaatgtgaaagactgggtgcctagacaagaaggaagcaggtaaagggatagttgctttgtcatccgtttttaattattttaactgacccttgacaatcttgtcagcaatataggactgttgaacaatcccggtgtgtcaggacccccaaatgtcacttctgcataaagcatgtatgtcatctattttttcttcaataaagagatttaatagccatttcaagaaatcccat

SEQ ID NO: 348983 - DNA, 658 bp, Homo Sapiens
atgactcctagtactgtactggacctgatggaattaaatacacccctttctcagtctccagaaaggatactcctaacccaccctaaaatatgataaaataaatgcccctattctgaactgttaaactgggaaataaaccatgcccacctggaaacaatataagtcataaaagtttatgaatctgtgggagagactacacgaatcagaaagcaattctttggatataagttaggagcttttagaagtatataaactcttttaggcatctagagtagagacacaaagaggatttctccataaataatgatttagccagtgcaatggttggttgcccatggtctgcatctgggatgtcatctgtttttgtaaataaagttttattggaacataactgtgctcatttgtttacataatgtctattgctgcttttgtggtaaaatggcagggttgactagctgtgacagagaccgtatgggctgcaaagcctaaaatatttactctctggcccttccacagaaagtttactgacctcctgatctagttcaccaagtactgctctagttacctaaaagagttaatgcacctccaagaagatttgagcatgtggtgcaagaataacttgcatactgggtttgttcatttagcacccacgcgtccg

SEQ ID NO: 348984 - DNA, 1207 bp, Homo Sapiens
attacctttgtaaagaggaagttaaatagatagtgagatcctttctttataaaacttttaaagtgttattgtgccaattcactaacatgaagttatttagttgcagggtatgtatgtatttttagtatttatgttgaaagaaagaagacttttaactagactttcaaactaggttaattgaagtatcacagtattcttacattttaatgccatagggttttttcccttaagatatccatgttacataccagttaaggacagataatctaatgcaaggtgtaaaaatgtaaaaattagtaatgtttaaagtactaattagcatatagcccatatgtatttgttggatgtgagtgtagcgtttgtaaacttttgaaagtagggctagaactctgctcatccctgtactctgcatagtacctagcacagacgtttgcacatagttaggtgctcaactgatacttataaaatttaattgaatttgacgcaagaatcatattaagtaaatgtttaaagtagcagcctagcaaatttttgggcatggtgtaagcactggtaaaaccagttaattttagagactatcaagttgttaaaaaatattaggacaccatcctttaattgttatcagcatcaataagacagttcagtttacaattttatacgatattgtggttaatttttattgccattatacatattactattcttatgaattgtttgagaagtaatcataatttatttacaaagataatttcttcaggttgtggtataaattattgagatatgtttgtaatttggatagtttgaatgctttaaaatacacttgatagagtttattaactttgtttattgctaaatgtattatgatatataaacaggcaattgaatttagctttttatctgctatgatctgaatgtttatatcccccacaaattcatatgttgaaatcctaaccctgaaggcgatggtcttcggaggtggggcctttgggaagtgattgggtcaagaggcaggcccttgtaaaagaggccccagagagcttgttcaccaattacaccatgtaaggacacataagaaggcaccatctacgaacaagaaggtgggccttcaccagacaccagagaccagaatctactggcatcttcatcttggactccccatcctccagaactgtaagaaataaatttctgtttttattaatgtaagcta

SEQ ID NO: 348985 - DNA, 946 bp, Homo Sapiens
  misc_feature (56)..(56): n is a, c, g, or t
  misc_feature (800)..(812): n is a, c, g, or t
accaccgagccccaatgtgccagacaaaagtgggcatctttgagaaggacgccccnggtgaagacaattaacagtgaacctctttataaggccgtaagctcttcaaggtcatgggcccgtgacttatttatgtctgtattctgttcttagcattgtcttgcacatgacagacactcagtatttctggtaaccacagaactggagctcaatcagctcactgctttcaaagtcattttggttggtgtctacccacttaattctttcactcctctgtctaaggcagggatggcaaatagccttcatttcactctgatggactgggaatagatgtctggaagcaccaatctgacatggattctaagaccaaatcctggcacagaggacaggaatgctgcactcattcataatgcctccttaaaagagcggtggcacaggtgttatgtattccccattcctggtctaggaaaaaggcatccaacacctacttatattccttttacattgctatgctgcctcttgagtgatctgcattaagccactgttcgttaaatgctggttgatcaggaagaccaaggcctttcctctcaatttacgtctttggccaaacaggtagggtcagaacttcacctggaaatctgaaaacacatcatccacaatgctcaataggcaacagtccattgaaagagaacaggtatttacttgattactccctttgtagagaaagaattttgcccatctcaatggtgtgtagctttcattgatatctaaggcatttggaattacttaggatcttggtgttnnnnnnnnnnnnntggcagggttaaattctctttggttctcattctaatcttaagacttctgtttgtttcttcctggtacccataaccttctcagcacttcgtcgttgtgacttaaccaatactgttgaaataatcaactctttcac

SEQ ID NO: 348986 - DNA, 1207 bp, Homo Sapiens
accaggggaccaggtgctgatgaaagctctcgttgagcagggtgaggatggcgaactttccaggacagtctcccggagagtccgccctgaacctcagcaggactggtcatccagggccccccacagcaggattgagtgcaccagcttgttctcagccttggctcggtcgaaggcctcagtgaacggcaagtaggagaccttcttgaaggggtacatggccacctccaggcgccgggcagcctcctcccagctcagctcctgctgccacttgatctcctcaaacacaaactgcaggggctcccctgagggcaggtggctgtcgatcatgctgccatcctcatccaggatcacggagggcacagaggggcccgtggcctccagctccatctggggtatgtagccgatgtccacctccatgttgctgctttcactggccccgtaaagccactccatgtccacattcagagacctgtggttgggcacgaagagccggaagtcgcggacgtgggtggcgtctttggagaggatgatgtggccggtgaactgagcaggggagaaccaaaaggggaagtcgggcggctcactgagctggaactcggcatggatccggaacatcacagtgtagtagaagtcgctgatggcagtcaggcaggccacagctccctgaggggcaaagcgggtcttcacaaagggccgagggtggaacatgctcaggagccggtggatgatgacctccttgcccttgggcggcggtggatagaagcggttgttggacaggtagccagtgaacatgctcagctcactggggatgatccaccagggctcacccagctcctggcctggcgggggaaggaagggctggaagtggcgggtggcaaacactgcacttggtgaggcggcggctgtccagtttcggaggccggacagggcgaggcgggagacccctaggaagccatctttgctcttggtcatggtctccgggagcagaggctggaatcgggcttctatggtgagcgtctcctcgctagggtcagggggcaactcctcctcctcgtagctggccgcgggagttgaccctgttagcttctcagcaatgggtttgaactcctcagggctgatgtacatatccccgtcagtgtccaaggaggaaaagagaaaaaggccatctgtccccagggtcttcagcgccagttcctgccgcgcggcc

SEQ ID NO: 348987 - DNA, 1379 bp, Homo Sapiens
  misc_feature (245)..(245): n is a, c, g, or t
  misc_feature (1005)..(1034): n is a, c, g, or t
  misc_feature (1269)..(1269): n is a, c, g, or t
  misc_feature (1290)..(1290): n is a, c, g, or t
  misc_feature (1308)..(1308): n is a, c, g, or t
  misc_feature (1325)..(1325): n is a, c, g, or t
  misc_feature (1345)..(1345): n is a, c, g, or t
  misc_feature (1357)..(1357): n is a, c, g, or t
  misc_feature (1365)..(1365): n is a, c, g, or t
aacagatcatagaagaacaatctggttcttacatctgggttccggcaaaagaaaagctatgaaaactcatgtttctctgtttctcttttccacaattccattttctttggcatctctttgccctttcctctggagtctttcttgagtactgatttcatgttgaattgtatcccacacatcatggtctgcagcttctttttcacatgtagtgtctccttcaagttacatcgtgtgtattatttaangtcactattggttagtggccatttttcagaactgaagatggaatggcctgaccagctattaagaatgtggggagacgcagaaattgtggtaaaattccttaatgtttaagggaaagtaactttaagagatttttggaaaagctttatatacattcttttcaaatttcagtaaaaatgaaaaagtggttttaatcagtgatttagtagactttgagcaactgtgcacgcttcagtctaatagcatggtttggccagtgtattactctcaagtccttttctcaatcaacttctatcatcaaagcaattgtttcattatagataaataaggacattttttaatttaaaaattcatgtctgagttgactttcataagggatttcattttttcctcaacattcttaaagccttttagtatttgacggttcttttttcccaggacatttgctaggaataacaacgtttcaatgtttttaatctacttgagcaacactatcgtgtcttacaaaagttgttcatatgtaaatgatcatcacatttcgtgaattgaggccatgttcaggtgctaaggaagttcgccttttacacagaagattgagaaaatttcctagatataaatacagataaatcagacgttacagtggtgacgtagtaaccatcatggcaatggaaaggagtccaattcatagcctaaaacttcaaatgtattcttaggagtcagattttactgaatattttacccacaatagctgcctattttgtnnnnnnnnnnnnnnnnnnnnnnnnnnnnnnaaactttctttaaactgtaactatgggaattattttctttacatagttgcgcacacacacaaacatatatatatatttaaaatatattttgtttcttttgccacctactcctaactttttgtttggtttttaaattaaatattaattgaatagacttatcttaatcatgtgaactgaaaatggggggcatggtggtcatgagggagggaaacctttaggggaaattaggattatnaagtaaaaagtgtggggcctnttgctcccgcttttgctnccaaaggttttgccaangggtgccccgaggttttttngttgttggcccntgttgttncccgtttgtgcttt

SEQ ID NO: 348988 - DNA, 505 bp, Homo Sapiens
gtgaagcctgagaaacaccaaagatggcagtctgctccttcctcaagactgtatatctacccaatagaatactataaaatcactgcatgtccacacaaggaatgctgcaccatcaaatactacacaaggaacaattctatacattctgatatagaaatttctcttaagacataccgttatatataaaaaataaattgtagatcaatacatacagtccaattcacataaaacaaactgtgtgtatatacatatatgtgaactaaaaaaatattgagacatatagaccaaattgttaatgatagttatatttgtggaggtgaataaaactggggtttaagaaaggagttaggattgctccatatacatctgtttgcttgcatttttaagtaaaatatatgtatgtataccttgtgtaattaacaaagtaaaccaacataaaaagaaaaatcatcatgaccagtagaggttgtctttacagtacaataaatttctctttacaaaaaat

SEQ ID NO: 348989 - DNA, 2781 bp, Homo Sapiens
ggcttctacagcaaacgcagcctcgccctcgtcatgagccaggcccgcttcgagaagatccgtcaagtacttccacgtcgtggccttccgctccagccagaccacgcacgggctctacaaggtccagcccttcctcgactccctgcagaacagcttcgactctgccttcaggccttcccaaacccaggtgctacatgaacccctgatcgatgaggatcctgtattcattgccacgtgcacagagcgggagctgcgaaagaggaaaaagcggaaattcagcctctgggtcagacaatgttcttccactggcttcatcatccagatttatgtccacctgaaggaaggtgggggcccagatggcctggatgcgctgaagaataagccccagctccacagcatggtggccaggagcctgtgccggaacgcggcaggcaagaactacatcattttcacggggcccagcatcaccagcctgacgctgtttgaagagtttgagaagcaagggatttactgctgcggcttgctccgcgcgcggaagagtgactgcaccggcctcccactgtccatgctgaccaacccagccacacccccggcccggggccagtaccaaatcaagatgaaggggaacatgtccttgatctgctggtacaacaaaggacacttccgcttcctgaccaacgcctactccccggtgcagcagggagtcatcatcaaaaggaagagtggggagatcccatgccccttggccgtggaggcgtttgccgctcacctgagctacatctgcagatacgatgacaaatacagcaagtatttcatttctcataaaccaaacaagacctggcagcaggtgttctggttcgccatcagcatcgccatcaacaatgcctacatcctgtacaaaatgtcagacgcctaccacgtgaagaggtacagccgggcgcagtttggagagagactcgtcagagagctgctgggcttggaggatgcctctccgacccactgatgctgggggcgcaggactcggtcaagggaggggcaagaggaggaggagagcctgccgttccaacttgcccatcagagacccggacacggcctggtgtgtggcttgctgcctgggagggatgcacagggcctctggagggacaggatggacctggtcagaggacggttgctgtcctcatttgcattccaagaagagcatgtcctccctcgagaaacagtgccgccggtgtgatgagcacttacacccacgttctcaagggcagattctctcatgacatccgtggagcttgcgaggcagcgtggactggtgactgtgaaggaaggcccccgtggtagaatgagctggagcacgctctaagagagatgcctgcttcctaaagatctacagcaatctgggacgtggttcaagttcaagacttgaaggaagcaaagacgccctgcatggttacaatggctcaggtgtcaggggaggccggagggttttccagcatttgcctcatgccagcacctttgaaccggtctcttagaagaagacacacatcctgggtgtacagtggtgaaatggggagtgggtgcccattctgaaaaacgaggcattcctgctcattccctctgcttagctggtgggcaggggagagagggaaatgccaaaaacttggagtgaaggatgatgctattttttatttttaaatatatcttcaggttattttcttactgttgcttcagatctaatgtaaaaggcagatgtcccctcctctccacccccgacgctgaccccggcctcagtcacggctctttgcatgatcacagttctgtgttctggcctgtggcagggccgggaagggccactggcttccgaacagacgtggttgctctccacgaggcgcatggggagcccgcgggccctaagctttgtcgcagatgtcatcattggcagaattacttgtcttgaaaaataagtagcattgctgaaacacacaaccgaattctctacgatggccatttgctcattgtctttcctctgtgtgtagtgagtgaccctggcagtgtttgcctgctcagagtggcccctcagaacaacagggctggccttggaaaaaccccaaaacaggactgtggtgacaactctggtcaggtgtgatttgacatgagggccggaggcggttgctgacggcaggactggagaggctgcgtgcccggcactggcagcgaggctcgtgtgtcccccaggcagatctgggcactttcccaacccaggtttatgcgtctccagggaagcctcggtgccagagtggtgggcagatctgaccatccccacagaccagaaacaaggaatttctgggattacccagtcccccttcaacccagttgatgtaaccacctcattttttacaaatacagaatctattctactcaggctatgggcctcgtcctcactcagttattgcgagtgttgctgtccgcatgctccgggccccacgtggctcctgtgctctagatcatggtgactcccccgccctgtggttggaatcgatgccacggattgcaggccaaatttcagatcgtgtttccaaacacccttgctgtgccctttaatgggattgaaagcacttttaccacatggagaaatatatttttaatttgtgatgcttttctacaaggtccactatttctgagtttaatgtgtttccaacacttaaggagactctaatgaaagctgatgaattttcttttctgtccaaacaagtaaaataaaaataaaagtctatttagatgttg

SEQ ID NO: 348990 - DNA, 447 bp, Homo Sapiens
  misc_feature (41)..(41): n is a, c, g, or t
  misc_feature (50)..(50): n is a, c, g, or t
ccttcaaccccagtgatgtaacccacctcaattttttaacnaaaatacangaatcctaatccctacctccaggcctatgggccctcgtccctcacctcagttattgccgaagtgttgctgtcccgcatgctcccgggccccacgtggctccctgtgcctcctagatcatggtgactcccccgccctgtggttggaatcgatgcccacggattgcaggcccaaatttcagatcgtgtttccaaacacccttgctgtgccctttaatgggattgaaagcacttttaccacatggagaaatatatttttaatttgtgatgcttttctacaaggtccactatttctgagtttaatgtgtttccaacacttaaggagactctaatgaaagctgatgaattttcttttctgtccaaacaagtaaaataaaaataaaagtctatttagatgttg

SEQ ID NO: 348991 - DNA, 1227 bp, Homo Sapiens
  misc_feature (322)..(322): n is a, c, g, or t
agtggtttttgttcgtgaatctgacttagaagtggtgtcatctcagcaacctactaccaactgccagtcatcatgtactgaaggcgaagttacaacctgaggaaaattaggaaaaaagagctcaactaaatgaaattcatcaatctctgttattttgtcattaattatcttcttagacttaaaattgaacttgagataaataaggaagaattgagtagatttgatttgcctgggagtcttttgggaggcatgaggaattttctaatcttgacattttgtttgcctgttctaggacaggccctgtgggggttcttgacccttncagtaagttaaggataaatttttaaaagaaccgtagcaaagatggaacctttgtaatttatgttgattttaataaaatcataatttaaaaaatgaaatgggaagatgtcaggaaattaggatagctactctagtataatttagaaaaactaagcaagagattctccagttgctagtgagtaagcactctgatttgagaaatgtgtggggacaatggagaaaagttttcagaaaactgctatgtagatttctgaatgtgttgtatttcgctgaggaattcggtaacaactgaaagggaaaagtgcttcagccatcttttgaaaacaagttaaaattctggaacttgtatctgtaatacatcctaactcttgtaaaagaaaataatttatcatagctggtgtcctttcattgaaagttgtaatactgtctctaaggagggaggaaaagattattatataattttataactggcaacatttgagttagtattgactttgtctaaaagaggcttgacttcaactgggataaaaatgtcagtgaattttgttaaagtagtaaaaatgcagttgacttagtaggaacataaaattatttcctaataagataatattgcactcctaccaaataaacaggattttagtaatatctgagggattgttgatggtgagttagactgtatttggcatagaatttggaaatgtaacttgaatgtaaatatgctgcaaaatgttgaatgtatacatagaaagactttttctgtcgacgccaaatgcccgttgtaaatgaaccttaaatattacattcctcctttgcacaataatatttctttataacacttatgattttttcccccaggacaacaaactgcccttaagagtcatttccttgttatcacaggtgtcaata

SEQ ID NO: 348992 - DNA, 947 bp, Homo Sapiens
  misc_feature (138)..(138): n is a, c, g, or t
  misc_feature (746)..(746): n is a, c, g, or t
  misc_feature (876)..(876): n is a, c, g, or t
ttaaggatgactgccacatgccagccataatggaggatggtttttcttctaccctagacatttaacactgaaccagccctcacttggattctcggacatcttcctttctgcactgtgcagatcccctcagtatatgcnagagaacagaaaatcattttgctgccagtggaaggtagacagaagctacgtttattggggaagaaaatacccttgctgtcaaaccatggcctgaaaataaaggccttggattactcccacccatctccactccatgggtgcagagaatgctgagggtgcttgcatacgagaccataaagttgtaaaggatgccttccagcccccatttggtttgttatggtgagagctggggcctctgtgagtggcaagcatcaaaacccacgaccacagccgttggtactgctttcaaaagcatagcacccaccctaatgccctgataaaggatttgtccagtagcctgggcgtcaggattcctgggctctaggcccccacaggtgattcacagctagccccaggctgtgcctcctggcctcagttttccctggcttgctctattggtacttcctacctactctgtggggtgttaataggggtgaggtgctttgaacttctcagatgaaagaggctgggaagcagcacccagttattatcccctttacagccaggcgtgggagctgaggttgctttcatactgttccagccacagtagcctcctcatagcccctcantcatctgcctttggctctggctgccacaaccagaaagcaaagcagtcagtcctatttcaatgctgtttcagaacagatgtccctaaattaatttgccaactgcccaaaccactggtgaactatctatgantcagtaatactttacaggtgcctaatttctttctcctgattggctgcaaaacctgtgggacaagggctgtg

SEQ ID NO: 348993 - DNA, 875 bp, Homo Sapiens
cttggagataaaacaggaggagaagtttgttggtcaatgcataaaagaggaattgatgcatggagagtgtgtaaaagaagagaaggatttcctgaagaaagaaatcgtggatgatacaaaggtgaaagaagagcctccgataaatcacccggtgggctgcaagcggaaactggccatgtcaaggtgtgagacttgtggtacagaagaagcaaagtacagatgtccacgttgtatgcgatattcctgcagtttgccctgtgtaaagaaacacaaagcagaactgacatgtaatggagttcgagataaaactgcatacatttcaatacaacagtttactgaaatgaatctcctaagtgattatcgatttttggaagatgtggcaagaacagcggaccatatttctagagatgcttttttgaagagaccaataagcaataaatatatgtactttatgaaaaatcgtgcccggaggcaaggtattaacttaaaacttctacccaatggattcaccaagaggaaggagaattcaaccttttttgataagaaaaaacaacagttttgttggcatgtgaagctccagtttcctcaaagtcaagctgagtacatagaaaaaagagtaccagatgataaaactattaatgaaatcctaaaaccttacattgatcctgaaaagtctgatcctgtaattcgtcaaaggttgaaagcctacattcgctctcagactggggttcagattttaatgaagattgaatatatgcagcaaaatttagtaagatattatgaactagatccttataaaagtctcctagacaatttgaggcacaaagtgatcattgagtatccaacattacatgtgctattgcaaggatccatac

SEQ ID NO: 348994 - DNA, 997 bp, Homo Sapiens
  misc_feature (17)..(17): n is a, c, g, or t
  misc_feature (36)..(36): n is a, c, g, or t
  misc_feature (58)..(58): n is a, c, g, or t
  misc_feature (572)..(620): n is a, c, g, or t
ccacagggggccaacancaccaacccccataaaatnccagcctttccaagcaaatggncccggggaagtggccccaagtggtgcaaaataagatggctagccaaaataataaacctaagttaccccactaactgtatttagcccataacataatttcctatgtttacttttatcccaccctaaaaatgaatgtacattttttgacatgcaattgtctctagactgctctgatacctattaccaatgtgctacttgaatcccagggagttatgacagagagagatgtttcaaagtctacggaaaaggttttagatatttctgttgtgcattatttttgtatgttagtaagaatcctttgtatttccatttacatagcacctttcatccaagattttcaaaatgatttaatgttaacagcatttggtggtaaaacctaagttaccggtggcattgaagtacgtaagtaagctcaagttctctaagttccatttcaatttaaacatgctctcttttttattgatggtcttttggaaattagactgtgaacacaacattgctactggcctacgaannnnnnnnnnnnnnnnnnnnnnnnnnnnnnnnnnnnnnnnnnnnnnnnncttttcttatggttactgggttagtgatgaaacccacaactcataaaccacacactatggaatatggaattattccaaaaagttcttcagagctggtaatgaaagcctaagaagtacactgttaaaattttaaaaagtcagtatgtttctcatttcagaccttgaagattactctgatattgatgttaaataatgaatttgcattaatgagtatcaatgcattttttgatttcataagaaaataaaactgtgatataaaattggaactactaaaaaaattgatgtttccctgggttaactaaatctatttttttgtgcttcttccaaatgtttaaaggtaacaaatgcatacaaatatttcaaaagtaccaataaca

SEQ ID NO: 348995 - DNA, 1499 bp, Homo Sapiens
aataaggaggccccgaagcagatgcagaggttgtaggggtccatcaagttctcttcactgaactgtgataaaatgattgaggaaggccaaagaggtatctcatgataatcagagtggttttgggcaaggactaggaggactttccggatgtgcagagctctctcctgcaggttgtccattgtgacgcaggccatcaggtcatgaaagatgtccttggggaagagagggtgttccagcccccggaagtaaagcttcaggacaccagctatggaatccatgtcatggtcgttctggtccccagccagggggtcctctcctctctcaaaggcatttttgatgtcattcacttccacctgggaacctgacacccggaaaattccttcatgctgtagtccgtgtctgctgataaaccggatacagctttccaccaccagaggaattgcctggctggagtcctgtttcctcacagttgagctgcgcctggctagactgcaatctgtccgctgactttctcccagggttttctgcagaaggtcatgcttggcttgtaacttggtgatgaggttcctgccctccaggtactctttcatttttgtgaaataaaactgctctgtctcttgctggttggctctcctcttagcaatgctgggcttgctcatgaaggtttcagagaccgtggacttgacggactccatggagttgctgtactggaagcagtcagacacatcaaagtcctcgacagtcacaatgtcctggatggtttgcagggtggcctccattgtcttctttacctcttcgttttcaatctgtagagtggataagcgagactgcagttgttggcatctctgtaccagctcactctggacaggctgctgggcacagagctgggaagccatatcccccatgtggggctgaaactcaaacttcataggggggcagaagacgttgttgtacatctccatgaggcgctgcttgtcactggtggcatccaggttttctactgcattctcgatggcatccagaccctcatgcttcgactgttccaggtttaactcagcagagaggaaggtgcgtagagcccggttcagacttgcatggtagcctaagtcacaacactgatcaataaggtcagataggtcatggatgtagtacttgaagacagatgcattggttgcctccaaagccagcaagtactcattccgggctttgatggccttcagcttattctccgtgtacttggcttgacgcttctccttcatcttctcaatcttcttcactgagctcctccggacatgtttctcctcaatgcgaacgttggccgtggagtcaggggagcgtggggtctgccggtcctcctgctttaccgatttaccaatttgcttctcctcctgcttctccgcctcctttagtttgctctgagcactgatgcgagtagagctcgtttaggaccttcatcaaatcatcttggagctgctggccgacttctttactctttttaa

SEQ ID NO: 348996 - DNA, 999 bp, Homo Sapiens
  misc_feature (829)..(851): n is a, c, g, or t
  misc_feature (944)..(952): n is a, c, g, or t
gctgcctcaggcactcttctccagcctcctcagccttccatggagctgcagaccctacatagacctacccctgccaggctccaaacagatccccctacccattcctttcatgtactgtttggtcctggaagaggctcacacaagttggctttgggttttgcttcaacatagaaaccacgagccttataccttgaatatgggtagtttcattgccagtaatgggaactctggaactgccaaagggactgtatcctctttctgacctggtgttgctttcttttgttaggcttcccagctctgtgcccagcagcctgtccagagtgagctggtacagagatgccaacaactgcagtctcgcttatccactctaaagattgaaaacgaagaggtaaagaagacaatggaggccaccctgcaaaccatccaggacattgtgactgtcgaggactttgatgtgtctgactgcttccagtacagcaactccatggagtccgtcaagtccacggtctctgaaaccttcatgagcaagcccagcattgctaagaggagagccaaccagcaagagacagagcagttttatttcacagtaagggagtgctatggcttttaaagagcgtcagcatgcactgcagcactcaagggagatttggaactcagagtccttgttaagtgtctgaaggacaggcattgaatatcttagatacgaatgtgggcatactcagagaccatccctacacttaacaggtgcaaacattaaacagttgtatatgtctaacaagggatccgaccaaagagaaacggatgctccccaggtatcaactaggaaaannnnnnnnnnnnnnnnnnnnnnnaactaacttagaaggcttttccctgaaaaagtttccttcctcgggaccaggggaattcttgaaagggggaactttccccctttttagtccttnnnnnnnnnccccctcccaatttttcctaaaaaacacccctatatttttgtttttt

SEQ ID NO: 348997 - DNA, 914 bp, Homo Sapiens
  misc_feature (41)..(73): n is a, c, g, or t
  misc_feature (572)..(572): n is a, c, g, or t
  misc_feature (694)..(749): n is a, c, g, or t
  misc_feature (773)..(773): n is a, c, g, or t
ggatatctatagggatcgcgctatcgcggtggcggcgcatnnnnnnnnnnnnnnnnnnnnnnnnnnnnnnnnnatcaggccaaatcggccgagctcgaattcgtcgagagcggcatgcccccaggtgggcttcggtggccctacccggtaccagttctctctgagaaactggagatgtcttgttagcataagtgtcttcattcccacctggagggtttgggaggaggagcaaagcagttgaaaactagttaatgagctacaagagtcaaatagtcctctgaatggagcccccatcacaaaacagtgcccaggaggctggctcctcaagctacccatgcccagcgccctaaagcaggaccagatgctttggaattggggtgaaacacccacatggcagcctgctagcagcagtgactttgacttctggtcttaaagagtccctcacttcaggccccaggagctattggtgggttttagcagttttgtctttaccgtttttagttctccttgattctttgttttgcttcctttatcgtttttaggtttggtatgtgtggttttatttccatggnttcctcaaggtttcctttttaaacatttgcagtttgctggacaatggcaattttgttttaaaaaattcccctacccctgtttaaagctgaaaaatacatttggttcatgtgcattgtttacnnnnnnnnnnnnnnnnnnnnnnnnnnnnnnnnnnnnnnnnnnnnnnnnnnnnnnnncaacttaatatattttggattaanatttggtatttcttttaaagtattttttgtgctgtgaacattttctgccaaagaccatgatgtgtgtctgtatgtttaagttatcgtaaatatttaaaatgtaaacatggctgttttgttatgccaccctgtaccaggatt

SEQ ID NO: 348998 - DNA, 2159 bp, Homo Sapiens
  misc_feature (29)..(29): n is a, c, g, or t
  misc_feature (31)..(31): n is a, c, g, or t
  misc_feature (37)..(37): n is a, c, g, or t
  misc_feature (1902)..(1957): n is a, c, g, or t
ggatcggtgccatctgttttcgcggctgngncacagnagacccagggctggcaagggctctcttctagtgagcgacaaacagcagacgcccctgctcggctgactacagcagacagagcacccacagaggagccagtggtcacagctccccctgctgcccatgccaaacacgggagcagagatgggagcacccagactgacggccccccagacagcacctccacctgcctgccaccggagcctgacagccttctggggtgcagcagtagccagagagcagcctctctggactctgtagctacatccagagtccaggacttgtcagacatggtggagatactgatctgaaggaggtggtgcttcaggactctgagccattctctcccctcctctgccctgtgccactctcagccatttcagcagccccgtcaaccgctgctccgtccctttccccagccagacactcattcccattgaccatctggtcccaggagctcaggaggaggaccccaggggagaggagagctgtgagagcaccggcacccccagaagactctgcttcttagcccacattcctccgggccttatggagaatgaggattcagccttgacttcttgcccaaggcctgctactggggtagcaactgacagctcagaaaggagctgagctccctctgccctgccagttgtcagtcaggcagggagggagtggctgtgttggtttggggaactaatttccaaggacggctgcccgtggacaccaggtggactggttcactaatcaagtcagccatattgttctctggctaagtttggttccagccaacgtcatctgctcttcagttcctcactgccttcttgggatactaagacttgaattttttggggactattaagggtgttagtcttggagaagacacagcctcaccttctcacttgctgtgggtgaggggccatttaagtggactgggagacagtgcgcagtttgtatataattccctttcttgtggaacagaagactgaggcctgcaggttccgatgtgtctccatgggctgtgctcccctcttcctactgtcagtttctgaaacttctgactggcctcccagttatgcctcctcctcaagttcctggcccgtggatgttaaagctgctcgattcccaggatctcggctgccttttcctctatcttgagccctataaatgcccacgggacccccaccaccagcctcttgaagtggctccacagctcctgtccctggaacatcctgtcagtttggtcataaaccctgagccagatgaaatgagccaccgtgaacagacatctgccatgcccccaggtgggctttcggtggccctacccggtaccagttctctctgagaaactggagatgtcttgttagcataagtgtcttcattcccacctggagggtttgggagaggagcaaagcagttgaaaactagttaatgagctacaagagtcaaatagtcctctgaatggagcccccatcacaaaacagtgcccaggaggctggctcctcaagctacccatgcccagcgccctaaagcaggaccagatgctttggaattggggtgaaacacccacatggcagcctgctagcagcagtgactttgacttctggtcttaaagagtccctcacttcagccccaggagctattggtgggttttagcagttttgtctttaccgtttttagttctccttgattctttgttttcttcctttatcgtttttaggtttggtatgtgttgttttatttccatggttcctcaagtttcctttttaaacatttgcatttgctggacaattgcaattttttttaaaaaattcccctacccctgtttaaagctgaaaaatacatttggttcatgtgcattgtttacnnnnnnnnnnnnnnnnnnnnnnnnnnnnnnnnnnnnnnnnnnnnnnnnnnnnnnnncaacttaatatattttggattaatatttggtatttcttttaaagtattttttgtgctgtgaacattttctgccaaagaccatgatgtgtgtctgtatgtttaagttatcgtaaatatttaaaatgtaaacatggctgttttgttatgccaccctgtaccaggattgctgccgcattccactgggtataacagtattttaatt

SEQ ID NO: 348999 - DNA, 957 bp, Homo Sapiens
cgtgctgggacacgaaggggaaggtggggctgtgtccatcccggcacacgggatgaagtgggggaatggactctgccaggcatggagaatcgtccagtccgaaagagaccgcgtcctgcccaggccatacccgaccacattgccagcccagttggatcgtccacaggcaacagctatgctaccagggtagactggggatagttcacgcagcactctcattaactcaggtacctcccagagcccagctccgatacgcaagaccccacaggtggggaaactgaggcaggaacagggttctgccctcccagagcctccactctgggatgccagaatggaaagccagagggaacctgagaatcatccagtcttactgtctcaatgtacatacggggaaactgaagccaggagaagaagagggagaaactgtccagggcctcacagggaggcattcatggagctggagaaaccagggatcctgaccgcagggcccatcaattgctacatagagatacacatggaaagagggtttaacagaccctctctaggacacaactgtttctgctttgagcaataatttctaacctgaggccaacatgtcccactgccccttgggttggctggggttgtttcctgagccaagcatccaatatcatgccccactcaatggcctagaagctgcctgtactttggggaaacagatggagctcttgggcccagccagctgggcctgggacttctgcctctgccgcctccagagtggcctggcagctttgccagaggctgtggagcgagggtagtaggagcttttcccagagtgctgtgacttgcatgatggattctaggctgtggcaagggctgatttctgggatagggggagggttggaaaatttatttttatgaaacagagggaagactttattgttgttatttttggtaaaataaaaggcaaactaaagc

SEQ ID NO: 349000 - DNA, 475 bp, Homo Sapiens
  misc_feature (233)..(289): n is a, c, g, or t
gcgatctagaactagtcagctgagcttgtaaaagcccacagatgttgggggctggagaaaggggcaggagagcatcacactcagccccagcctcctcaacctcttggggccccgtgatggggaggagagaggcagtgtgcggggaggctctggccttccttggtgccccgccctttgtttgcactattggacttaggagtgccgagggtggggagatggagctgcccgtctcnnnnnnnnnnnnnnnnnnnnnnnnnnnnnnnnnnnnnnnnnnnnnnnnnnnnnnnnnctgtctgcctgtctctctcctcctggacccagggcagccaagggcagggataggcgcagtggtcagatgaagcagcgccagagaggggacctcccagctcttatttgcaccctccccacctcaccaactttggtccctctctgggggcatgaatggttaacaaacaccagagcagtactccaatat

SEQ ID NO: 349001 - DNA, 1208 bp, Homo Sapiens
aagaggaggaagaaggaggaaggtggccagtgatgttccaggggggagcccggcgtggaggcagcaccttgcatgggggctgcattccttggggttgcccagggcccccttgagggggtggccgctgaggtggggtcttgcttgagtccggatccttaagtgttccgctctgtggctgctgggttgttaggggtctctgaggagacagggcaggagtcctggacagcagctggttcatcttgctgatgactagttcggtgatgagttgcctgtcctccacctgatgttccccaatcagtggcatgctacagtccatgacctcaaaaatgtagtctttcccatctttgccatgtacagctttgacagcacagatgtccaggccgccaaacatctcagagcaggtgtccacccacagtttgtacctgtctgacatggcaatctgctccagcatcgcagagccagtgttcgtcttccagttccctgagatcgatgtcctcatgtaagccttgtagttgttgccaatcttctggacccggatgtcatacttggagtcaatgaaaggctctgcagtggcataggtctgggtgagagccaccacgctggcaatgtcctggaagtcgtagtggttttccactttgaccttgcccatgcctgagtgagcgtggccaatcttcaccaccacagggaacgtgggcagtgtcagcatctctttgtggttggggtagtatgtctgtttcaatgagagggaacttttctcctcccagtgtcttatagatagtcgaccagtctgggcaaacacccatggcttgtcacagaagttgtatatggattccagtgagttgatgctggggaggcctgcatactgcataccaatgatcaggtggcggaagtcctcattctccgccatgccaaatgcatgctgccggatgagcacgaagtctggccggaaggaccggacaacctttgtgccattccggagaacctgcatatccacagcataggtgccatctgcatgggccaccaggttgagctctgaaaattctgcctgttccaccttgatatcataatctccaaggacttttttgccccgaaagcacttggcccagtcggcgtgcggctccgtcgaccaccatgcagcaccttggccttcctggcggctgcgcgacgcgtgggtcgacgatatcccagaacttccggaccgtaccagc

SEQ ID NO: 349002 - DNA, 1700 bp, Homo Sapiens
  misc_feature (1534)..(1608): n is a, c, g, or t
agcctttttcttacagagctgaaatccccctttgttggctttttacaccacagagaggtggtcctctcttgagggcaaatttcaggatagagcaccggagagaaataacacaaaggcccttgaggggaaagcacggtaggtagggaatatacctggcaattaaggcagtttttttccagcagccagccctgctagatgctacagcaggaaaaagccagttttgatccccagagagccccctgtacccttcagctgagtactctcaccattgtgccttgggctccctgagattccccaaccaaaggaccctcagggctcctcagcctctgcaaggcttcctggcttgccctgaaaggaaaagtcctgatattggcctctaggatttattaaggacaagagcttagagtttcagagcttctccctggggaagctctggcaaagatgacagagatggttcttttcaatgcccaaggttgttttttgatatgtggtctgctggtgagcagggccatgcacaatgtgtcagaaggctcttgatttgcagaaatggtgtaaatggagaccccttttggccaaggaagtggggaggcgggcacaaacataatctctgttccacttggaatgcttcgcagggagtctccattggtgggttaagcacgatcaccaattgatcacaccagcctggggcagagggtgtggggacagggaagaagaagggagtttgagctccaggtccctgcacgggaaaaacattggcaatagcctccttaccaaccaaccgtcccatctctctgctccttctgacttactaggatggcctcagagaaggcacagtgttaacccagccttatcacagttgtggaagcgccaggggaatgggagagtcaggggattaataatagtaggagcaatgccttacatctagtagatgcttcacactttcccagaagctattacttaatgaatctcacttaaattgtgtctgtaccatattagaatatcctgtgcagggataaatatgcccacttgaccgtcttattggaaactgcacacagtgaggaaatgcagcttgttcaatgacaagtggcagagccagggctgggactcaaaagcagtgagatctgattgttggtccagaagtttgttattctctcagcttgattaaactgcccttactcctgtttttccctattctatctccagaatttgacaagaggctgtcagctaaaatctagttattccagccgcataagctctatagttcaaccccagtggagtctttggggttgagatgctgaggcccttttcagagccccacaataaccaggtggctaagtgcaaaatgaaaacagcagaaagactaatgtccccactgagccacttaccatctctttgtggttggggtagtatgtctgttcaatgagagggaacttttctcctcccagtgtcttatagatagcgaccagctgggcaaactgcaaaagaaaagcaaatgttacagcttatcttagataacttctgaaacagatgaaannnnnnnnnnnnnnnnnnnnnnnnnnnnnnnnnnnnnnnnnnnnnnnnnnnnnnnnnnnnnnnnnnnnnnnnnnnaagtgtacaattcctatttccaaggatatgatacgcattagttggggaagggaaagagagtgagctaaaattccattacctttctcaattgt

SEQ ID NO: 349003 - DNA, 1171 bp, Homo Sapiens
gaagattgccagggatggtgttaatgaccttgacgactccaaccccagtggaggcggaggctagctgcctcattgctttgaaatccaactgacttcaaaacagttgatgcatagaacaatatgttgggtggccagtgatttgtacaaaaaaatactagtgtagtcctatcaattattcgggtccgcatgttgtcttttgaacggaaacagatcccaaaaactgtactgatattcatctttcagggaggatttgatcacagtgagttcctcagttgtatctgagagtgctcttaaccttccaagaaccttgctagcagctccctcttgtcctttcatcaccagaaaccgagggcttggaggaagaaaatacattgcaattgcttgcaaaactcccaagggaatcacaagaccaaacatgtacttccagccatggaaaacattggcaaatgcgtaatttgaaatataggcagaaagaatgccgatgacaatcatcagctcattcagtgacacaagaaggcctcttcttgtgttgaggagcaatctctgcgatgaaaacacaagtggcaatggaagagagggagatggagacccctatggcaatgcgtcccactataagaaccgtgtaggataaactgaggatcaagactaagcttccgagtccaagcaggcaggatgacaagatgattgctgtccttcttccatatctgtctatcaggacccctccggtgagtgaggcaaggagggctccaatgacgagggagctcacaaccatttcctgctcatggcagctcagggctaataaggttttgatctgaagaagagccccagagatgatcccaagttcataacccaccaggaggccactgacagcagcagtgacagatgacaggaaggtaaacatgccgcagcctctcgcccagggaggatgccggctgccgctgccctccgtctccacggctgtccccttctggttcagcagactggggccctcggtgttttcaacaggtaccatggtcacgtagaagttacagccgcttccccgccaccaaaccgccccgaccacccccgctcccaggagtggtcactttccccataatagcatgctaaagaagagtgtggggaaaaacttcgggcaaagctaatgtgatttgtgaccaactttgtttctccc

SEQ ID NO: 349004 - DNA, 1028 bp, Homo Sapiens
tgaccacccaagggcatccatccattcagagatcaagcaatgtcactgttttcaaatctgcctgatcatcaatattttgctttgttttgttttgttttattaatggttctggagtcccaggccctacccctggaaattttgctttagtaatatggggtgagatcagaaatttcatgttttaaagagatcctcaatattctaaggaaccacagatcataccagactacttgggatacactggtggagaggaacagataggttgcacagtccttgggcaggctctccaattgtcacacaacagcattttcctaacaggtccgtcattttatgacccagggttcctctttcctggtgttttctcccctctagctggaaagcatattatgagagtgatattacttggtgtctagtttacttttctttgatagcttcctgtggaaaaggatcttcctgaaggaaataagaattaaaagagtagatgtatagaccttagttaccatccaatacaaatcactctagacctttaattccacttaactaccgaaactgtccttacagtaaagtatgaatctagacatcaccatgctacagtcttgagcctttcaaggaagtctgcaatttgaaaattattttctttacctcaggtcatggggtacaatgaagtgaatttctctaaatggttcaaatacatcataaggagatggctcttggaatacatttggcataacgaatttcttagtaaaagaaaagcttaaatagagttaatatctaataacataacataattggttttatatagtgacagtagagagcaaagttccttctaaaatcttccatttagaattccaagcccctcgacattcatatttctctcagttttcaatatagattttatgtgttcactgtatgcaaactgtagccaaaatacacatttctattcctgatgctactgtggatgtcaaggtttagtttaagcctttttttggtagcaaactgtgagaagtataatttcagctttcaaagaaata

SEQ ID NO: 349005 - DNA, 1126 bp, Homo Sapiens
ggcccagcgtcggcgtgacggtggacgcgggcgccggcactgcgggtcccgattgctgcagccgcttgtcagtgtgatgaagattggcacccagacaccattcgcttttcacccaagatgatttgatgtcttataaaactctgatgaaccatgatggctacacagacattaagtatagacagctatcaagatgggcaacagatgcaagtagtaacagagttaaagacagaacaagatccaaactgctctgaacccgatgcagaaggagtgagccctccccctgtggagtctcagaccccgatggatgtggacaagcaggccatttataggcatccactatttccattattagctttgttgtttgaaaaatgtgaacaatctacacagggctctgaaggcacaacttctgccagttttgatgtagacatcgaaaattttgtaagaaagcaagagaaggaagggaaacctttcttttgtgaagatccagaaaccgataatttaatggtaaaagcaatccaggttttgcgcattcatcttcttgagctggaaaaggttaacgaactctgcaaagatttctgcagtcgatacattgcttgtctgaaaacaaaaatgaacagtgaaactctgttgagtggagagcctggaagcccgtactcaccagtgcagtcccagcagattcaaagtgccatcacaggcaccatcagccctcagggaatttgtggtgccggcgtccgcgctgcagcagggaaacgtagccatggcgacggtggcaggtggcacagtgtatcagcctgtcacggtcgtcactccccaaggccaagtggtccacaccagacatttgtcgcctgggacaacttaggatccagaactcccagcttcagttacagttaaaccaagatctcagcatcttgcatcaagatgatggttcatctaagaacaagaggggcgtcctgccaaagcatgccacgaacgtgatgcggtcctggctcttccagcacatcgggcatccctacccaacagaggatgagaaaaaacagattgctgctcagacaaatttgacactactccaagtcaacaactggttcatcaatgccagaagacgaattcttcagccaatgttggattc

SEQ ID NO: 349006 - DNA, 1083 bp, Homo Sapiens
  misc_feature (516)..(517): n is a, c, g, or t
  misc_feature (519)..(519): n is a, c, g, or t
  misc_feature (532)..(533): n is a, c, g, or t
  misc_feature (547)..(548): n is a, c, g, or t
  misc_feature (560)..(560): n is a, c, g, or t
ctgaacacagacaatacagtctgatttagaagtcatcttttcagccgtgtgataattaacatggtaagccttagcagcaaacattcttcctaaaaggaagacttcattttctcaagaaatgggattagttgggggtattataataccaaattgtaaatcatgagcgttttctccactgtgcacctgaggcagatcatgcatctttgagtgcagtttggtctgacccctcaagagaaaagcatggtgccgtagggctgctatggtttgaatggatgccatcactcttttctccacatacagtgcagagagctgtctggagtcacaatctgaacagattctcgggcgctccttctctccttccatcactacagtaagtaaaaggaccatagaggggaaccaggaatctgagaatcagctgtgctcaatagccaacctccctgtccagatgcagatattttgggatctcctatcacatgcactctgaatcagggtttttctataagaaatctttcagannantcagcccaaaagnntggggatgacccannggcatcttgatnttgcaaaatcacaaaactaagttgtcagttatcactgtagatgagcaactcatctttctaaagtatagttactgaactgattctgagaaatctttagagagaaaaaactcaacagtacaaattaactaattgggaaagttagaatgtcctttctgaatttttcattaaaaaaattacattatctgaaataacataaagctactaaactgctttgtattctattaagaaatagctcctaaggatgtagtcttgtttcatagttgttgcactatatcaaaacttaaaatgtaagcccagttcttctctgtatagaaaggaaacattgtgttacttaatgaattatttatacagagcatttgttgccaactgttgttccagccatccacacaggagtctgttctgaggtggcaatagcacatgggaagatgaactttccctgtttgtttacccgttcttctttggctgtatctgatgacagtataagatgttcttaataaagttttatgttctttttgaaatgtga

SEQ ID NO: 349007 - DNA, 989 bp, Homo Sapiens
atcaggccaaatcggccgagctcgaattcgtcgagagcgaggtgggggcgactggagccaggcgccggggcaggaagggaggcggccgccgtgccattcttaaaggcgcccgagtgtaggcgacaggccgctgacggccggaaggaaaatgagtgagtctttggttgtttgtgatgttgccgaagatttagtggaaaagctgagaaagtttcgttttcgcaaagaaacgaacaacgctgctattataatgaagattgacaaggataaacgcctggtggtactggatgaggagcttgagggcatttcaccagatgaacttaaagatgaactacctgaacgacaacctcgcttcattgtgtatagttataaatatcaacatgatgatggaagagtttcatatcctctgtgctttattttctccagtcctgttggatgtaagcctgaacaacagatgatgtatgctggaagtaagaataagctagtccagacagctgaactaaccaaggtatttgaaataagaaataccgaagacctaactgaagaatggttacgtgagaaacttggattttttcactaatgtgaacttctgtgtttctaaagtatttatgtattaacctgaccatactggaatcagacataaatacttatttatgcctaaaaatgcactgttacttacagtttgtttcctgcagtaaagaaaaattcttcatttgtgcaaaatttgaacaaagaggaaatcatcttcatagtaatggaaactttgtaaagtgtttccttatattggtaattgttaggtggactacttttctccagggactttttgcactcttgtgactaatttctataacttatggttcggaatttgttactatttacagacaccattggaaagtggatatattagattgtgagagacaacagttgcctccttttgacaaatactggatattagcagtttatttatgaaaatagcgtattatcacttgtca

SEQ ID NO: 349008 - DNA, 943 bp, Homo Sapiens
ctgtctcagaaaggaagaggtgacccacccagccacctctcccttttatggaactcgagagggtggccctactgtgcaccccttccttgtgagtagctctcaactgtcctggagagcagaggctatttggggtcggaggagccctcgatacctgcgaatacatctgctttccaggctgctgtttattctgagacgactgtgctgtagcttcccttgcagctgcaataacccgcaggtcttcactgaggtggaggctttggggtagaattctccatttattttactacttaatacaaaacatttatttttgaccagtcctgtggcttccattagcaatatgtttcctttcccaaatatgcaaatagtggctttgtttgctcaattttgtgagtgctttggaatttaaatgattgtataactcaagaagattacttttctatgttgctcaagctgtgcctgccaacttgtaacttaataaatacaggaaatcctcagagaaggtgatattttcaggaaaaagacaaatgccctcatagtagtgggaagtgtgaaggtgaccgtgaacatccttcctcatcgggtctgtccccgtcatttcctcccggagtcgtcgcaggtggagatggacaacgtggtgttggacttagacctccttcagtgtggctctgctgggccagaggcatcctgctgtcccgggtggctgcctcgatgtctgcaccccctctccctggggcagctttgcttcctgcccctgtgctcggggcctgggtggttactggcgcgtagatggaattgcttttttaatatgggaagatacatttatttttttccatgtgggtgcgtgtctctttgtggattttcttctgtttttacgactctcttcttagaagggtgggagagaatcaagctcctgtggccacctgtgtcccagcagcagtgagtg

SEQ ID NO: 349009 - DNA, 1003 bp, Homo Sapiens
  misc_feature (473)..(481): n is a, c, g, or t
  misc_feature (747)..(747): n is a, c, g, or t
  misc_feature (787)..(809): n is a, c, g, or t
  misc_feature (814)..(814): n is a, c, g, or t
  misc_feature (909)..(909): n is a, c, g, or t
  misc_feature (931)..(931): n is a, c, g, or t
  misc_feature (937)..(937): n is a, c, g, or t
  misc_feature (951)..(951): n is a, c, g, or t
  misc_feature (966)..(967): n is a, c, g, or t
  misc_feature (972)..(972): n is a, c, g, or t
  misc_feature (974)..(974): n is a, c, g, or t
  misc_feature (976)..(977): n is a, c, g, or t
  misc_feature (990)..(990): n is a, c, g, or t
  misc_feature (992)..(992): n is a, c, g, or t
atcacttcttagaatttatttaaacttcttctcccaacagttttattttcttttagctgctaattattttcgaaattcatgaatgttttacctccttttactattctgaaagttatttcaagaagtggccccaaagcaggagaactgagaggggcaaattggcctggtttaattcacagcctgaagaattggcaacctaaagttataagttagatgtattttgcttttcaagccatcttctgagccttttttaggctgaaatgatttgtttatttcccaaattattgctagctacttgattttttatggctacctaacatccacatttggtagatacttttcctctctgcatgcatcccaaagaagaatttgctatttgtggaagaagagaataagggtatcagaatgaaggaaattacagtgactacactgtttatgactccattttgtgaattcttaaatatgctatggannnnnnnnnagaaaaaataatgcaaaaattgggatattacagaatcaccataaagatgatcaacaagtaataagtcttttcatggagttcatttttcttttaaattcatgatttggccacaaaaatatatatataagtgtctgatatatgataacagcccagtttctcggccactcatttgcattatcttaaatcacaaataattacttaatttgctggagtgtgtgctttgcaacttttgtaccagagcaaaatttgtatttaaaacaaaaaanaagaatgcccatcactaggagaaacactcctcacagaaannnnnnnnnnnnnnnnnnnnnnnatttnaaaactgagtaaatttaaatgtatgaaagtaccccacaaattgatttcaacaaataaatttcatttctctagctacttatgtctggccttatttngagcgttacaattttattgccntcattngcctatatagaccnaagtagttcgataannttaantntnnaataaaatccttntnttcataatcta

SEQ ID NO: 349010 - DNA, 550 bp, Homo Sapiens
  misc_feature (137)..(153): n is a, c, g, or t
taccttcatttaggcaatgaaggcataaattgtaacgctcaataggccagacatagtagctagagaaatgaaatttatttgttgaaatcaatttgtggggtactttcatacatttaaatttactcagtttttaaatnnnnnnnnnnnnnnnnncttcatattggtgattgagcatttaatatgtgccagggattgtactaggtacatgtatgcacacacttactcaaagacacatgtatatatgctcacccagggatacacatgcacagatatttatctctgcaaccaatatttagagtaacaatctactttcatggaaaagctgataataagtaccccggtcttttacttaataaactgaaaaatttttaggcagtttatattcctgttgactagggtttttttgccattttcttaacttaagaaagttgagtgataaactgataattttttaaaaaaagaagacaattcacagagatttagtacactttctgactctaaaaaatggtagtataaaaggtaatcaaaaactgttccctatgtgtgataa

SEQ ID NO: 349011 - DNA, 5235 bp, Homo Sapiens
attttcttatgattttccctaaaagaaaaccaaattttctactccacctcttccttatcctatcattccacttatttgttgctgctttgctaaacagccagcttagtaagccatcacacaagttagtgtagaggcttggttttaaacatagataacagagcaatcttgattaaatagtatccaactttgtagcataacacagctaattcaggcaatgacatagagatgataagaaacaacatggtttggtagagggaacatttgatttagactctgcccatttttagctgtatgacttacataagtcattttgtgtccaagcctcattttctcccatatgaaaagtgaaggggttggattaaatgactaaaatccccttccagccctatgagcccaatgtattatgatctctgctttgtttccttcttaagaggcttcctactataaaatgtgacctatttacattttaagttgaagtagcccacaataatgaataatcaatttagatttttctcatctcctttgggagaaattaaattcaagcctctattcatttgatgttttacaacaagcttcaaagttggccatgttcattcacagtttgatattttgagacaccaataaaagttttttaataaaagttcccttgacttaaactcaccttcctaatagaagtagtgatttggctcacggaaaaatgtttccagagtcaacatgagaggactggatgaacctacagcctcactcaagctgttgcatcattgctgctgtagcaacagagccctctctgaatacccaaaacacacaattttctccaacaattctaattgcccacccagtatgggaatttgagagcctttggtgaataaccttgatcactcttttgaaatttggtgcaacacttgcacaatcacggcaactgtttgtaaatatcttttcttctccgccagtatgtagacatgcacacccattcacaagtaagcccgcaaattcattttcacattttcctcttgggttgtttttatcatgggtatcacattgcaggaagagatgctctaacttacaagaatggaattttctgactatcattgccctcttcaaggcctgattagtttgtagggtggatgggatacaatgcatggtctacaaggtccatgtcaccagccatgatctttaaacaacctcttgcactttctggcactgctgcaatggcccatggtggacacctctgctgtttgtccaaacttctgctaaatagagaagtgttggtatttgttgtcctgtgaactccttgcccgtcagagaagacttcagctcttcaggtttgcaagggcaagatgtaaagctaggactgaaaggattgggttttgtttttcggccggcttttttccattagtgcaaaaaacctgatgcaagggcagcaagataaacacaatttcttcattgacccagataagaacctgtagaaaagtaagagatgcccctaagttcctatttcatttatcctaaataatatcctgaataactactgatcagtttttttctatgtccagccttgcttcactttccaacctccagggccaaatattcattttgatattttacaaaatccttctggtttttacacagggcccttttgtgctgagaataaaaccagctattggaacagacctcactgctttgtagagtcagaagttgacctagagaatgggtagcaacaggtcctcagtttctctggagacacccccaatccttgggtgagtgttgaaacctgacaactgactgttagccttgtcatcatcctcactggagatggagatgttgcagtcggagcctcactccttctggggcactgtttcttctcatggcaaccattttgcctgcctggaaacagcctgttgcctttgctagggggcaaatacacacactagccaaggaagttggtccagcacatctctgaggtttctcccccatggacccatggagcgaattccctgagataaatgatcagaaagttggctgtctggtggtttaatactccataagagttacttcccttatagaaagtcatcctttggcatctagatttttctacaaatcaccttaactccctccctttctctttctcctggaaaacctcagcattgcatctccatgttgcacaacacagatcagattatctggtcactatagagatttgtatataaaaaaactacttttttgaggattttgtatattgtttttctatttgttttctacagcttgaggaaagagctggcaaactgtgaatctaacttgatcttgttgccagcagatatattttggcttcctggtaagagtctgtgttaccagggacaatatattgccctctgatcagtattgcaccctaaatccacaaattcctccagcccagtcttacatttttttaaacaaatcccctagcttgtttgctattatttataaagagcattagaaaatgtatttatagacctggatgttatatgtttaatattaatttagcctttaataatgttataggtttgtaactattcttcagaaattataaagaactcagtgtagactgaattaatctatttagtatctgtaattttgcagacatattttcttacagtattttctatgtaaccacacatgtagaattataactaattagagcacaagaagtttcttcagcaatttagagctaccaattgtttcttgactatatagtcacatttgacaaatttaagaacccagtctttagtgatgcaataaacaaaatgaaccattaagaacaaggaattgcttaaatcccttagctggtgaggatatacatctaaataattcatctttctaactcaaggaatggtgctgattgtgtaaactgtctgacaccaggccttgtttttccagctgagcattctcattttgcttttctctaagactatcaaagacaaggtattaatagtaggattattcctagatcagaatgtttcatacattcctaaaggtttatgtggaaattggcttaggaaaactttgagtagcagagtactgaggatgagtgctagagatgaaatcaggacagatttgttgcagttaattcttgccaagcaaattagtggtaaatgtcacattgttatgtgaattgagcacatatttttaaagaaagtttacaaaaaatttttagaaccaactatgaggcaatactgtatcactgggggctgggagtgggggcttagaatcatactgaaattgtttaaaagcagcccaggtagtttctgtcctcaggtgaataacagactatataacttccccgaaaggtaaaacgatagccactgcagagacgaggtgtcttccttccaccaaatactttctgagatggtggtaggagtagtatttttaccgtggtttaaaaagtagtcagttacatagaaagtgtattggtatgtatttgaacctgctcttcattaaacaaacagattagatgtaccctcgactggcaataattgtatctattttcaagtacagctagctgtcaaagcatgaagctcttgtgtatacacactgacacttggttcacgcatgaagaacagtgcctatgcactttgtgtagctataatgtaggtatctaggtgtaatttcagtgaaatggtgtatagatgtattgtaatttaaatgtatatgttatttttggctattcatctaaatgcagtagacatgttgatcggtgttttgcaaacatttctttttccttcttagataactagtcgtgaatcatttctcctctttctcagtgtggcttgggaatatatatgagtgaagaatttatctgtgaatcctttgtactgatgattgtttgaaagtctgtgtgtgtccagcacctttgtaaatacacaattcagagcagggatgggctgggtgtgtgtcctggttcttagtgaaaggtcatctcatgtctgtttaatacatggtgaatgcaactgtggaacttttgattacctagacttaggtaggtttagaatgagaacatccatctacagtcctcctttgcttggtggattgggctcagaggaacaaaaagttagtctgactctgtgcatattagcatcatgtctttagagaaaggtcagcctctctggttgccaaatactcatcatgatgctcatgacttaaaggttctgaggagccttgtctcccttggatttttgagtcagggtacaggaaaaaacattgctgactaactaactgcaaatgcatctgcaggtgaaaccctacgaaagcacagttctggctataaacttcagagttctctgtaaaaaacttagagcactagaagcacaggaatagtgagtgtacagcttatgcggttgtagaggggcaactgatgaacacaggtcccacatatatgagggagtatgacgttctctacctaatatgttctgtgtgcatgttttgaatgattgaagatgggattaactaatgcaagtttacagttgcctcctaaaacacacattctgtataattatcgctaaatacaatgctgtgaggtctatagttcctgtaacccctttctcctccccaaggacagagaagaactagccatgtgctatagggaaccctgagtgccctactcttttcccaagaagggtaaagcctacaatatcatcagggggcatgaagcacattaatttgcagtggctgcttcatatgaggagatatggtggacaggctaatttttccttgaaaatgtggcttcttcaactcctttcaaatttaggatggaatacttcctgaaataaaactgggctttatgcaggattctctttgaaaattcttgtatgtccagaacaaaagataaaactaattgtattcctcacattcacaatccccattggtctgaagtcacgtagcacagagcatctatagcacatagtgtttaaagactaatgaatgcaaaaagataaaatcttcaactaatttttgaattgtttctcatatatgctactagaaaatgccttgttgatgaagcacattttgggtagttgaggtcttttgttttcgcctttagctttctaagctttcttacaatgtggactgattactgtaacatttcacgtgtaaaataactggatattctttatatactggaaataacctgtgaatccaatatttcactaagtgttttaacttttgtgtatatatctctcatcaataaatgtggatttcgaattt

SEQ ID NO: 349012 - DNA, 450 bp, Homo Sapiens
  misc_feature (92)..(186): n is a, c, g, or t
tatctctaacatgatctatatcctcccccccttaatatcttccagatatgactgcttcagatggattaaggtcaaactcaaatttactatcnnnnnnnnnnnnnnnnnnnnnnnnnnnnnnnnnnnnnnnnnnnnnnnnnnnnnnnnnnnnnnnnnnnnnnnnnnnnnnnnnnnnnnnnnnnnnnnaaaaaagaacacatactcagtctcacacacaatttctgggggctcacagaccctcttgaagcctatccataaaaccccctgcggaagtccccctgcccgatagcctgagggaagacatgtgagtggatatatgtgcactaacaggggcgaagacagacctggatggtctgcaatcccagagagcatgaggcaccatgtcccaaagcttggtatgtggccctggactcctcccccaattttatctctctgaagaagctgagtttt

SEQ ID NO: 349013 - DNA, 281 bp, Homo Sapiens
  misc_feature (95)..(186): n is a, c, g, or t
tatctctaacattatctatatcctccctcccttaatatcttccagatatgactgcttcagatggattaaggtcaaactcaaatttactatccctnnnnnnnnnnnnnnnnnnnnnnnnnnnnnnnnnnnnnnnnnnnnnnnnnnnnnnnnnnnnnnnnnnnnnnnnnnnnnnnnnnnnnnnnnnnnaaaaaagaacacatactcagtctcacacacaatttctgggggctcacagaccctcttgaagcctatccataaaccccctggtaatgttagagata

SEQ ID NO: 349014 - DNA, 530 bp, Homo Sapiens
caaaacctattttggcacaaccacatttgttcattatacaaaattagcttcctatgctttagaaaaaatgtgagttattactctgaaagttgtgattctgattcctcatggtttggagctcagaaatttcttaacatgtctttgctgttagtcaagcacaggatttgttttctgcaaaagtttattttcaatgaagaatacttgtcctaatagctcataaaaagtacctttgccactttaaaccctaggaatagggaacaaggaaacttactgggaagttcaaaagaaagaataacaggaccttctagtcagcagggcatgtttggaaaatgttaatacgccatgatttttgaagaccaattttagttcaggaggtggttttaaatattggatgaaaacttacaggctgttttcaatattcatttctgaaatactttagtatgatagataaatttggttaagttcttgttcattgtgaaatactgttggaagaatttttttcaaaataaagacttctgaatttgtgtacc

SEQ ID NO: 349015 - DNA, 1049 bp, Homo Sapiens
  misc_feature (109)..(136): n is a, c, g, or t
  misc_feature (149)..(245): n is a, c, g, or t
  misc_feature (280)..(401): n is a, c, g, or t
  misc_feature (537)..(558): n is a, c, g, or t
cttaatttaattagccaaatcagacttaacttccgtcagaacatgtcttggttttaattcagataaacacacaaacatacttctctggcacagccttcagaagcatcannnnnnnnnnnnnnnnnnnnnnnnnnnngagacagggtctnnnnnnnnnnnnnnnnnnnnnnnnnnnnnnnnnnnnnnnnnnnnnnnnnnnnnnnnnnnnnnnnnnnnnnnnnnnnnnnnnnnnnnnnnnnnnnnnngtagctgggtctataggcgcgtgccaccaccatgnnnnnnnnnnnnnnnnnnnnnnnnnnnnnnnnnnnnnnnnnnnnnnnnnnnnnnnnnnnnnnnnnnnnnnnnnnnnnnnnnnnnnnnnnnnnnnnnnnnnnnnnnnnnnnnnnnnnnnnnnnctgagctactgccccctaccctctttgcgtcttaggagtcatttagattttttttgatccttttgtttagtgcctctggagctgcttacaccaaggcaatacgccttgatatactggatggttgaaggcagcctgnnnnnnnnnnnnnnnnnnnnnnggaggatagggagtatggctgttgtgaaaagggaggtaaagagaaatggtagatctgaagaggcctcatcagagcacatattttaggacaacacatatggaaattggacatctttaagttggtttccatagagctatgcatgtatccttacccccatgggaaaatgttggtgtgttctcaagggtatgcatgtgtcattttgaagaccaaggccctagaattgtcaaacttaaggatcataaaaatcatgagggttgcttgttaaaaatgtccaaacgtgcagagactgatctttgagatctggaccaggaatttgcatttgaacaagtgttcctggaatctctatgcaagttttatacagaacatacttttggaatccttgccctagacaggggtgtccaatcttttggcttccctgggccacattggaagaagaattgtcttggaccacacataaaatacactaacactaacaatagctgatgagctaa

SEQ ID NO: 349016 - DNA, 847 bp, Homo Sapiens
  misc_feature (288)..(308): n is a, c, g, or t
tgtgaccggtccggaattctcgggatcaataaacccaataaaaataactgcttttcagaaattaactcctcctctaattataaagcagaaggaaaggaccttattttttaaaaaggggttgggggagacccaaagggtacaataattagggctaagtacagaaaatggcaattccaaatctaaactccagtttctccacatggtcctaggtaaacaaagctttagaacaagcttgaccaacccacggcccaatataaattcgtaaactttcttaaaacataaagagannnnnnnnnnnnnnnnnnnnncccttagctcatcagctatcattagtgttagtgtattttatgtgtggcctaaggcaattcttcttccaatgtggcccagggaagccaaaagattggacaccccgctataaactactatgttttctcttgactcatgtctgcctatacctcttcctttattgccaaaccacactatatacactctcaccctggccctcctttctaatcttcactcgtcatccagctcatttttactcaaacttcaggttcaggtggggctaagaggggctttgggaaaccaggggactctccagagcacttgacctcctactgcactcatctgcaactacagagctgagtcttgcttattcctggtaaccatcaagagaaatgcttcttaaaccagagcagagggctggcagaatctcccatggatcagtgtttatgccctagttttgctcaaagtctgcatgtcaaaatgtcatttcatgactgttcctttatgctagctttgagtgccaaaccctacctcatgcccatgttcttgaattttgttgctg

SEQ ID NO: 349017 - DNA, 763 bp, Homo Sapiens
cacgagcaggaatgttttaggcagaaaactggttttaccctgttgataatcagaaggagtgtgctttaggatttattgcataatactattctttaattgcaatcctaggtatctatagcatgagtggccttagtgagtttgttgaagtgcacatgtttttcaagagtaaaatttaagattaaaaatatatcctatatatagatatctagaaaacttggtttgtggtgcacagttaagtgttggatcactaaataaccattgcaggtaccgtttgtgtaacattactcatttctgtatattccttttatgggaagatattttgccatggtaactaaaacttttcagttctacttttatgatgtgaatgaatgctacgttttattaaatattaccaggtcagtactatttttatactttattaagcaacaggggattttagtttaataggctcaaaataaaaagttcttaatggaacagttaaaaacaaaacactaacaatctttacgtgaaaatccccactaatagtgccacaataatttctatagaaatatctaaggtcattaaatagatttttgaagacggttcttcattgtgtcaggatgacctttcatatcattctcaccaacttgtagtgcccaccgttatttgtaactattaaaccatactaagtatgtttgtaaccagcattgtgatatattctgtacttgtattgctaaaaatgaattattgacctaataaatatagtgttcctgcattcatagtg

SEQ ID NO: 349018 - DNA, 1193 bp, Homo Sapiens
attgagacaggcacctctaagaaaagcccagagtgccactggtcaaagcaccctgtattattccttgttaccattattgctccctgaagagggctctcatgtatctatgtaggataatccaacctcaacacagcggctgaaagaatctgctaaaaaataattcagtgccccaaaatacactgggctccaaataaactaaagagcaaaaattggctcatgtggcatgaaacaagtaatcgtatcccaagtaagaggacagtttccttcgtgttatcaacaggactgtaccccataagtttccaggtacatttggtaagagatggtgttttaacacgattttctgttgcaacagagtatcagaaaaatgcacagattgagaagctccggagtgagatcgtcgtattgaaggaagagctgcagctcaccaggtctgagctagaggctgcacaccatgccagtgcagtcagattctccaaggaatatgaaatgcagaaaacaaaagaggaagactttttgaagttatttgacaggtggaaagaagaagaaaaggagaaactagttgatgaaatggaaaaagtcaaggagatgtttatgaaggaatttaaagaattaacttcgaagaattcagcattagaatatcaactgtcagaaatccagaagtccaatatgcagatcaagtccaacataggcacattaaaagatgcacacgagtttaaagaagaccgttctccatatccccaggatttccataatgtcatgcagcttcttgatagtcaggaaagcaaatggacagctcgagttcaagctattcatcaagaacacaagaaagagaagggtcggctcctgtcacatatagagaaacttcgaacctcaatgatagatgatctaaatgcaagcaatgtttttctataagaaaaggatagaagagctagggcagagactccaggagcagaatgagctgatttataactcagagacagcagattaaagactttacctgtaatccattaaacagtatcagtgaacccaaaggaaatcctttagcctggcaggcttttgaatctcagccagctgctccagctgtgcctatgaatgccccagccctgcacactttggaaactaaatcaagtctgccaatggtgcatggacaggcattctcgtcgcacctactggaaccaataggaagaactttc

SEQ ID NO: 349019 - DNA, 2365 bp, Homo Sapiens
  misc_feature (1194)..(1209): n is a, c, g, or t
tatagactcctgctgtcttcaagtacctgataaaactttaaccagggaagcattaaacacagtgcagcagcttttgcccaggcttctaagttcctgccggcagcatttatcaatgtaagaactaggatgcttcctgcagtggcactaccttcccctagagctggagcatgctgcttggccttaagccccagcatgatgaggcttccctcctgccaggtcagtaaaagttagagagctcagaattgggtcttgcctgggtgcaggtggcagggtttgctgaaacccctaaagagaagtcaccaagggaggcaggtaatgaatgtttccagaatcagtcggatactcatagcaatttctggctatctttcaaatgttgaatttctggatgctgagagggactttgatttgatatcattaaatccaggacagtcccaagaagtgcttggagtctcggctctgacagcccaagaagggaaataacttgtattaaggaacaactatgagccaggccctgagctgtctcttagataataaaacagatggggagtggaagagtcatttgcttcaagttatacagctaggaaatactcaagccaaatcttgaacgcagctccccctaattctgtggacaggcactttgtaccacacaccatggtccacctaaaaacagaaggataaaaagacttcaggttttcccactgtgtgctgaccatcccaatttatgaatcttcttcaaaatgacatttcacagttatagttagggctcagaaatggcattgaggtagccttatttctcccctttagcagatgctttaagtacacattgctgacttgagcccacccccaggagttaggagaacatttcctttttcatgccatcttccataaataaggtgtttcttggccttcaaagatatagaactttgcagcagtagtaaaagtgaagggtgttctgctctctactcaactttatttgaaaatgtctgcagcttcactcctgtagaaaaggaaatcttcatattttagtaaacttagccgccagtgtactctgtgaggatgtggcaattcaaagtccagtgaatctggactctcttactgattcctggttttagtgtgtgtgtcgggggagtgtgtacctatatataaaggacaagtgtgatatgtgtgtatatgtatatacatacatacatgtcnnnnnnnnnnnnnnnnatatttgagagctaaggaaaactcaaagcagccccttcattatcttgcgtactacttcaaagatttctgtcagccctaattacaagtgtcaccatatagttggggcttaggtacttgcttacaggaagagcaattccctagcaaaggtcattagctcctaaggcactgagtcaaagtgacagccctgaaggaaattgcactccagccctcctccaggatgtctaataagatgggaaacttggatgcccagccattttggtgacctgagagtctaactactccagttagacctaagggcacaaatgcagaattcatgaccttgtagttgtggcagggtctaggaagtcctctctccccaagtagaaaatattctcttgccattcctgaaattccacattcatataatggctgtgcaatacatgcttctcaataagaaaattaactgcatgtttactgtgtgctgatcacatcagatttttatgtttaaaaaaatctcattatggattgagtccagcccagctctaagagaaaaagaaggcccatatgggagacttcagtctcattattattgcctttatccagcagtgcttatgaagccccctaccctgtcccattccagaaaccataagactcaggcagttcttgattctggaggcctgcctggtaagataagatagtataatttggaactgagaacataccagaaacagcagaacgagggccagagcagaaaaatgaaaataagtggagacacttatggatacattggtgcaaaaaaagccacggagcccatactgggcttgatatgactttgaggggacagcagattaatacttaatgagggttaaacctgaccagtctttctacagtgacaggccacactgcatgaatggggagaaccaatgaatccattgtcctctgcctattttcctgtgcacagtcacattccctccttaggaatcttccccttccaccctttacattaaacaagggaacactgaatctttcaagggaattacacgtttgggttaatgtttcagtatatcattttcatactgtaaattattttgtaagagagatttactgctatcccaggatgttcggacttggtgcccctgtgcatttggaaatcaataaactattactggaaatgcca

SEQ ID NO: 349020 - DNA, 504 bp, Homo Sapiens
  misc_feature (18)..(18): n is a, c, g, or t
  misc_feature (31)..(31): n is a, c, g, or t
  misc_feature (44)..(44): n is a, c, g, or t
  misc_feature (99)..(99): n is a, c, g, or t
  misc_feature (297)..(312): n is a, c, g, or t
aagttaaaccccccgggnccccccaaaaggncggggcaccccangttcccccaacctaataagacacccccggaggagggctggagtgccaattccctncagggctgtcacttggactcaagtgccctaggaagcctaatgacctttgcctagggaaatggctccttccctgtaagcaaagtaccctaagcccccaactatatggtgacacttgtaattagggctgacagaaatctttgaagtagtacgcaagataatgaaggggctgctttgagttttccttagctctcaaatatnnnnnnnnnnnnnnnngacatgtatgtatgtatatacatatacacacatatcacacttgtcctttatatataggtacacactcccccgacacacacactaaaaccaggaatcagtaagagagtccagattcactggactttgaattgccacatcctcacagagtacactggcggctaagtttactaaaatatgaagatttccttttct

SEQ ID NO: 349021 - DNA, 760 bp, Homo Sapiens
ggagagggttgttactggtgaaagttaagagattcaatctagggaagtaggagactgaactctgacaaggttaggggcactgagaaccccaatttagcatcgatgcatctaccaggcaagaaaatttgcgttttgacccagaactcagtcatgatgctccgtagaggaggtggattcgaccagcagacagatgtccccaaagtcgagagagagctaagctgcctattttctctccaggtgaaagaccaagcctagagcaccccacttaagatgaccacccccagctctttcgaagagaaaatcccccgaagagacagcgtggtgccagcgtagcagcagctcggccggttactggaaacttcacctggcaacgcagccccttttacctgacggctgcgtcttctccttgcaatgggctcatccgaatccgacagggtcagggaggtggaaagggaagacgctggcgcggcagcagcggggatcccggggcatggtattgttttaggggtcgccgccgaggtccctcctgcccatcgttgagaactgccaccctgatcccagggctcggtggacacggcggcgggagcggagatgccgcctcgccgctgctgggcaccagggacggaggaccagaggcgcacctcggaaaggagtagctcagcgccttggcgcggagatttgcgggcactgatgatatctcgagcgctcgttcctccgcggtgacaatggataatgccaaacgcgcaagtgacggcgacag

SEQ ID NO: 349022 - DNA, 1236 bp, Homo Sapiens
gcaggggcacatagtagcctcaagaggaatacctcccataagggtcaataggatcaccgaagggcatcataacacttccatttgtctgggatgtagaatggttcaaaaatgtaaggaaatggtgtgtcatacccacatactcttgatataggagcctctaggttcaagaaacattcctcctgaactgtagagctgatttccgatgcaaagccgcctgtcaagggagcctcgtgactgattagcagtcgccctgttttgatcacagacttacaaattgtgtccacatcccaaggtattatagtcctcagatcaatgacttcacaagacactccaagcttttcttttgccatggaagctacctctcggatcacatgaacctgagtgccccaggcaactagagtaacatcactcccttcctgtatgacttcggcctgggacagtgggatgttgtatggttctatagggacttcttccgctgctgccctgtaaagtattttaggttcaaaaaatatacaaggatttttatcctctatgcatgacaaaagaagtcctttggcctggaaagggcttctgggtataaccaccttgattcctgggcaatgggcaaaaaatgcttcaggactctgagaatgatagagagccccatgaccaacacagccccaaggggaccggatagtgaggcttccacagttaaaaagatccccagagcgatagcgatacttggcagcttcattaacaatctgatcaaatgcagggaaaatataatctgcaaactgaatttccgcaatggcagtagctccagtgaccgcaattccgattccaaatccaacattccttgttcacacaatggggtattaaaaactctatcttttccatatttgtctcgcaagccaacagtgcatctaaagactccaccaaaggcaacatcttcaccaaatattactgcagtaggatctttcggccaatgagttatccaacggcacttcgttacagacatggaaaagattcattttctgagtttgcccgtactcccggggctccggatctggctggaaagtaaaatgagccacctgccgcctctgggccgcatcctcgacagtcgcggcggggtgcaaaaagccccgcgccagccccgcgccaggaagccgacgccagtgcccctcagcccctgccgccctgagcctgagtagccagccggcagccgccgctacaaccgccatccccgctcaccaccgg

SEQ ID NO: 349023 - DNA, 1171 bp, Homo Sapiens
  misc_feature (662)..(682): n is a, c, g, or t
  misc_feature (932)..(943): n is a, c, g, or t
  misc_feature (945)..(946): n is a, c, g, or t
  misc_feature (948)..(950): n is a, c, g, or t
  misc_feature (952)..(953): n is a, c, g, or t
  misc_feature (956)..(957): n is a, c, g, or t
  misc_feature (959)..(961): n is a, c, g, or t
  misc_feature (963)..(967): n is a, c, g, or t
  misc_feature (997)..(1015): n is a, c, g, or t
  misc_feature (1068)..(1100): n is a, c, g, or t
ggtccggaattcccgggattctctatcattctcagagtcctgaagcattttttgcccattgcccaggaatcaaggtggttatacccagaagccctttccaggccaaaggacttcttttgtcatgcatagaggataaaaatccttgtatattttttgaacctaaaatactttacagggcagcagcggaagaagtccctatagaaccatacaacatcccactgtcccaggccgaagtcatacaggaagggagtgatgttactctagttgcctggggcactcaggttcatgtgatccgagaggtagcttccatggcaaaagaaaagcttggagtgtcttgtgaagtcattgatctgaggactataataccttgggatgtggacacaatttgtaagtctgtgatcaaaacagggcgactgctaatcagtcacgaggctcccttgacaggcggctttgcatcggaaatcagctctacagttcaggaggaatgtttcttgaacctagaggctcctatatcaagagtatgtggttatgacacaccatttcctcacatttttgaaccattctacatcccagacaaatggaagtgttatgatgcccttcgaaaaatgatcaactattgaccatatagaaaagctggaagattatgactagatatggaaatnnnnnnnnnnnnnnnnnnnnnatatttcctccgacttacctctttttgaaaagagagtttttattaaatgaaccatcatgatattggctgaaaagttctacattctattattgtattgtaacacacatgtattgatgattttcattaagagtttcagattaactttgaaaaatattccacatggtaatcttataaattctgtttaattacatctgtaaatattatgtgtgtgatagtattcaataaagtaaaatcaaattgtctttggaannnnnnnnnnnncnnannncnncannannncnnnnntaaacacaacccccggaacaaacaacaacnnnnnnnnnnnnnnnnnnnttgtgggccggcccccgcccctccaaaaaaatttttttacaccatttgttttnnnnnnnnnnnnnnnnnnnnnnnnnnnnnnnnnaaaacagggcccataaacctgtttttccatagaaaaaacctgggggccttgaaaaaaggggcttgggaatt

SEQ ID NO: 349024 - DNA, 1930 bp, Homo Sapiens
  misc_feature (69)..(69): n is a, c, g, or t
  misc_feature (1176)..(1176): n is a, c, g, or t
  misc_feature (1872)..(1872): n is a, c, g, or t
  misc_feature (1887)..(1887): n is a, c, g, or t
caggcatagtgccaacattgctgttcttcatgttggccctcagaccacatgctctgccaaagaatgtangggagggctgtcactgtaagtgagtgcactgggccctgaagtgagcagagagaggaggcaatgcccttgctcatgatgctgggagagggggtatggagaaggcctgggctgcatgctagagactccttgcccatttggagatgtgtctgttgctctctactttccaaggcaccaagtgctggtccctcagcttctggctgcattgtccccagagtcacaactgcatccatgcaagggccaggaaggacagtccatggaccagaggcctgctccagccaccttcacagaggggcgatgatgtatcctgtgggtacagtgggggatgaggagtggcagatgtcagaatttcaaactcagagggcttggccagaaaggaaatttgctgaaaagtcagtactttagagcctgagactaggcctgctggaggctgacctcctaacatttccctgcctgttccctacttcttgtcccatcccctggcctgtagtggaaaggactattgccttggtctccaaggcacatccccacacagacctggtcctgggtggccagaggtgttagatgatggcttccctcagcccttgctcagatggctgcattcagcccatacctgatctttgggatgaggcaggtattccatgggtggggtgaggccaagtcccagaaaggcaagggtgttaagtccaacacaaaggttggcagcttcctgtcccatccatagctaccagaggtgagcgaggagccctctctgaaggggtgtgtagatcttatagaaaagcatgagaaatgcggacccctgagaaatgcatggtgcaaaccagagcactctggacgaaggtcaggccttgaagggtcaggcaggtactgcctgccgcactcctggctcaatggtaaaaaagctgatgagcagcgggacgcttgggctttggagaagggggtgagcagggagcataggtcctggggacagatgcagagagggtcacacaggaccttctgtaagatttgctattgagaaacttcacaagaaacttagcttgaagccactgtttatatgaacagttccagatgaccactgtcaactgttctcaccacaagtgccaaaggccnagctcttcctgagcatccattgaccccctagctccagcccagatctcctggctcacagtcctttgagcctcctagccacagaggagaggcatgaaacaggtgcagtcaagagctggggtccctcgggcacagcctggctctgctcttgcctctgcctctctggctgtggatgccgcccagctctgcccttgcgtggtgccctctgggaaagggctgtcagatgcctctggctcagggttggggtaggaagggaaaatgacagacagacagatatcctacagcaaaccttcagaatgtccatacacacacatcctgtgcaggctcctaccattgcgtctgctctggggattcctttttacctgctatcctggacagagaaaactgcagggtatgtgggggccttttactgcctgccctgcagcctggcacgctcaggcaacaattctggcaggtcctcactagcttgtgcagaagtcagctagaagtgctcctgaaggagaggttctgaggcaaaaagaactccaagcaagagggtcaagcatttaaaatggatgaaatcgtgcaaagaggctgcgagctgtgcatgctccactgcaggacaggcggtgactcacctggcagcagcgagtcctgccacaggtcaaacatgccacagactgagaatttcacacacacaatgggagcaggggtggggtngggaggggtgggggntttatgagtgtatctatccagtttcttcaattgcatgtttgca

SEQ ID NO: 349025 - DNA, 757 bp, Homo Sapiens
  misc_feature (488)..(505): n is a, c, g, or t
ccttatacattttctttctctactttaattctccttcctccttactgtagatcccaagcttctagcttaggtttgcaagtcatattgcttggccctccacattcactgagaggtgaagataggctgaccccctgtcctcttacatttgagggatcatagactgctgtgtgaattctggaaagtctcaggtccctaccagggcactgaatggcttctcaatggctgtagagacagtacagttttccaaagcagcctaattcatctggacagctaccaggcactttggaaagttggttcagttactactatgaggccataatatatttgctggtattaaaattcttcagaattggaattactatttgaaataatattttggttgacttaagttttgagagacaattctaaaattgatctagagactcattcaatagcaatgtgaccttttaaatacttacattaagtaaaactgccagtagattaaatcnnnnnnnnnnnnnnnnnngtaagagcttcctctatttactactgttgaacttcagtaatttttagaggctaaataatggtcagaatgtttttaagtgtgctcttttattacatgcttgtgcaggttttgtaattcagtacagaaaagtttaaccttgtacatttttgtatgtaaaaagtcttttaagtagtcttatccttatttaaataaacagaataaaattaccttgagtaggtctgttaatcttattaaaatggaaaaatgctctgt

SEQ ID NO: 349026 - DNA, 490 bp, Homo Sapiens
agaggccaaaaaataattttattaaaaatatacacagaaatacaatagaaatatttccagccaccaataaaacaaatgttcattaaggatagagataaagttactgatccctatttagctgtttaaattcacacaaaaaaatttagtaaaagtaattttcttgaaacagcagcaaataataaactttccttgggaaaacatttttcaaacaacatttaaaaatattctgatgatttgccttttatattgagtttaataatgaagcatattcatcttatttgtcaaaagttactcctccagtctgcattcactgttttgaattttttaatatgcacaggccataatctcttttgaatagtttcatttcatgctcactactgttggcactaaattgtaattttttacacttataattattttatatgtcaaacaatattgagatggatgatcaagtttattcacaaatgattttgaatatatttctttaaac

SEQ ID NO: 349027 - DNA, 971 bp, Homo Sapiens
tttagctaaaaattgttttaaaatcgcgcttcttcattttatggaacacaattgtgaaccacaactgagtctgaatgtaggatctccagaacgcaaatcagagaaaaatttgagatttattcagatttttctattagattgagccactaatgttcggtaaggggcacttgatggttaaaaaacacaactggcatgataaaactacactaaataatatctacttttttgaacagtcatatcaagaatggccctaaatttaatcaaggactaaatttaatgaaagactctgacattaaagactctggattgtttgaaggtattttgcctgcaggtgagactggttttgagggcacaagaaacgtagcctgaatgaaccattcagagactcatcatgcatccacactggaacacgtttcatgcttacaaacataaatgtttttttaaatgcaacaggctcagttttctcacattggtgcatctcttcatgctagaactgctttatgtctacagagtccctgaagaagcaaaaatcctttttttagcattaaacatagcatatggagttcttcctcagctcttggcctatcgttgtatctacaaaccagagttcttcataaaaacaaaggcagaagaaaaagtggaataaaaatattacttcatgttcctcctttctaaattactaacttttgttatactggtactgatattttgtcccatttcactctcttctcatacgtgagtacttaagaatatgtacattcttgctctgcactgtatgtgtgagctatatggtattgtgtaaattttttttgaaggaaaatggaaattcttgagaaacagtttgtttaaagaaatatattcacaaaatcatttgtgaataaacttgatcatccatctcaatattgtttgaccggacgcgtgggtccgaacgcgtgggtcgacgatatcccggaattccggccgtaccagcc

SEQ ID NO: 349028 - DNA, 748 bp, Homo Sapiens
ggggaaggagccggaggggcgcacacttggagctgaagccctctccagggctccgggccggtgccccaacggacagaggtcgaggaggacccgcagaggtggcagcggccgggggcaggaggatggtgcagaaggagagtcaagcgacgttggaggagcgggagagcgagctcagctccaaccctgccgcctctgcgggggcatcgctggagccgccggcagctccggcacccggagaagacaaccccgccggggctggggggagcggcggtggccggggctgcaggaggggctcggcggttcctctgcggtgtggtggaaggattttatggaagaccttgggttatggaacagagaaaagaactctttagaaggctccagaaatgggaattaaatacatacttgtatgccccaaaagatgactacaaacataggatgttttggcgagagatgtattcagtggaggaagctgagcaacttatgactctcatctctgctgcacgagaatatgagatagagttcatctatgcgatctcacctggattggatatcactttttctaaccccaaggaagtatccacattgaaacgtaaattggaccaggtttctcagtttgggtgcagatcatttgctttgctttttgatgatatagaccataatatgtgtgcagcagacaaagaggtattcagttagtttgctcatgcccaagtgctccatcacaaatgaaatctatcagtacctaggcccc

SEQ ID NO: 349029 - DNA, 506 bp, Homo Sapiens
cggacgcttgggacatgaaaacaagataattgatgaaaaatctagataccaagtagagaagccatcaactccttctttacccaggatgctatattccaagatttaggctctcaaggcaggagcataatagatacctatttcaaggaagaggtgtgtatatgggaatgagggatatagaattaatttctagatatggacatttagaagcttgtgtgaaaacattacaggtctctacccaattatttctaagacctgtgaacaagtaaactctacttagtaacacaaacctcactctctacttttaaagcctcactttaacatatagattgctaagtatcccagggaatttgagatattcctttaatgtaagacaaaggaaaatgggaaaatcaggaataataactcagaagaaattgaaacattcacaatacagttagcaaaagaaaaactttttaaaaagcaataactgatatgctcagaggaaaaataaaagacacaggaaagat

SEQ ID NO: 349030 - DNA, 2401 bp, Homo Sapiens
  misc_feature (18)..(18): n is a, c, g, or t
  misc_feature (50)..(50): n is a, c, g, or t
  misc_feature (906)..(923): n is a, c, g, or t
  misc_feature (1011)..(1026): n is a, c, g, or t
  misc_feature (1154)..(1263): n is a, c, g, or t
  misc_feature (1286)..(1361): n is a, c, g, or t
  misc_feature (1392)..(1411): n is a, c, g, or t
  misc_feature (1732)..(1732): n is a, c, g, or t
  misc_feature (1753)..(1753): n is a, c, g, or t
  misc_feature (1816)..(1816): n is a, c, g, or t
  misc_feature (1839)..(1839): n is a, c, g, or t
  misc_feature (1885)..(1885): n is a, c, g, or t
  misc_feature (1899)..(1908): n is a, c, g, or t
  misc_feature (1923)..(1923): n is a, c, g, or t
  misc_feature (1950)..(1950): n is a, c, g, or t
  misc_feature (1993)..(1993): n is a, c, g, or t
  misc_feature (2127)..(2135): n is a, c, g, or t
  misc_feature (2137)..(2137): n is a, c, g, or t
  misc_feature (2160)..(2160): n is a, c, g, or t
  misc_feature (2171)..(2171): n is a, c, g, or t
  misc_feature (2204)..(2204): n is a, c, g, or t
  misc_feature (2234)..(2245): n is a, c, g, or t
  misc_feature (2265)..(2266): n is a, c, g, or t
  misc_feature (2292)..(2292): n is a, c, g, or t
tttacacccctccctttnttctgtacaggagagagacatattgcctctgnctggacaccctgatcctccaaatatataaccactgtgcataatctttctctcagtgttttataggagtactaacatttattgctctgtcaataatgaaaggctcgatgtaatatagctgtaatttactttccatatgaatacagtggctaggttcataaaagagaattgtgtgagtctgggattaccacatctaaaacattattctttaatgggataatacaattcattgagcagctaccacttaaaaaacttgcaggacagttagagcctgcatttctagttaagatggatcttgtaaatttaaaattggattaacattggagtgctggggtggctgcaataatttgggggctaactccatttggtttccaagatctcacttctgcattatctttatggctctttaaaccagccacctagccaatcaagggcaattcccatctcatccatcactcaggtctttgtaaagggtgcagccaagctctgcagacttttgcaggattgtctagcctgagtaccgggctacttcttaaatgccgtcactcctgctgagataaatgcgtctttaaaaatagtctctgtggcaggtcactgggggacaatgtacagcattctggccatccacttctttttcacttcatgttctaccccaagagactcccgatgtcggctgtggagggttaaagggatgaggctttcctttgtttagcaaatctgttcacagttcttgatgatgtattttatgatgcccagcttggaaatagttgctttccatagtctcaactgtattgtgtcatctcctgatgctgatttttgatcttttgttttattaaaaataattagtgaaagaaccannnnnnnnnnnnnnnnnnttttatattttttttatatacccacccacattattccacattttgaagctagcctccccacactccatccctgcctcgtctttacctnnnnnnnnnnnnnnnntgtcttgctcttaccgcccccctcttcccccttcctttgtctcaccccgcgctcttcccatatcgtcaaccgctcatccccctaggatcgggaaagagtcgtgatgtaggccccctccgattcgctgnnnnnnnnnnnnnnnnnnnnnnnnnnnnnnnnnnnnnnnnnnnnnnnnnnnnnnnnnnnnnnnnnnnnnnnnnnnnnnnnnnnnnnnnnnnnnnnnnnnnnnnnnnnnnngttcatctccgttgttctcgagnnnnnnnnnnnnnnnnnnnnnnnnnnnnnnnnnnnnnnnnnnnnnnnnnnnnnnnnnnnnnnnnnnnnnnnnnnnngccccccctcatctatccaccactcaattannnnnnnnnnnnnnnnnnnnaccactatgtatacccccgcccctaatctccgccccctctctattccacatacgctcgatacacattatcctcttgccgaccctcacactcttccacacatgtcacgatagcgtgctattaacatacgcgcccccctctcttctctctattcacaccactcctgcccaccctgtctctcactagcatgtatctgcgctgtctattcggctcacgcacgccgatatctacagacctgtgtgatccgctgtctgactcttccacgtcgctcccgccatctctttttctattatatctgctccgttccattcaccgctctctcnttgtagtctactgtctgcctntccccactcaccgcgcgcgttatgccctcacacaacccgctcacattattattaaacgtgttnatatccgtcacccacaccgcacncacgctcgctgtatgatatatcttttgttccgccctatccgcccgncctccttatgctcnnnnnnnnnngtctcgccacctccnccctcccgcttacgcttgtactatttntgtctccccgccctccagccgggcccacgactctcatcacatncccttttcatctactacttaatactctcccacccgccctctccttcctcatatatgttctataattgaggacctccaacactaccgacactagtgcgtcgatactactacccagaacccgcataacggcgaagnnnnnnnnngnctcctgccccgcccctaccccgncgatttccgcncggtaatgtaattgccgacctgctcccgcgtgnactgtcttttgtactctctcctcataccannnnnnnnnnnngccgcccaatatggatcacnnccgacttcatacgcggccgtcatctntacggcgctaaatcgataccacccacgcgcaccggccggtacatttgcttccgcccccaacctcgtaacccatttttccaccggcttaccgccatagaccctgattcga

SEQ ID NO: 349031 - DNA, 269 bp, Homo Sapiens
tagcaaatctgttcacagttcttgatgatgtattttatgatgcccagcttggaaatagttgctttccatagtctcaactgtattgtgtcatcccctgatgctgatttttgatcttttgttttattaaaaataattagtgaaagaggtgtgcctatctgtgaagtttgtagtacatcatcctgaggtcatgtaacaagtaaaccccaacccagcgttccctcctacgttgtgttagttcattaaaactaaataataaaaataactgtaag

SEQ ID NO: 349032 - DNA, 1930 bp, Homo Sapiens
gggaggatgaattaacaaactcacattgtgcagtccgcttaatccaggcacttttctttgtgcaggtgtagtgagtagttacttctctcccttacacagatgacttgtgaaactcaagctcaccatcttcagtgctggcattttactttgccactacccaaaaacaatgtgagatgtgttcagtggcctctggtactctttgcaggcaagaatcaaacaacatggggactgagggaaggatggggaagtgtagccacagttcttccaaatgtaaatactttttgtttgttctagtggtaaaatgcaaatgcaatccatatttgttaggatggtcaggtctcatgagaaatctatgctatgtgtccagagcttttgaaacagagtccattggagtgggagttagggagtgtagtggatgccaaatatgtttttcttcagtgcttaagagaactgtttcctgaagtccagctttgaacataaacaggggtgtgggttgggggaggagcttaggacaaacctctctgatgaaggtcagcaatagactgaagtcttgactgcatggaagaggaaaaacatcagaactgtctgacaatggaggggacagtgagctacgcacaactgccagcggaggtgaacttgcacctgcccaggccggatgaacatcagcctgcaagaactagttgtttgagttgatttgcagtgctctcaatgggcaagtgccacattttccctggcagagatctccaaaaatttaaaacagaataataatggctatatcgagtgttttctcagtattggagaaatgcttaggtcctatgatagcttcgggacatctttctgtaattttcctcaattaacgggttggtaggggtaaatcttatgacacctttccaccgtcgatttgagatcagttttaatggttaaaatgtttactctccttctgtcaaccctcacctttttatttacacccctccctttttttctgtacagggagagaagacatattgactctgactggacaccctgattcctccaaatatatataccactgtgtattaatctttctctcagtgttttataggagtactaacatttattgctctgtcaataatgaaaggctcgatgtaatatagctgtaatttactttccatatgaatacagtggctaggttcataaaagagaattgtgtgagtctgggattaccacatctaaaacattattctttaatgggataatacaattcattgagcagctaccacttaaaaaacttgcaggacagttagagcctgcatttctagttaagatggatcttgtaaatttaaaattggattaacattggacgtgctggggtggctgcaataatttgggggctaactccatttggtttccaagatctcacttctgcattatctttatggctctttaaaccagccacctagccaatcaagggcaattcccatctcatccaccactcaagtctttgtaaagggtggcagccaagctctgcagacttttgcaggattgtctaacctgaataccgggcttacttctttaaatgccgtcactcctgctgagaaaaatgccgtcctttaaaaaatagttctctgtgggcagggccacctgggggaacaaagtacaacaattcctggcccatccactttcctttttcacttccatggttcctaaccccaaagaagaactccccggatgttccggcttgttgggaagggtttaaaaggggaatgaagggctttttcccttttggttttaaaccaaaatcctggttccacaaggtttcctttggaatgaaagggaaattttttaaatgaaagggccccaaagcttttggggaaaataaatttgggcctttttcccaataaaaatctctcaaaaacgggaaatttgggggggtccaatccttccctggaaa

SEQ ID NO: 349033 - DNA, 681 bp, Homo Sapiens
tcaatcgagctcgccaccgttatacagaggctaggttcataaaagagaatgtgtgagtctgggattaccacatctaaaacattattctttaatgggataatacaattcattgagcagctaccacttaaaaaacttgcaggacagttagagcctgcatttctagttaagatggatcttgtaaatttaaaattggattaacattggagtgctggggtggctgcaataatttgggggctaactccatttggtttccaagatctcacttctgcattatctttatggctctttaaaccagccacctagccaatcaagggcaattcccatctcatccatcactcaggtctttgtaaagggtgcagccaagctctgcagacttttgcaggattgtctagcctgagtaccgggctacttcttaaatgccgtcactcctgctgagataaatgcgtctttaaaaatagtctctgtggcaggtcactgggggacaatgtacagcattctggccatccacttctttttcacttcatgttctaccccaagagactcccgatgtcggctgtggagggttaaagggatgaggctttcctttgtttagcaaatctgttcacagttcttgatgatgtattttatgatgcccagttggaaatagttgcttccatagctctgttcggggatcctagagtc

SEQ ID NO: 349034 - DNA, 1546 bp, Homo Sapiens
  misc_feature (178)..(190): n is a, c, g, or t
  misc_feature (203)..(233): n is a, c, g, or t
cctaattaagagaatttttactggctgcttgttacatttgttgagggtacaacacactcaagaataaagtaaaaggatagtcaggatccagatgtttcttttctagcatttaatgtgtgtgaactcagaacactaccatgaaagaacacttccccccaaaactggatgcagaggaagnnnnnnnnnnnnngaaatggcacagnnnnnnnnnnnnnnnnnnnnnnnnnnnnnnngttgttgttgtttgtattgtttctcttttctgatagagtatggccacttctgggggaaaaacatgtaattaagtaaatgtatacattggttttcacgttttacttttgttttcccactaccaataattttcctctggaagaattttatagttttttctatttcattttaatgagtaacaatatgttaaatgcataattaagacaaagcaatgaaattctgactttattcaaagtactgaagattattgcttctagggcatttttaaacagcaccattgtattgttgaatgtttatgtaactgatggcttttctataatgtaatttttgaatgttcaggtgttacatttccaaagtttaacttttaaaaaaccatcttctgatcccttttattgtctgggccatacaatctatattacataggtgccaacatttaattcttttaaatggaacatttgcagttttccatattggtacctgctttttctggagagggttgagatcttgttaacaaatcagactttacactatatacagatgtgacagataaattgaaccacttgtttgtgaaaatgagttcctgtcatcttcctcattcactcagccctcaccccagcagccttttccggtcattgtagctgacatggagcagtgacagtattcatttgagaacagggatgcaagtcacagacatcataaaatcagggtctccctgctgaagcattcactagttggcaactatgaatttattccatgtcattctgtttacttagcacttgcactacccttgttggttgagtgtatgctttatttgtttctagtttgaaatcccacatctgatagctgagagtaggcaaatacaacatttacctaatgtcattcactaacatggaagagttgtgaaaattctagagtgctgtaaatccttggcatacactatgacaaacaacttcattactctcccaccaggagctgctctcctgcacttagaaataatgtcacaagtagttttctaatgtacaatgcagacaaatgtactgctctctgaatacttgaagaaatggtattatacatacatagaaacttattagttataccttttcacaatcttattacgatgttgccgttaaaagggaaaaaagacacaggcaatgaatggtgggatagtaagaggacttagagtgtatgaatgagttgattttacttttttggaatttgattaagttgacagtaggcactgattggatgattaaacataagttaatctccactgtgataaaaacttaaataataaacatgatttaaaatagaaaaa

SEQ ID NO: 349035 - DNA, 892 bp, Homo Sapiens
aacccaagaagtcttttttcacatttatattcccaacacaccaaggaaggggtcctcccctacaataaaagatagtgtaccatttgttttcaagcagtaatttaaaccaccccgtgtgaatttaccttggaaaaggggcatgcctccccaaactgtgtgtagtcgtaacttctcaacaattctagcaccatgtcggacacgttaccccatccaccttcatagctctgctctcagagctaggcacatgggcacaggtcccctaccgtctgtcctctcccagcaactgtgccctgaagggctccacatggccaccgtgtctctcgggcaccaccaagataacagtcccagaggacccatctgtaaaaaatcgagcttgtgtggtggtgtaatggtcacatctcccgcttccccccatcctgtgtctgggcacagttcacatcagaacagcgtccattgtgctactcagtctgcctcaggtgtgtgcctggagggggcctggactggcatggatccagtgtgcaaaagagccagcagggaaccggaagctctaatgtcaaggccagagcagttgagaatgggacccagagtagatgctgacctgggcactccaccattccggggccaccacagagatgccagcaggatgccactttgccagcccgacacacggacctttgtaaagaacagcaacaggcaggagaggcagcgtgtgaccagattgtgtcccgtcattgggtggcatatgttaactagctgccaaacaacttcaacccgtgtaattcatgtacatttgcaacagccagcccggtacagcctgtgtacttctctgtatgtgtgtgtgtgtcgtgaccagcctaagaagtagcaaaccaagatgctatggcagcaccca

SEQ ID NO: 349036 - DNA, 2152 bp, Homo Sapiens
  misc_feature (2011)..(2022): n is a, c, g, or t
ggtaccggtccggaattcccgggatgcggcggcggaggagagggagcagcgtcacgggcgcccggcccgttaaaacgctgctggctggagccacctccctccctgcagcccgcaacgggaatggagtaaagggagacccgtcgacctggccacggggatcagcgatggaattaaagcaatctttgtccacccatctggaagccgagaagcctctgaggcgctatggggcggtggaggagacggcttggaaaacggagagactggggagaaatcagctggacatcatctccatggcggagacaaccatgatgccagaggagattgagctggagatggcaaaaattcagcgtctccgggaagtcttggtccgccgggagtctgagctcaggttcatgatggatgacatccagctctgcaaggacatcatggacttgaagcaggagctgcagaacttggtcgccatcccagaaaaagaaaaaaccaaactgcagaagcagagagaggatgagctaatccagaagatccacaaactggtgcagaagagagacttcctggtggacgatgcggaggtcgagcggttaagggagcaagaagaagacaaggaaatggctgatttcctgagaatcaagttaaaacctctagacaaagtaaccaaatctccagccagctcccgggcagagaagaaagcagagcccccacctagcaagcccacggtggccaagacggggctggcactgatcaaggattgttgcggggccacccagtgcaacatcatgtagcccccacgtggggtgccctgggccatggggacccccccccaccctcttgtctttatagcccccatttcaccggggcccaagagctctccaaggcagaaggggttgaaggcaagcccgtgactgtcaccagaggccatgggcacggcaggcgggcctggccaccctgtacagagtgtagcagtagggagtctctcaccgtcgcatggtcctccccagagcatgccgaacccaggagtctgtctcactgtttatccaaacaccaggaaaggtcctccctcaaaaaagcatatctccacttctctctagctgtatctaacccaccgtgtgaatgaactgggagaggggcatgctccccagctgtgtgtagtcgtgacttctcaacaatctagcaccatgtcggacacgttccccatccaccctcctagctctgctctcagagctaggcacatgggcacaggtcccctcccgtctgtcctctcccagcaactgtgccctggagggctccacatggcccccgtgtctctcgggcaccacccatatagcagtcccagagggcccatctgtaaagatcgagcttgtgtgtggtgtcgtggtcacatctcccgcttccccccatcctgtgtctgggcacagttcacatcaggacagcgtccattgtgctctcagtctgcctcaggtgtgtgcctggagggggcctggactggcatggatccagtgtgcagaagagccagcagggaaccggaagctctgatgtcaaggccagagcagttgagaatgggacccagagtagatgctgacctgggcactccaccattccggggccaccacagagatgccagcaggatgccactttgccagcccgacacacggacctttgtaaagaacagcaacaggcaggagaggcagcgtgtgaccagattgtgtcccgtcattgggtggcatatgttaactagctgccaaacaacttcaacccgtgtaattcatgtacatttgcaacagccagcccggtacagcctgtgtgacttctctgtatgtgtgtgtgtgtcgtgaccagcctaagtagttagcataactcaagatgctgatgtgcagtcacccatcagagaaaataaaaatggaaaccacgttcacagcattttaaaagtttttactttttttcttgattatggaagtaatccatgtacatagtaaatcattttaaaagtacaaaaagtatgaagaagtttgtcttnnnnnnnnnnnncaattattcctccaactagagaccactctgatgtttcgacgttttaaaaaagtcttttttgtgcattttttcatcgtggacatcatattgtggtttatttataaccagttttgtcctacttatgatacac

SEQ ID NO: 349037 - DNA, 912 bp, Homo Sapiens
  misc_feature (659)..(667): n is a, c, g, or t
gctggaccggtccggattctcgggatcatctttgtcccccatctggaagccgagaagcctctgaggcgctatggggcggtggaggagacggcttggaaaacggagagactggggagaaatcagctggacatcatctccatggcggagacaaccatgatgccagaggagattgagctggagatggcaaaaattcagcgtctccgggaagtcttggtccgccgggagtctgagctcaggttcatgatggatgacatccagctctgcaaggacatcatggacttgaagcaggagctgcagaacttggtcgccatcccagaaaaagaaaaaaccaaactgcagaagcagagagaggatgagctaatccagaagatccacaaactggtgcagaagagagacttcctggtggacgatgcggaggtcgagcggttaagggagcaagaagaagacaaggaaatggctgatttcctgagaatcaagttaaaacctctagacaaagtaaccaaatctccagccagctcccgggcagagaagaaagcagagcccccacctagcaagcccacggtggccaagacggggctggcactgatcaaggattgttgcggggccacccagtgcaacatcatgtagcccccacgtggggtgccctgggccatggggannnnnnnnnaccctcttgtctttatagcccccatttcaccggggcccaagagctctccaaggcagaaggggttgaaggcaagcccgtgactgtcaccagaggccatgggcacggcaggcggggcctggccaccctgtacagagtgtagcagtaggggagtctctcacccgtcgcatggttcctcccccagaagcatgcccgaaacccaggaaagtctgttcctcacctggttttatcccaaaaccccccagggc

SEQ ID NO: 349038 - DNA, 567 bp, Homo Sapiens
  misc_feature (13)..(13): n is a, c, g, or t
  misc_feature (28)..(28): n is a, c, g, or t
accctggaagggncccctggactggcangggatcccaatgtgccagaaaaagcccagcagggaaaccggaaagcctctgaatgtccaaaggcccagaagcaagttgaagaaatggggacccccagagtaagatgctgacccctgggcactcccacccattcccggggcccacccacagagatgcccagcaggatgcccactttgcccagcccgacacacggacctttgtaaagaacagcaacaggcaggagaggcagcgtgtgaccagattgtgtcccgtcattgggtggcatatgttaactagctgcccaaacaacttcaacccgtgtaattcatgtacatttgcaacagccagcccggtacagcctgtgtgacttctctgtatgtgtgtgtgtgtcgtgaccagcctaagtagttagcataactcaagatgctgatgtgcagtcacccatcagagaaaataaaaatggaaaccacgttcacagcattttaaaagtttttactttttttcttgattatggaagtaatccatgtacatagtaaatcattttaaaagtacaaaaaaaa

SEQ ID NO: 349039 - DNA, 1626 bp, Homo Sapiens
gtacatgaacgatgtgtcaaactggaaattggtatagttggggcacacatgatagcaagcactgagcagcccctccatcatcagggctgtgcccatggcgtagaaaagcccaaagtgtttggggatcccacattccagggcacagaggtcattgcgcagcagggcccggttgtggttgatctcccgttgcaggatgatgagcaggaaaagcagccccagcaggatgtaccccaggttgctgaggatgttgttgaaggcgctgagattgcccagtgggtgggcgcagaggaagttgtagtagcagatgtcctgattccctgtgacattcaccaccgtctggtaggtgatcaccagctgcaccacaggaagggcatagaagacagcaatggtggcaatgttccagaagtagatctggtactttttccgcagaacacgcttgtccttccgtgccaggtcagccacatagaggtattgcttggtgcgaatgacattcttgtcggaatcgatgtcggtcaatgtgtcgtagtcatcctcctccacagagctcatggagtccactcggggccgagtacctacaggttcaaaggagcggccctggtaaccgtaagagaagtccccagtgccagcgctgtcaaccagaccatcggtagatccagaaacattctcaaaggagccatagttgtaaccctcataaggggaactgccaggaaaagaatcagccaggactcgagggtgaccgctttctgggcaggctcggtcaatggccaccagcagggtcttcttcttctgcctccagttctcccagcaggccaggaggacggtcagcaggtaaaaggagaagaaatatacccaggcaaaagagcattcccactgacgtatgcctcagacgtgactgcttgagacaccagcactaacagagttttctggcggtgcccttgatcgaccggttcatcttctgcgaaggggtagaaaggcagggagcccccgcaggcttggtcttcggtcttcaccaccaccaccacataaaagctgttgctggggaagtctttgcgctgtacggtgatggccgccttcttggtcatcgtctggtacatgccgatgaaggctacgttgttgtccaggtcatagacaggacacagcacatcctgaatggagatgactgagcaggggaaggccttgttggaggtcaccttgacaattaccgagtccacgccttcagggaactcatacttgaagtactggggctgtgctgctgtggtattgaagctgaactgctccccagtcctgagcacaaaatcgtccatgcggctgacccggagctggtatgtggtgttgactggtgacagggtggacacatccacgtagaagaactgaatctccgactcattcttggtggggggctgacacagggttcgttccactttttggtagaggtacttgcgctgaaacctggaaggacaccacagcctccttctggcggaccacaaacagcaacggcgcccccttctgcttgttcaggacgttcacagacacacgcacgccctctgtcctgttgcgggtcacagtatggttgaaggtgtagatgttgaccagctcgctgttgacctcgtccacgtaggtgcgctc

SEQ ID NO: 349040 - DNA, 514 bp, Homo Sapiens
ttttatttccagcttgaatgagtggggttgggggcggggtgggcagggttctaccacgtgtaggataatcattcattggtgtgtccaaaaatggggtctgctcctgctaccttgacccttccctttcctctgcttctctcctcatcatcattcccaacaacatcctctgccacacacaacaaaacgtaagtttcatttgggcaaaaattgagcctcacaataaacaccctgaagacacaacttgacttataacatagtgcacagcaagagctacatccaagtgtcctattatctgtgattattttcttaatgacaatgtacatatgcccccatccatgttaattattatctaattccattaggggttcacgtcttttctttctggggacactatcctactatatccatatctataggatttcaatataggatggattgtggccatcttctgtaggcccctccggttcttactcattccttcccaccatctggcaggggatttggaggtttgggg

SEQ ID NO: 349041 - DNA, 700 bp, Homo Sapiens
gggtattgccttttgtattttgttaaaccctgtgaagaccgttggcctttccacagaagttggaaagataattttgaaagatgcccaatgtcctgcctgatggtgtataaatgaatacagtgggagagatacaatatggttagagattcatgtggggatgaattgatagtgagtagtagggagagaatagaaaggagtgttagacaattacattgatagattgataaacagtaaatagattgctagagaggaagacaggtgggtagataattggatggtgagataaatcagatatttgagtagatgggtaactgtaccattactttgatagatagcttgacaaaacctaaataaatcagccacctatcaatcacgtttatgagttgaacttctctttttaaaatagaggttctatcttcaaaatgcctcccccttttttggtcacttgacttgcaaaatttagtgttgggtttcatgcatagccccaaacttcaaatctctgcagatggtggaaggaatgagtagagcggaggggctacagaagatggcacaatcatctatattgaaatctatagatatggatatagtaggatagtgtcccagaaagataagacgtgaaccctaatggaattagataataattaacatggatgggggcatatgtacattgtctattaagaaaataatcacagatgtacag

SEQ ID NO: 349042 - DNA, 3645 bp, Homo Sapiens
ggagctgtaacgtggctaataagttcgagcgccctggagctgcaattctgctctccgtaggctgatggcccgagcctggcagccccagctcgtgtgggaagtgtacggtgggaacacacctcactcctacctagtaccgggcaatgcgtctgcaagtcggggccctgctccctggcgggtgcctacagcaccaacaaggaggccccagcagaacccagcccctagaggcggctgtctgattccccactctccccacaacttctggagttcccagtgtttacccaaaaggctgtatccagaagctggggcggcaccacaatggctggccaccgtgggcctgtgcctttgcttcccaggtcctggaggaccgtggcagtgcttggctgtggagtgtgtgtaaaatctaaggcaagagtaccacgaggtcctgcggtgccagggagctcctggctgcagcctacctgcctggacacctgcttcggccacatcagtcaccctccaggaagcctggcccctcttgaaaagcccccacaacttgctcctaagagctgagctgcctccccgcgacccgggacacccagcgtggcatgtgcattcctcccccgttcagcctgtggtgtttcctcagcagcctgaccgcctcctcccccattctctcctgaccctctggctatctcgatagcaggtcacctgtgagtctttacactcaaaggaaatagaacagcagggaagggaactgaaaagcagtagaagaaacagtcagagatgcctcactgataggcaggaggccgaacaggtaaaccccagaagtggagattcccaaacggaaaattccagaaatgggcgctccagctctgtgctaagctggggacgagtgtgagtgtgtctgcttgtccaacatttgcacaggcagcaaggcaaagcaggtgtgctcccaaaggcggagtctgaggaggggccggcagcggcaaacggcagcatcaaacagaccactgctgccgcggcaacccagggcctcttcagagctttcaaggcgatggagcgaagaccaagggtgcacatgcatgcaggcaggctgggaaggaagagcgggtggaggaagactgaggggaggctgccaggagaccgccatctgggagcagggccaagagagaagctggcagcagttacacagcgcaaaataaaaggccttgggctggactcaggcggaaagaaagtgctggaggaaatgaaagaacaaagcgggctgtctgtgtgcccacgccgggccggtcactaccttttctgcctgacaagtgtacataaaacaattcccgaacagcacggagcatcagacacaactagaggtatggagggcaggaggtgggatgcggtggtgaggctggggctgggcagccggctttgtacaaggtggcacaaaagacgtacgcattccagttcttggaagctggcttccctcgagtctggagtgctgggtttgggagttttctattgcagtctttcaagtctgagttggaccccaggctggaggggctgggtccaccacccgcccgcagccaccctgcctcgggctacacgtcggtggagaagtacagtgtgttccgcttgagttctgcgaaggaaatgggggggtgctgcaggtagtagaggaggacctggacctgcgccatgacgtcatgggaccagatgtccgcagccgaggtgaggagtgctttgctctccacttctgagggtctcaggaacgtgggtccaaacacggtagccaggttgtgaagtgacattttgttgatgggctccttctcggcaacccttttcaagtgttccagcaggaagaggaaggtgatgaggttggggtcgggcagggagcggagcaggtgcatcatgcagttttccttggcagcagggtctgacagggcgatgccctccatgaaggctgggtagagtcggtccgtgaggagcggctcgggcagttcccggaagtacagcttgagcgtcccggcgatggcgttgatgtccatgtcactcagcatcagcaggatgtccttgttattggcatcgaagacggccttgagcgcctggatgtccgtggccacgcccgatatcctgtagatgccaacctcctcgatacccctcttctccacctcctccacacactgccggacgatgtagggcaccttggagcgctcccgcttcgtcaccacgctgatcttcacaccgaagacgccggtctgctttttggacggggtcctcttcaggctcatatctcggctggtgaatttcatggaaaattccactttgatcccgttcatctcaatcacgtccgtgtgccagttcttggtctccacggtttgtgggtccagctggatctgtcctttgcccatgatcttgtccacgatctcattgttgtccttgttgaccttggtcttgtcatagcacttctcatagcacaggatcctcagggactgggagccctccagctcgatctcaaactcctcatcccacttgggctccgctgtgtcccggaacaccctggttttggctttgctgacaaaatagccgaaggaatccacctccagggtacagtacaggctggctgattgcttaaatcccttggcagagtggacgatgacatgaaggaagccatagagtcctggagactcatcgtcgtctttattgctggtgacaggaatgttgtgtacagtcctaagcttgaaacaggatcctgtgagcacctggagctccactgagctcaggacaaaggcctggagatccttcttctgtagtttctgaattgcttctctccactatgacctctcgtagtccgaggccagtaggaacaggtaactctttccattccgattgtggatcctgaacgggattgtgggggagttgagcagcagcaggaactcattctcaaacatcttcttcttcaggcgctcgatggcccggctctggcctttgttggctttctccttctggatttcactcttgagggcagagatcttcatcttcatgtcctccagctcatggtctgggaaggggtgcacctgggggctggcctcagattcctcgggggatggaaaccaccaagtcggccagggggatgtaccacttacagtcatactgctggtgcttccctgcagaggtcttcttcagcttggcacacagtaggacatctgtaaagaggaagacgtgccgcagcttccgggagctctctgacacttccaccaaggaagccgtccttcaccagctgtcgcgtctcccccttgggcgttgtcactgcagtccggcgggggtcgatgtcctcgttgatgctggacaggaagttctgggagatgcggagggcatcctgcagcagcgggtagtcggggtggtccacaggtgtgtgcttcagcaggtcgtgtaggactagggtgctccgagtgacccggtcaatgggcttgtagagcagagcataggtgcagttacacgcagaagcgaataatgaggagaatctgccatggcagcctctgtccccgcggcgggagcgtgcagccatcgctccaggctccccggcgcccaccagcagcccggccactcagccaccttgctgatgctgccgcacggactccagcatcgggcagccgctccggagtgctcttccag

SEQ ID NO: 349043 - DNA, 1712 bp, Homo Sapiens
  misc_feature (652)..(690): n is a, c, g, or t
gctgggtggcgaattccgcacgaggctccaggtgacctgctatcgagatagccagagggtcaggagagaatgggggaggaggcggtcaggctgctgaggaaacaccacaggctgaacgggggaggaatgcacatgccacgctgggtgtcccgggtcgcggggaggcagctcagctcttaggagcaagttgtgggggcttttcaagaggggccaggcttcctggagggtgactgatgtggccgaagcaggtgtccaggcaggtaggctgcagccaggagctccctggcaccgcaggacctcgtggtactcttgccttagattttacacacactccacagccaagcactgccacggtcctccaggacctgggaagcaaaggcacaggcccacggtggccagccattgtggtgccgccccagcttctggatacagccttttgggtaaacactgggaactccagaagttgtggggagagtggggaatcagacagccgcctctaggggctgggttctgctggggcctccttgttggtgctgtaggcacccgccagggagcagggacccgacttgcagacgcattgcccggtactaggaaggagtgaggtgtgttcccaccgtacacttcccacacgagctgcggctgccagcctcgnnnnnnnnnnnnnnnnnnnnnnnnnnnnnnnnnnnnnnncgacttatagccagttacagctccccggctcttctgtgtggcagagcgtcgtttccgggccctcagggctggggagctcagttcccattgcttgtgctcagggctgagtcttaaagaagggtttgccggccctaacgctgcagcgcgtgcgcggttgagaggccctttttgagcctgtttactcctgtggccttgggcagaacagtaaatactctgtgcacggaggaaagacatgcccaagaggaaggaagtactgaccatcggctgcctgtgagcagcttagcaaggagcccttgctccctgggaaaggcggtgaacttgagtctaaagatgcagtgcctggcccttcctaaggtccctgcctggcatccgagtgtcggtgtgtggcacagaaggctcctgcttgcttccaaagtgatggacaggaaggggcagagtgagtcacggcccagactgggcaccttcacgtctcagcctcagggagccccacagccccaagctcgctgaggcaacgtgagaacaggctatgggaaggctgcaaaggctgagaaatgcaaaggctcatatttataaatcccacccccagagtggggagggtcaggtgccagacctggactaaactgcaccaaggaaacacccagcagggtctcctgtgagccggggaccatgcagcccgaaacctccagtcactgcgcccggcaggagtcaggagccagggactgtgcagcctggaacctccagtcactgtgcccagcagggtgggctgtgcccagcaggagtcaggctaagaaacgccaggtctgcctgttcttgctgggcaatggctgatggctgccagtttctgctgatacacaggtaggatgggacccttcatgaatatctgactttaataagttggtaaggatatatttttttgtctatgttctgtttcaacttatgtagattattataaattgatgtaaaccacgtgagaggaaaatgttaataaaaaatgcaaagccccatcatttgcacaaaactca

SEQ ID NO: 349044 - DNA, 1122 bp, Homo Sapiens
  misc_feature (471)..(509): n is a, c, g, or t
tggcgcttgaaaatagcgggtagggagccctggggattgtcgcccgcaccggggcgcttttgggaatgccaaggcaagggtacctttaaaaagggtccccgggccaatgaattttctaggagtccaagtgtcccgcgcgcttttcccaagggaggcaaggggttcccttattaaggggggttgacaaggcaggccggagggtcaagtaactgctttccttcttggggcatgtctttcctccggggccacaggagtattttcctgttttgccccagggccccaggaggtaaacaggctcaaaaaaggggcttttcacgggggcacgcggtgcagggttaggggcgggcaaaccttctttaagactcagccctgagcacaagcaatgggaactgagctccccagccctgagggcccggaaacgacgctctgccacacagaagagccggggagctgtaactggctataagtcgnnnnnnnnnnnnnnnnnnnnnnnnnnnnnnnnnnnnnnncgaggctggcagccgcagctcgtgtgggaagtgtacggtgggaacacacctcactccttcctagtaccgggcaatgcgtctgcaagtcgggtccctgctccctggcgggtgcctacagcaccaacaaggaggccccagcagaacccagcccctagaggcggctgtctgattccccactctccccacaacttctggagttcccagtgtttacccaaaaggctgtatccagaagctggggcggcaccacaatggctggccaccgtgggcctgtgcctttgcttcccaggtcctggaggaccgtggcagtgcttggctgtggagtgtgtgtaaaatctaaggcaagagtaccacgaggtcctgcggtgccagggagctgcctggctgcagcctacctgcctggacacctgcttcggccacatcagtcaccctccaggaagcctggcccctcttgaaaagcccccacaacttgctcctaagagctgagctgcctccccgcgacccgggacacccagcgtggcatgtgcattcctcccccgttcagcctgtggtgtttcctcagcagcctgaccgcctcctcccccattctctcctgacatcccgaaaattccggacc

SEQ ID NO: 349045 - DNA, 523 bp, Homo Sapiens
  misc_feature (68)..(68): n is a, c, g, or t
  misc_feature (82)..(82): n is a, c, g, or t
  misc_feature (99)..(99): n is a, c, g, or t
  misc_feature (105)..(105): n is a, c, g, or t
  misc_feature (160)..(160): n is a, c, g, or t
agggagggagggatgaatggagggagatgatgtgtaactttccatcagagatgggggaaagagaaacngaaaacacaaagcnaaagaggacaagaaggnagaggngaataaaaggaaaaacctcaaaaagtggaaagtgtgaagtaaagtgataggaatnaaattagatgtatctgtaaatataaaaaatgtaacttgattaaaataggctattagcaggaagtgtcacattggatgacttaaaaatctagttatattcttttacttaataaatctatatactataccaagagataagaacccatttaaataattgggaaaatgagattgctgtaaaatactagaaaaaatgggcagcatagccttattactaccagattcagcagctacagatgtgtcatatttcactgttccttctacttctcaggagtaatcactcctttttgccacagaatcaattccaaactctagcatggctttccaggttcttcacctctggttatagcctttctttggatagtta

SEQ ID NO: 349046 - DNA, 1300 bp, Homo Sapiens
ggtccggaattcccgggatgggagaccggagcgggagacagcggtgacaggagcagcggccgggagcccttagggaggcagacagagcctgtagccaatgccccaggagccctcggttccaaccaactgatgcccctgtgcccactggcccacgccatgcagccccagtccgttctgcacagcggctacttccacccactacttcgggcctggcagacagccaccaccaccctcaatgcctccaacctcatctaccccatctttgtcacggatgttcctgatgacatacagcctatcaccagcctcccaggagtggccaggtatggtgtgaagcggctggaagagatgctgaggcccttggtggaagagggcctacgctgtgtcttgatctttggcgtccccagcagagttcccaaggacgagcggggttccgcagctgactccgaggagtccccagctattgaggcaatccatctgttgaggaagaccttccccaacctcctggtggcctgtgatgtctgcctgtgtccctacacctcccatggtcactgcgggctcctgagtgaaaacggagcattccgggctgaggagagccgccagcggctggctgaggtggcattggcgtatgccaaggcaggatgtcaggtggtagccccgtcggacatgatggatggacgcgtggaagccatcaaagaggccctgatggcacatggacttggcaacagggtatcggtgatgagctacagtgccaaatttgcttcctgtttctatggccctttccgggatgcagctaagtcaagcccaagcttttgggggacagccgctgctaccagctgccccctggagcacgaagcctgggctctccgagctgtggaccgggatgtacggggaaaggagctgacatgctcatggtaaagccgggaatgccctacctggacatcgtgcgggaggtaaagaacaagcaccctgacctccctctcgccgtgtaccacgtctctggagagtttggccatgctgtggcatggagcccaggccggggcatttgatctcaaggctgccgtactggaggccatgactgccttccgcagagcaggtgctgacatcatcatcacctactacacaccgcagctgctgcagtggctgaaggaggaatgatggagacagtgccaggcccaagaactagaactttaaaacgttcccggggcctcagacaagtgaaaaaccacagtaatgctgttttagaactgtgccctcatgccctcttcctgtcacatgctagcggggccagaagcctgggtgt

SEQ ID NO: 349047 - DNA, 1882 bp, Homo Sapiens
  misc_feature (45)..(45): n is a, c, g, or t
  misc_feature (79)..(79): n is a, c, g, or t
  misc_feature (107)..(107): n is a, c, g, or t
  misc_feature (334)..(334): n is a, c, g, or t
  misc_feature (352)..(352): n is a, c, g, or t
  misc_feature (354)..(354): n is a, c, g, or t
  misc_feature (467)..(483): n is a, c, g, or t
  misc_feature (488)..(488): n is a, c, g, or t
  misc_feature (510)..(510): n is a, c, g, or t
  misc_feature (844)..(852): n is a, c, g, or t
cagaaatagatattcagcttgtggacaaacacataagggcggaantgggggaatttctctttttacttcctggccaaanaaaagttggttattttggttaggggaanaaggaagttaccccgccgcgtcttacaaagaaagcgtgtggtgaagggttgattatttacgtcccttctcctggcggccgccggggttctttctgtttttgtcccccacacgaggggccgtaaagtgtttttggcgggagcggccttctttttaagtggaaggtagttttatgggccacttgccccccatatagctgtgggcgttacccccaccccgggggttggtnctttacttccagaacgcntnaaatttcttcgccccaaccaaggactcgtcgcagaggcccgggcgtcatctatcgggcgccaaacaaaggagattgggatttagcgggggccgcaaaggaaaaaaatgtgggnnnnnnnnnnnnnnnnnaggcnggtggggaaaagaagggtggtntgggaaaatgaaaaaggcgcccctgctcatacacacaacccgcagcagggccttttggtggggtgtggggttgcatacaagaggcgctctgtatatagaggggccagcccgtgtgtgcgggggaaaaaatttctatgccgcggggtgaccaccgagagtctccttgcgcgaattgttccgaaaagcccgtgtgtgccgccccgtccgggtggagagggcacgatttgtcgccgttggggggtcaaggaaatatgtgaaaaggcgatcggaaaataggaatatggggaaggccatgcggggaggcctttatttaccccttcccaaatgtatacannnnnnnnnaaggttaggggctgggagtcctgtacccagggtgataattcttacggctttccttgaaagtgccgggctgtttccatgggagatgaccagagggatttgtttgcagtgggtagttattgggtatacaaaatggtgtgttctacatcaaggcttctatgtggaagagtgcaattggtcataccccccttcaagtccccagattcagatcctccccatttcacccccatgaagagcagatgaagtgagagcccgttttcccccattgagggaagtggaattgtcatgatcagaatgtgttgaacttttagtcaatttcttagccaacccatttacaggtgcttgtggcagagctgtctgaccactcgtattcatggttctaagattttctaaggaaaactccaaaactggctgtctccccaacagctcagctcggagttcataggactgagataagagaggatgagatttaaggactgtctgcttgctgaagaccccttgcaacttcaaagactcctttgagggaacagatgttacatcagagcagagataagatgccaccagtggttgcagctttcccaagtcttccttggtaggattatttcggaaatctaggctgggatcctctgcagcaatggcttttcttttggttccgttggcagcaataaggatgttggcgttgccgttattttcggcactgccaggggacaaggtagaggatgggggagccagtttgaaccggatatggtgtgcttcagctgctgcgtcagtgagagcgggcgccatcgcagccattcagcacagagagacaggaagtccagcctctcccgatgccgaggccgaggccagctccacggccccttactgcctccccagagaacagacttaagaggcatccaagtagcattcatagtgtcaggatataaagacaatactcagaaatgagcaagaagtcttagtaattccctcggttaccaagtataagcaggtaggaaaatcttttgtttcgagaaggtatctgcacggttcaacc

SEQ ID NO: 349048 - DNA, 701 bp, Homo Sapiens
ggtttccttaaattgtaacactgcttttcttaatggcatggaataaggcactgtgagaaaagctgcctccactcccagcaccacacgtacacgtgcacacagcagaggctagctgatgtggccacaaggcacaaagaatagatccttctgatcagttctggttctggaactggttggcgagccagttcaggccttcgtaaagcccatgtcccagtagtggcacaagtagcctgaatgtgccagtttctgtagcggagggaatggaggccgagcttgtccgttatctctgccgcgttcatagtattagggagatcctggagaaaagagtcacgtagcggctgatggctatcttcaagtagctgaaagtctatgatgtaaagaggatttaagcgttttatagagctctgtgaggtggactgaagatcagtggtgaaaactacagaagtcagcctagcagagtgtcagcagatgaagatgcaatggctgcctcagaaggcactcctgtcactggagatacttgtttgtgcacaacttcagccacaattcatggggaccctgcagaagagacccttaagaggcatccaagtagcattcatagtgtcaggatataaagacaatactcagaaatgagcaagaagtcttagaaattccctcggttaccaagtataagcaggtaggaaaatcttttgtttcgagaaggc

SEQ ID NO: 349049 - DNA, 478 bp, Homo Sapiens
  misc_feature (14)..(14): n is a, c, g, or t
  misc_feature (35)..(35): n is a, c, g, or t
  misc_feature (129)..(129): n is a, c, g, or t
tgtttgcaaacttnccccaaaatcctcccctgggntaagaattatttcggaaaaatcctagcctgggaaacctctgcaagcaaatggctttcccttttggttcccgttggcaaccaaattaaggatgtntggcgttgcccgttatttttcggcactgcccaggggacaaggtaagaggatgggggaagcccagtttgaaccggatatggtgtgcttcagctgctgcgtcagtgagagcgggcgccatcgcagccattcagcacagagagacaggaagtccagcctctcccgatgccgaagccgaggccagctccacggccccttactgcctccccagagaacagacttaagaggcatccaagtagcattcatagtgtcaggatataaagacaatactcagaaatgagcaagaagtcttagtaattccctcggttaccaagtataagcaggtaggaaaatcttttgtttcgagaaggta

SEQ ID NO: 349050 - DNA, 683 bp, Homo Sapiens
  misc_feature (368)..(410): n is a, c, g, or t
  misc_feature (565)..(600): n is a, c, g, or t
gagaagcaaaatctcctttaaagagcaacttagaacagatagaaaatatcatacagctgacttcactagagagaaagtgcatcaactgctttcactcaacaaaaagaaaaaagagatgatcaatgcagatcccctctcctcctggcagcccttaccctcagtgaaaagccaccaccattctctctctggtggccatcagatcaacctgcggcgttcccacaagacagaatggagattttccaaggtatagagcaagtcagagtaccccaaagaacggcggcagagagccagctccgaaactgccaacactaccatgcatacacagttcagtaagtcaagaaaggcctggtacacagcattctgtaacnnnnnnnnnnnnnnnnnnnnnnnnnnnnnnnnnnnnnnnnnnnaagcactagtctgtgctttgcgaacagaatcaagacattaacaaagatcagcttctctgaagaaaagcatttctatagaacaaagacagctacatgtttcgctgccattacacagctccaaagcaggaaaagaaaatatttacaaaatacaaggnnnnnnnnnnnnnnnnnnnnnnnnnnnnnnnnnnnncaatgctaaaagggttattcagaattttcaaccttataaatagaagaagcactttatgcatagggatatggtgcattattgta

SEQ ID NO: 349051 - DNA, 895 bp, Homo Sapiens
agcggagggtcgaggcacccggcccgggctccccactggcgcgcccgcagcggcgctctatttttagcaggcgctgtggcaatataaggaatgcgcagcgctaggcgctcggggcgcacgctggcggcgcggtcgctttaaggaggcgccggggcggggacggaccggagtggccggctggcggggagccgtcagtccggcggccgcggggcccggcgggcgcgacgctgcctcctcaccggcgcaggctaggagggggcggcctgagtgccgtagccgagccggggctggagcgcgcggtctgacctacgagaaacatggcaaccagcgccgtccccagtgacaacctccccacatacaagctggtggtggtgggggatgggggtgtgggcaaaagtgccctcaccatccagtttttccagaagatctttgtgcctgactatgaccccaccattgaagactcctacctgaaacatacggagattgacaatcaatgggccatcttggacgttctggacacagctgggcaggaggaattcagcgccatgcgggagcaatacatgcgcacgggggatggcttcctcatcgtctactccgtcactgacaaggccagctttgagcacgtggaccgcttccaccagcttatcctgcgcgtcaaagacagggagtcattcccgatgatcctcgtggccaacaaggtcgatgttgatgcacttgaggaagatcaccagggagcaaggaaaagaaatggcgaccaaagcacaatattccgtacatgagaaaccagtgccaaggacccacctctcaatgtcgacaaagccttccatgacctcgttagagtaattaggcaacagattccgaaggaaaagccagaagaagaagaagaaaccaaatg

SEQ ID NO: 349052 - DNA, 2123 bp, Homo Sapiens
tttattagaaatgacccaccgagtatattctgtttattgtttatgatttacacagaaaatgatgggctggggttatagaacaataaaccaaccattacatttagacctgggcttttgaaaaacttgcattccattttaacaattcgtatgtatctaacaaatacataaatccagatcacaaataatcttaagagttaaacaattaagaaacacaaagaataccacatagatctacctttaaatatcagcattcatattataagaaataagaaaatgttaaaaaaataaaattaggttaagtcacaacataaaatagagaaataagataaatgctattttattaatattcatacttatttctaatttaccttcatatagtcttaactttttcaaaaggatccaagatatgatcaaataatattttagtatctgaacttgccagccttagcttataccagagcttgttaccatgaaaatcctaaaacctcaattttccttttcttttttaaaatttaagccaactcttattcaacttttcttcttcacagcagctgtttatagatagtagggagccaagaatgaaggacagtaacagatggaaagcaaaaagtacaacagctatcttaagttcagctctcaacattgctggttgagtttggaaccaaaacctcttaacaactggcagataatagctaaatcttaacagacaaagaagaaatattttctttgggacagctgctatctagaagaaaaccaaggtcccttaatatagtctaaatataatgtgtggcttattatagagaaatctttagcaacgtaagtttaaccagtaagtgtcacaactgatcaacagtacttaaaaggaaacaaacaaaaatcacactagccacaaatttccaccatatacacatgaaattaattttaatctgttttgactccttgacactaactgatcattaatgaaatatgatatggaaagatcacagagtagaaaacaagcaaagattagtttatacaacagtgactatatacatcagagggaaaacatgctagctaatgcaacattaaggcctgaatgtaagcatttcccaagtcacagaagccccaaagaactcctaaattacaaattcatcacattacatgcatgcaatgttcacttttgttttacccataaaaggatacacagtattttgctgtaaataccagacacatttacaatatatgcaaaaattagaatgcaagtgttatgttccttatatttaagcctcatatgtgccaacagtgaaaagtcatttatttttaagaatgaaaaaaggagacgggatataaatactcagagaaatacacgaataagatgtaactctgcatttgggaagccatataaatattccttttatgtgcccaaactaaattatcaatgtaccagttagacggacatacactcactatgtgctttactattttacttgctcaaatgttctacagtcatcattctctagtgttaacatcaaatcacatttgtaagtgaactattatgtccatgtttgcacatactcgtccactgtgtgtgatcacctgaaggagacattgtgcatcttagtttggggttatataattacaaagatgaccctgtgcaagttttcagaccttccaaaatactgtagaagcaaaattaccttaaactaactataagcaatattaaacaaatgtgccatgagtgttctgggccttcaagtataattttaaccaaggagaaacaggttgggtaagaggttagaaagagtttcataaggccatctaattcagctcattgtaccaagccctgagcacactagattctttgtatgctttactaaccttacgttaagcacatccactggtttcattaaggattttactacctaactttatttcagggggagttacgtctacgatttaaaacttttgtaatgttctggccaaaattttagccttcatttggcattctgaaaagttctaattttaaacaaaaatggactttctgaaaaatttctcagcatatgaaccaagaggttatgatatagcaaaatcaaagggactagtgaaaaagcatactttagaatttgtttcatttccaatgaaac

SEQ ID NO: 349053 - DNA, 1005 bp, Homo Sapiens
gccatggcaatgacagaggctgtattttactgaagtggagggaagaggtgaatgcaaatgcctagggcctaagtatacaggaaggtgtagggagaggtaagcagtgtgtatgtggaggagacagcagacgtaagcagagagaaatcagagagcttagttcttcctctggggcgcactttgtggttaattaggacatgcaaatgagctagaagctcatttaatatcctccctgacatgtagccccaccccaccctgccccacttccctggcaggtacaagggccacctgattggcccaggtatctgtggaaggttccacctgcttctttgtggcccagggaacagaaaagagtccctgctgggcatggctagtggggccggcctggtctccctcctccctttctcttcccaacctttcagacttgggacctctcttttccctctccctcagacacttcccttgtgccccgcccctcagggtgatctctgaacccaaacttgccccaaagaaggttgctctgtcctctccacatccccatctcctccctagggccttgttggggaaaggctcctccatctttccccaagtcacaccatcgtttcctacgtggtctggacaagagcaagagcacaccttgtccccaccttctccagagcagccagaacccacctcaggtgccttccccatccggtgcagttaaggcacttctgccagcaccatggtatgagcactagacttggagttaagatttgagagccccctctgtcactgtggaagcttgagcatgttgcttgatctctctgaaccttgtgtttctcatctgtgaaaggtgataatgtggggctgctgtgagatttaaaggacataatgcactacggtccaagcactgcctggaatacagcagaagctcagcagatactggacaacccatccccttagtagaggcactaaccatgtgacccaaggcaaaagtgcttaagaaaaagtgctttctctgaaaaaaaa

SEQ ID NO: 349054 - DNA, 467 bp, Homo Sapiens
  misc_feature (54)..(54): n is a, c, g, or t
aagaaccctctcccccaacaaggcccctagggaaggaagatggggatgtggaanaggacaaaaccaaccttctttggggcaaagtttgggtttcagaagatcaccctgaggggcggggcaacaagggaagtgtctgaggaagagggaaaagagaggtccccaagtctgaaaggttgggaagagaaaagggaggagggagacccaggccggccccactagccatgcccagcagggactcttttctgttccctgggccacaaagaagcaggtggaaccttccacagatacctgggccaatcaggtggcccttgtacctgccagggaagtggggcagggtggggtggggctacatgtcagggaggatattaaatgagcttctagctcatttgcatgtcctaattaaccacaaagtgcgccccagaggaagaactaagctctctgatttctctctgcttacgtctgctgtc

SEQ ID NO: 349055 - DNA, 3136 bp, Homo Sapiens
gtggcacacataggcccctgggaccggtggggatggcggccctgagattctgtcagtgggacaccgctgggcctcctttctacctccactcagcaccctgttggccaaggagaatttctgcggtgggaggcagtgctctgctagtcaggattgataaacagctgggcacaccgaaacagtgtaccaacgaattcaccaaccaggggtttccttccctaccctttgtgaaaaccaatcaattactagatgagtggatggatgcagaaaaatctgggctgagccaaagtcccttttggaaatacaagccataacattcgaaggacatcagcgaccttggcttgtttaggtgattttacttccagctgcaggtagtcttgacaaggagcgtttaaacagaaggctcaagatgcattccttgtgtaggtgggagagagcacttctaatgttaagtggggtacagatcagctgcccccccacgtagcctggacatcgtcttatccccataatccttgccatccctacaaggcccatcgccaccaccttttcccaggtttattgaggtatgattgacatccagtaaaattcaccctttggaaatatacagttctgtgaattttgacaaatttagtgtcttgtgaccatcaccaagatcaacctgtttttaacactccaaaaaattcccttctcctgccctctttccctggcaaccctgattgattatctgatcctataattttgccttttctagaatgtcatataaatggagtcacactgatgtcgccttttgagtctggcatctttccctcagcttaatgcttttgagtcattcacgatgtgtgcgtgtggtttgttccttctccttgccgggaagtatttcattgcatgggcgtactactctgcttctttatttttacactgagcctttcgccctggaagttcttggcccagggtcttcaacttgtttgcacgaccacttccagcttgctgcttccttcagttccccaggctcctcctccaaatgccagctgtgcccacaagctgttcttagggctcacactcgccttttggcgcgtggtgggtttttggtagtgcagaaagaatccagggatgggaggggaagggacggatgggtgctcaattgctgctcacgtctgctgcaacctgaagcttgcatctcagccagcagatctgctcccttctgggacccaggcttcagtgtcacacggtccttggctatgtattgggcgttggaggctttgaaaggcgagcagaagcagcatggacaagaaggctggggctggccctggggctcatcatgatgctttcctggatctgttgcttcatctgcaagctgagggtgtttgttctagatgagtgtctcaggccaccggcaactgcatgtacctcctccctttctcatttccaatgatgtaccctgtacacgtgttcatgctgtgtctggctctcatctgcacaatcgtgcatagaattgcctcaagtcctggtgagagagatgccgtggtacttttccatttagattcaaatggagctaaaattaagagttttatgagctgttaagaatgaggtagtttctcctaggaccccccaaagacagtgcaagtaatgaccgtttggatctcattcgtcgatctttgatagtatgttctggagtctactccccaggagccaggacaggcgtgaagatggagtccttgtcgcagctggagccttgcctagctggtgatcacacagcctggcctgtacctgcaccccactggatggtggtacatggtggcagggacaggaccacacccagttaaggccagaccaggctgagtgtgacccctgaggtaaacactccactaagctgtgtcttgttcatgccccctgctcagtgaaaggtgagtcccgagaccagttgggtacctctctatgcgaaccagagacatttctggatccaggccaggtgaagattagggccaggaagcctgagcccccggggcctcaaggtagggagccgaagaggctgccaggactctgctgggttgaaatttgccggggaggactcttgtctccccctcaggagtatttttgttgaggctttcctggaggtgaagaagcaattcccattgcagcaggttagagcgagaatcagacagagggcaaaaaccaattcgcttctccccacgttctaaatgctggggcatggctgtcaggagggcttcctgggaggtgtctctgggggtggggtgaggttggggcgatggcctttggagattgcgtgtggtgttcaggactgttccttggtgtttgagggaaactttagtgggattgcagtggaatgtaaggtcagggcacgtgggtgctctctcggggtggggtgactgggagacctagagggaaagcctgctatgcagggggagagcacaggactggccctgctctgcggcctcctttgtcccataacctgaagttaagtcacatcccctgtcgggacctccgtgcactcatctgtcaagtgggggcgcttcccttccagcatcacctgcagcagacgggctctcgggagtcgtgggttccaggcagctgtgtggacccagggacagacattcaaagggacgccagccatccttggtgacaggggccccaacttagcatcccttcccttccgttaggaaggagatgaccggaagcaaccccttcacagacacgagcacatcggcaaaccctatgaaagtggaattttctaacaaaataaacttgcttgtttgatctgttttctgtaacttttgctaaatactttatacatttttcatgttaaagagccgtgtctcccgccagcactcctcaccccggtatgaatgtgtttcctccacattgtatatccttccaccctctggctgcctagatcagtaaataaaattgatgtaatataatttataagtaacactgttgaaaccctgatcccagtggaggctgtaacccacctgcccccgcaccacccccctgacccctgttaccgcatttgtgtgtattaatgctgaagaattaaatgtttaaagagtttaaattttgaaggcgtttgctatatacagttgtcctgcattattataaagagttttcaggaagttaaaaa

SEQ ID NO: 349056 - DNA, 661 bp, Homo Sapiens
  misc_feature (403)..(403): n is a, c, g, or t
atatttaaatcatttttaataaatacaaaaaagttgtttagcattaatttgcatgtgattagttaggaattttttaaacagcaagcatgacatattcaataaaggtcatatgatcaactagtggcctttcccaattacaacaaggtcacaattacaaatattagttcttgagttattttcatgaaccagaaaacctaccaataagtatactgtcacccagaaaatttcaaatttcacataatgtgactatcaaagtttagtgttgaaggttcctcacattctctctgcatgtgatcgtattattaatttgtagcaaaggaaaaatactttattccttttattttctattcaaatgtagcaataagtatgacattttttaaaggtttccactcacatcacatcntactggaaacatttcatgaaaggtgatgttccttagtttgaagcacatcaaaacctgaatttgtatctgctcaggaaaatcttgaaaatttatagaagaccaacaattttaaaatcaagtgtagtgcaggcacccaagattaacaagcaataaggacttaactgtggatggtaaagtttaattcatgagaattgtggctcaataattgagttttacttatgtctttctaattatacgttacacctttttacacattcc

SEQ ID NO: 349057 - DNA, 562 bp, Homo Sapiens
acactcatctctggaaatgtaaaatttacttttatactattgttatgtagggctgacaggacaactggatcagtttcattaaaaaggtatgtatgcattagaaaagacatttgtatgggtcatttcaaagagggcttatgaggctgtgaaacccagagctcttaacgctgtgaccaaagatggaagttctctataggaagccctatagcactcctaatgtttggtgctatgttttcctgaggagatataaaacgtaataatccatgattgttgccatgtgagagttttaaaggttaatcaaaatttctcttcttcagggcaaacttgaagataaatcttttgactccagctctttagaggatctaaagtgaccttgatggacagtggaagaaatcacaacatggaattcctcgaataacaatttattgactttaaataattttgtctaatgctacatatacacaattaaaaaacctttacactatttctagaaagtcagcatgtatttttggctcgaagtttctctagtgttttctgtggaaggaataaaaatttgagtttc

SEQ ID NO: 349058 - DNA, 1802 bp, Homo Sapiens
  misc_feature (271)..(362): n is a, c, g, or t
  misc_feature (450)..(458): n is a, c, g, or t
tttgatatagaaccagtggtgaaaaagagctggtacggccggaattccgggatatcgtcgaccagcgtcgattgatgttactttttatttatcattcctctggctcctaagcacaacgtgattgtgaaattatgttttgtgattaacgtagtaggaagtttctgcagttggcaatattgtaagagcatattgcagtttctgctcataatttctttcctatggagtgttagacttgttatttatgtgtataaatactagctggacacagtgnnnnnnnnnnnnnnnnnnnnnnnnnnnnnnnnnnnnnnnnnnnnnnnnnnnnnnnnnnnnnnnnnnnnnnnnnnnnnnnnnnnnnnnnnnnnatctcgctgtagcatcgaacccctgggctcaagtgattcagcaagaatcacacgatttttaaaagacatggcagatcctgtgtctttnnnnnnnnntcaaaaccttgtaaatagtggttgaggtctatcccgatggggcttttcctgtagcctgcacatcgttggaaacgcctcatagagtaactctgtggttttactttactcacaggactattgttagatctgtgggaaggaattacaagacagttgctaaaagtttgaaaaagacggttgctaaacgttatgaaaaaccagataatctacttttttaccttaggtattggcatactccacacatctgtaccattctcgagtgatcgcttaggaatgaatgtgatttgaactcattcatgttgagagggtgtcaaattgagaaccaggtagatccccaccacctacagtaaaaaggaccctaaagtaaattggttgaagaaattagatcccaaagattcttggtgaattttgaagtcttcatcagtatatccatattaaaacgagatgacagaagccaaagtaattatgggctgacaggacaactggatcagtttcattaaaaagggcaaacttgaagataaatcttttgactccagctctttagaggatctaaagtgaccttgatggacagtggaagaaatcacaacatggaattcctcgaataacaatttattgactttaaataattttgtctaatgctacatatacacaattaaaaaacctttacactatttctagaaagtcagcatgtatttttggctcgaagtttctctagtgttttctgtggaaggaataaaaatttgagtttcagttgtgtaaccacaaacaacccaaataataaaaaaatcttgtcggccgcctcgggccctccagaagctttcctaaacccattccgtttgcgcgcgccggcgccccataacgctaacctgaaacactggtccataagctggttttccataggaagaatccctgggcccatgaacctaagtggctttgggaattctctccccccaaataaacaaaaactgccccccgggtcgggacaaaaccccgaaagcccggtttaccttggaaacaaaaaattccccacaaagtgggcaccgtttccttggagaggggcccattttaacctgggagaattctttactccaaacgagggaagcgtccccacaggcggggagccttcccgaattatccctaaatttttacacgcaccccccgggtccctgtgataaaattcttattcgcaacaagaaacatggggctgcggaaaattttcccttctaaggccattttcctgggcccgaacacgtggggaaaagcccctttctccataaaacggggcaattgtaatagaaaaccctggaaattggcaccagggggggttatctcacgaccacctttggt

SEQ ID NO: 349059 - DNA, 1261 bp, Homo Sapiens
agctcagaacctgttaaagagacggtccagacaactcagagcccaactccagttgaaaaggagacagtggtcacaacccaggcagaggttttccctcctcctgttgctatgttgcagattccagtggcgccagccgtgcctacagttagtttagtcccaccagcatttcctgtgtcgatgccggtccctcctcctggattcagtccaatccctccacctccttttttaagagcaagttttaacccttcacaaccaccacctggtttcatgccgcctccagttcccccacctgttgtgccaccccctacgattccaccagtagtaccaacatctttagtgcagccgtcattatccatgacaccggaaactgtgaaagatgttggatttggtagccttgttataccaggcggttctgttgccagcaatcttgctacttccgctctgccagctggaaatgtttttaatgctccaactaaacgggcagagcctgaagaaaaagtacctcatcttatagaccaccagatttcttctggtgaaaacaccagatcagtgattccaaatgatatttcaagtaatgctgcaattttaggaggacagccgccaaatgtgacaagcaattctggaaatctgggagtccaaagaccaaatgtatcaagtaattctgaaattcttggggtccggccatctaatgtttccagtagttctgggattattgcagcccaaccaccaaatattctaaataactctggaatattgggaatacagccacccagtgtgtcaaatagttctggacttttgggagtgctacccccaaatatacctaacaattctggacttgtaggagtacagccaccaaatgttccaaatactcctggacttctgggaacacagccaccagctggacctcaaaacttaccccctttaagtatccctaatcaaaggatgcccacaatgccaatgttagacattcgtccgggactaataccacaggcacctgggcccaagattccctttaatacagcctggaattccaccccaacggggaatcccacccccatcggtacttgattcagctcttcatccaccaccccgtggaccttttcctccaggagatatttttagtcaaccagaaagaccttttttagctcctggaagacaaagcgtagacaatgttactaaacccagaaaaaaggataccacttgggaatgataacattgcaacaggaaggagataagagattaccggttttcctcctataga

SEQ ID NO: 349060 - DNA, 2018 bp, Homo Sapiens
  misc_feature (1287)..(1297): n is a, c, g, or t
  misc_feature (1343)..(1343): n is a, c, g, or t
  misc_feature (1365)..(1365): n is a, c, g, or t
  misc_feature (1391)..(1399): n is a, c, g, or t
  misc_feature (1429)..(1438): n is a, c, g, or t
  misc_feature (1812)..(1822): n is a, c, g, or t
  misc_feature (1834)..(1834): n is a, c, g, or t
aacagtgaaatcttaaaagtaactgtttcactaaagcctccagtatttactgaagactgtcagaatcatcctccatcactagatcttctccaccagtcatgttccctgagcagtggggtggcttgaaggtataaaccagagaggcccaagggagggatagttagcagacttctggtctttttctagtttgtgctcttcttctaagtatacactcagtcttacaggggatagtttcatagtaagttctgaattccctgtaagactgagtgtatacttagaagaagaggatattactgaagaagctgctttgtctaaaaagagagctacaaaagccaaaaatactggacagagaggcctgaaaatgtgacaggatcatgaatgtcaaaggcttttatcttgagaacatggtgtctggagttaaaggtattggcatactccacacatctgtaccattcttgagtgatcgcttaggaatgaatgtgatttgaactcattcatgttgagagggtgtcaaattgagaaccaggtagatccccaccacctacagtaaaaaggaccctaaagtaaattggttgaagaaattagatcccaaagattcttggtgaattttgaagtcttcatcagtatatccatattaaaacgagatgacagaagccaaagtaattatgggctgacaggacaactggatcagtttcattaaaaagggcaaacttgaagataaatcttttgactccagctctttagaggatctaaagtgaccttgatggacagtggaagaaatcacaacatggaattcctcgaataacaatttattgactttaaataattttgtctaatgctacatatacacaattaaaaaatctttacacctaacacaaaaatcgcggcataccaacaaaccaaaaagggcggcccgctcctagaatatccctcccaggggccccaagccttacgccgcaccccgcctctccttgtaaccacctggatccctataagcgatctcaccattatacagcctaggccactgggctgctccgtttttctaccgccccccggccttggcgtataaccctgcctcaccctttgcggtattactttgtcggaaaacgaaaaccatataacctccccagacgggttggagcaaaaaataaattgggggacccacaccaccttaacctttacccagaaaagcctcttttaaataagagccctctctctgaaggcgcgaaaaaatctattataaacacaccctctttcttataaaacgcctggtacaccaacaccctnnnnnnnnnnntatcttacgaaaaaaaatttataaacgccccgttgtggtaatacancttataaatggggcgccccctnttttgttgcgccccccgcagttgttnnnnnnnnntcccgccggaacttaggcaaagagaaacgnnnnnnnnnncagggttggcgccgcttgttttgtaccccccctcggggaagaaacggttatttctatttcgggcgctaacaccttaatcgagattcgcgggccaccaaacaacaactgccacatatcatttattttttatacccaccccaacaacttcaccgcgcggggccacgaagccccctataaaaaaaccgtgggcgaattaaatccccccctaaaaaagcatcttggggcggggtatggcgcggggcggggcgacataaattttttttcccccaataattttttcaccacccgcaggtgtgttcaccccctcagagaggggggtctccccctctttttctcccccgcgcaggcctaccccctttattataagaaagttnnnnnnnnnnnacccacgaaganaatttggggattattcatattgggacaaatccccacttaactaaagcgaagccccactatataatctccccaatatatattattgttacttaaaggagggcctttccaccccctctggggcgcgttttaaaccaagacaacgctgcccctcacaaataaataactcacagccctccatgaaaag

SEQ ID NO: 349061 - DNA, 408 bp, Homo Sapiens
  misc_feature (350)..(350): n is a, c, g, or t
  misc_feature (393)..(393): n is a, c, g, or t
ggcactcagcagtttacacctgctagggtgttcaaaggtcagtgctatagaaattcagtatctggcatcgttggttttcttggctttgtgcttgttaaacctggtatttctactgatacagtatttgtgtaggtttctcagagtgttcagtttgatatactctaaaatagtaagcaatgcttttttttccaggggtgtcaaattgagaaccagggtagatccccaccacctacagtaaaaaggaccctaaagtaaattggttgaaggaaattaggatccccaaaggattcttcggtgaatttttgaagtcttcatcagtatatcccatattaaaacgagatgacagaagnccaaagtaattagggggctgacaggacaacttggatccagttnccttgaaatagggca

SEQ ID NO: 349062 - DNA, 488 bp, Homo Sapiens
  misc_feature (472)..(472): n is a, c, g, or t
cgttggttccctggctttgtgcttgtaaccctggatttctactgatacagtatttgtgtaggttcctcagagtgttcagtttgataacccctaaaatagtaagcaatgctttttttcccagggtgtcaaattgagacccaggtagatccccaccacctacagtaaaaaggaccctaaagtaaattggttgaagaaattagatcccaaagattccttggtgaattttgaagtcttcatcagtatatcccatattaaaacgagatgacagaagcccaaagtaattatgggctgacaggacaactggatcagtttcattaaaaagggcaaacttgaagataaatcttttgactccagctctttagaggatctaaagtgaccttgatggacagtggaagaaatcacaacatggaattcctcgaataacaatttattgactttaaataattttgtctaatgctacatatacacaatnaaaaaacctttacact

SEQ ID NO: 349063 - DNA, 420 bp, Homo Sapiens
cactggatatgttcgacctgggatggtgaaaatgggagcttcatagaagtattgagaaaacttcactgcatccaaggtggctgaggtgacaatcagcttcatgtcctgccgtttctgaactgtctttttcaacaatccaaagagcacatcagtgtgaattgtcctctcatgtgcctcgtccaacatgatgatcgcgtactgagtgaggtcagggtcaatcaagcactctctaagcaacatcccatctgtcatgtacttgatgactgtttcagggctagtgcagtcctcaaatcgaatggtgtagcacacctcttggcctaagcaacaaccaaactcctctgacactcttttggccaccgacatagctgccactcttctgggctgggtacacccaatcttgcccctggaagtgtagcctgc

SEQ ID NO: 349064 - DNA, 1016 bp, Homo Sapiens
agctggtactggtccggaattttcgggatatcgtcgacccacgcgtccgggcagcctctcttgctaggaggccacttctgctgttacagtaactcctccctgcagaagaggggacttctgcaacagattctgtttctttttcccgactcttttccttgctgccaggtatgtgatgctgtaggcttggctccaaaccagctgagtgcctgctttttactcctttatgtctggccttctaggatctgtccaagacactctcaggcctggaggcagggcatagaatcagttcttcactctccctaatactacactctgtaaggacctggggcaggatatcttctcccccagggatcttctatttaagtggcttctgagagggtgaacaggattgttacttttaagcctacctctgctgtgacccatcatgtgggtctttagtttctcccttctgtggtttatgagcctgcccttaccttttccctgcctctgacttggtatttccaggtccgtatttctctgtagcccagggtctggggtagagctgactgctgttcaccctttgaacaactcatggacgtgagggatgggtgctgagcagaaccaagagaggaaactttggcgctgttaaaatggaatttctcatctgccggcattattaagggtgggctaggttggatggaaggtgaaagggatgaactgccttttgctggaagctgtcttaggctgtgagacaggagcaggggaaccacagcctatggggaactgcccttgactccacctatgttggagccttagcccaaggccattccttctgtgatgataaagcccagttctggaattggagccatattaaggaatgattctcttccagcgctgctcctcaagggttgggggtccttctccctcacagccaccacatgtctcagggctaccttctccgattggatttgcatttgtggcactgtctttgatgcagtgatgtacttaatggtgcaataaagctgcttcgatttggt

SEQ ID NO: 349065 - DNA, 703 bp, Homo Sapiens
tagaggaaacccacaaacatgagccacagatgggagaaacaatttacccacatgttttttcacagcagaggtaggcttaaaagtagcgatccttttcaccctctcagaagccacttaaatagaagatccctgggggagaagatatcctgccccaggttcttacagagtgtagtgaggaggtgcaggccacccctaataaagctgggcccaagctcaaggaccccccacaaggttactttgggcccaagctccccccatctcttggcaataagcctgtccttccactgatagggaagctcccagctacgcgaaagcccaataagaagtgtgaagagtctggcttggaaaggggggaagagcaagaacagtcagagacagaagaggggcccccagggagtagtgatgccctatttgggcatcagttccctttcagaggaaacaactggccccttattagacccacccccagaagagtcaaagtctggagaagctactgctgatcaccctgtggctccactagtgcaccccaggaacattctgactgtaacctgggggacccaaccatctcccataatacctcccgacccagtgatggggacaccctggagtccctggatagcagagtcagcaggcctgtggagtccagttgtggctataggacaagacttgagcttccccaggtatgactccaagggatctagaa

SEQ ID NO: 349066 - DNA, 404 bp, Homo Sapiens
acagtcctatttctaaatacactatccagaccaagactattctttcagatgactggaaagatgcaaagacagatcccccaattattgaaggaaatatggaggcagcaagagcagtggacttaatcccatggatggagtatgaattccgcgtggtagcaaccaatacactgggtagaggagagcccagtataccatctaacagaattaaaacagacggtgctgcaccaaatgtggctccttcagatgtaggaggtggaggtggaagaaacagagagctgaccataacatgggcgcctttgtcaagagaataccactatggcaacaattttggttacatagtggcatttaagccatttgatggagaagaatggaacatgagcccttccactgcatttcaagttaaa

SEQ ID NO: 349067 - DNA, 1909 bp, Homo Sapiens
  misc_feature (174)..(182): n is a, c, g, or t
acccatgtaaagctgtcacatctcaataaaaaggaagcctctacttttcaaatttgtcactccacatatgaccaatatagcaatattatgatactctagataagagctgtgatttttgagatttgaaattgataagaaaagcataaaataacttcagagtagaatataaaagtnnnnnnnnntctatatggtatgttaactttactattaaaaaactgattctgaaaatcaaatatttagaaaattatttcctttgaaaataagaatactgatagtaagttctagaatttggttttcaatagtcaaaatctttcaactcatgatttgataatgggatttctgacaaaatatttgttacactctattgtcttttcaagaaaactcaagatgtcatgaatgataggggccattgcaataatatgcagtacccaaaacagtgaggaaagtacaagagactgtattactcttacatttaccacatacaaccaacatttcaatctctattatatttcacaacttgttattaaatttaaagcacctgtatatggtgatttgactttcactctacagcctatagtattgaattgaacactgtaacttgtcccattgggttaaatcatgcaactgtcacagaatcaggttaagtggtttataaggcatattggaacgagttaaaaatcatttatatccatttaaaagtttattcttttggatgaaggggttcccgaatgcctcagtcaccatgtgtgttgtaaaatcagttgaatagtttgttaaagtataatttatttggcttaggatggagccgcagaaattggaaggaattgtggtcatcccagggttgaagggtgtcttctgagctgggatgggaacagcagctgtcacaacacattcagaattccaagtagacaaggaatgccaaaggcaggcagcagtaagccgagaagacttggggatagggtgggtgcacctgaaattttgacttgagacaccactccatctcctccatcactgtgcgcgcgaacctccacaacgtattctccatctctggggattgggacttctatggagtgtttgtgagttgaatacagcttgccatcatgctggccatcaggtctgtagagtaccttatatcccgtcactgtagattcatttgatagtgcaacgacatgatcccaggtgattatatagcgtgaaccagaccttactgaactgatgatccttggaggctggctaggaggtgctttcttggtgaaagcctcaatcatgtcacttggaggtccacaccctgcactattgcaggccccgacttctataaaatactgggtgtctggcagaaggttctcgagcctggccgagtactcttggctggtgacttgaactctgtttgcagcttcttctttgtcatgggcagcccaataccgaatctgatagctttccactattttttctaaaacatgttcccaatgaacagatatcccagaagatgataagacttttacacctacttctgttggggcttcactgggagcgtcttgtgctgaattaatgactgctactaggctgtaaggtccatctcctttgttgttgaaggccttgactttaacttgaaatgcagtggaagggctcatggtttcatctttatggacatatcggccagtatcaggattagtaactgtgacttttttccattcttctccatcaaatggcttaaatgccactatgtaaccaaaattgttgccatagtggtattctcttgacaaaggcgcccatgttatggtcagctctctgtttcttccacctccacctcctacatctgaaggagccacatttggtgcagagctcctgaaggaatcactagatatggaaaggaaagaccagcaccagacaccacaaaaacacactgaat

SEQ ID NO: 349068 - DNA, 756 bp, Homo Sapiens
  misc_feature (363)..(363): n is a, c, g, or t
  misc_feature (383)..(383): n is a, c, g, or t
agcggagcggtgggcagggctgaaaagacagaaggtgtgagtgaatgaccttcttcaggtggagaagcgtctggagctggtgaaactaggtgtcccacaggcacgcacaagaagctcaccgcatgtctgcagggccagcaaggggcagaggcgtgacaagacgctccaaaaagttgcctttgacagacatcgtggctcagtgtctgatggaggggtcagctatcctgggcagatgacacacttcttgggaagatggctgaaagctctgtggagagacggcaggacaattcgtggcgtcaagagcatgagtacatgtctcttgagcttgcaaggtatgacgagagacgtgagtggagccccgtntctatatgcttggcggaggntggaaatcccaatgatatgtcaggaagcggaggagacacttagcgcaagttggtgctggacagtggattgcctcacgaaccagggtggcagcagacttccaaggtcttcaggtgtgtcgcagcagcttacaggcctgcgggtgccaaaggctgatgccctcagggaggaaactggaggatggcgtgccaacagagtggagatcttgcagggaccaagctctcagctgatatgtgcagatgatgtggccaaaggaaattgactatgcaagactactttgcaaagcgctaatagaagtgcaaagctgaatagcacaggaagttcctgacactatggcaggctgctattgcctcagatcaaagcacaacaggaggc

SEQ ID NO: 349069 - DNA, 566 bp, Homo Sapiens
ggtctcctgagtcatgttaacaataaattctcatttttgtttaagccagtttggattcgatttcccatcactctccactaggaaatttttactgattcaggatagttagccagctaggaagagccagctctgcagcccactgtgggtgacagcgcctaggtcaggagatcttagcaagcctgcagataggggcagcagagggaagctggggcaagtggcttcattcataaaggggaagactatcaggaaggcaagcagagcccgtcagaagccagccctggaaaaagaaaaaggctctaggtcagcaagtgaatgtgatatttttcactttgaagatgggagccaggggaatgaaaggagaaaggaagaaagaaatcaaacccatgacataaaaagaatgcctatgcccttctgagtcagacacttacaggtaatccaaaaacttgagaaaaaaattgctgttatacattacccgttatgtcaacaaatccccttgtagctttgaaattaccccagtatattcaaagctacaagggatttgttatacattacccgttatgtcaaca

SEQ ID NO: 349070 - DNA, 281 bp, Homo Sapiens
tccccacgtctctgtgcgctctgttaacccctgctttctggcctgagggctgggaagggaggtctggggagccccaggagctgagaagtacccaaaaaccacccccaacgccccccaaccctcaggcgtgcctgtgagtgtgtctgtgtgtctcactctgactcacccagacaactgacttcagcagccaaccttggtcattcccagaaccaccactggggggcatacgtgtggctagactgggggcgcccgaatatctgtctctacaaaaagtagaaaaa

SEQ ID NO: 349071 - DNA, 847 bp, Homo Sapiens
cgagcaggagtccctctgagcgtcccttctgtctcgttctgccctagctggcagcaatatgaaccaggcatgatgcagcaggagcaagtgaatctggagtcagccacttggcaccctgtgttttcgctgagaacaaactctgagactcttggggtgacttctcatcactctggacctccattcctgtgaagtgacaggtgtggaccctgagggtgcggtggtgagcacactgtctcctgctggcattcaccccactcatgctggaaaggaagatccagatcgtacaaaaatgagaaaaagaaagaataagaagggtctggtcccagttctgactcggccattcttacagctctttctggctttgagtttgcttgtggaatttcctgggcagttgtgttaaatccgccaggtcacgtgcagacaaagctgtggctgcgagagttggctggcctcttggaccagaagccatctccatatcctcatgagcgattccatatctccactcagaccctgtggactacagtgttccgctgtggtggctgccaagatgccttcttaaacttatgcaaggaaaccaaaccctcccacagttcccaagaagacactggaagaagaggcttctcacccttcctgctttttcaccacaatcaccttgagctcgtcccttggactagagtctccacagttccagtaaaattctgcggtgggctgatgagctgcttgcatttctgtgacatttccagatatgattctcagtgggattttggaaactttgattgctccaagctcacccttcttaacattctgtaatggttacagatgagaatggaaaacacatattttatgg

SEQ ID NO: 349072 - DNA, 950 bp, Homo Sapiens
  misc_feature (146)..(202): n is a, c, g, or t
  misc_feature (820)..(893): n is a, c, g, or t
tgccttctggcttaccctagagattgtgtatttgtgtgtgtatgtatgtgtaaaaatcacattatatacaatacaatttttacagaaagcctggcagctacaaataagaggtagaactactcaaaactatgtttcctgctgcaggnnnnnnnnnnnnnnnnnnnnnnnnnnnnnnnnnnnnnnnnnnnnnnnnnnnnnnnnntaagtggcaggttaggccccataatttaaacaacaaaatctaggaagaaaaatattcttcaatgtactcaacagataagttcattaaagggttaaaaaaagttgcataggaaaaaagggacattccagcacttgctacaatgatggcaatggtttctctatagggagtaaagtacccttcagttttttcttcttttgataactctaagattaggatttacaagcaagagcaagttaaaatagcagcactttttccagtcctggagagctctataagtgagaagggactctgtctggaggtcaaggtttgttctaccagacaaagacaagccagtaagcacagctccaaagctaaagttttaagttccttcaacattttcataaaaggtgttacaaaatccttaatacttccatcctctgcttaatagaggcaaaggacagggtctgtgggtgtctgtgtcttgagtgacagaatttggttatcaaaggacacatctgaaagtttaagaacaaaagggggattcctcagatgctgtttttaaggaacggtgcactattgtcttgattgtatctatgcaagagagaagcagagagagcgctgtattatttggcctgtgannnnnnnnnnnnnnnnnnnnnnnnnnnnnnnnnnnnnnnnnnnnnnnnnnnnnnnnnnnnnnnnnnnnnnnnnntgtcagttttaagaaagacaaacaggttacaatgtagtttctgttcccttgctcctc

SEQ ID NO: 349073 - DNA, 1218 bp, Homo Sapiens
  misc_feature (85)..(85): n is a, c, g, or t
  misc_feature (205)..(205): n is a, c, g, or t
catccgctgcttctctccgtttggggatgcgccccaaaaacgcacagcgtctcgagacatgcccacagagagacacttcttgaancgacattgctggcagcggttgcgattgatgcggacgatggagcaattctcattcttcagacaccttttgtactggatgttctgctggatgctccgacggaaaaagcccttgcagcccttngcaggcgtgcacaccgtagtggaagcccgaggcaacgtccccacacactttacacagtaacaccatgccattcagcttggtgatgttgctggtgctcttgctgggggacactcggctgctgtcctccatggccacttgtagactcccaggggggctcccattatagaaggaggaggaggatgacgacgagggaagaatgaggaagaaggggagccgtcatcactcaggctgggtggaatgctgcccaaaggagcgagccgggtcttgggtgagggagccagtgggggatggtgggaagtaggtgggacagccttgggtcagggactggaagctgccattggagttgtcactatagagggattcagggctggtgcggcttggggaggagccactggagccaatgtaggtgatgacgccacctgtgttgttgttggagtccagggtcgtcatgtcttcaccagctgagagcggtcattcaaactggaccttgactcaaactagaggttgcgatcgccgctgttgccccctgggcactggctaagggcggggagtggaccccgcgactcacgatcaggatccgaagcaccctgcagcaaggtcttggggtggccggactgcagccctgcagaagggttggacgttgaggcaacggagttctgctttgcatgggaagagcagagagagtgtgtagggggaatcagcctgcagtagttctggctagaaggtagcaaggagggtcgggtctctgcagtgtacggggtgcctctgcctgccggctccgcagcgctgcggggtggcgaatctggagctcccggtgcaaaagtcccagaggaagagaggttgcaaccaggaagtaagtaggtgatggggagaaacggggcaccgagtcgcaaagaggcgagacgtgtgccctgctacgttccctcggcagtaatatttcactctgccaatctcagccgccttttgcgacgcgtgggtcgacgatatcccggaattccgggcgtaccagcctt

SEQ ID NO: 349074 - DNA, 487 bp, Homo Sapiens
ccttttcccccaataatctgtgtttattatgccaattttaattaccatgcaatctaatggatttaaggcttatattttccacatcactagacatcacaaacatgaaagcattttatactgtcattatacatcaatgtttgtacttggttatacatatatacagaaattattcacacatcttaaccttgctatttcctcctttcaaaccaacataattttaccgtgaaagcagctttttaataaatggtataagaaatacagcaaggcacacttttttaaaaaacttttttctcattaccacctcaagaagcataaaaaatgaaaatgttgtacataattcaatagtagaatgtcaccagtttataatatacaacaccatatggttgtttcttgaaatgctgcatagattattttttaaatgaaataaataaaatggcgcttttaatagttgcttaattttgaaagaaggaccagtgtttcttctcta

SEQ ID NO: 349075 - DNA, 1018 bp, Homo Sapiens
  misc_feature (145)..(145): n is a, c, g, or t
  misc_feature (161)..(161): n is a, c, g, or t
  misc_feature (200)..(200): n is a, c, g, or t
  misc_feature (907)..(907): n is a, c, g, or t
  misc_feature (972)..(972): n is a, c, g, or t
  misc_feature (995)..(995): n is a, c, g, or t
gcccaattagccgcctggatccaaaactttataacttttggcttagatgcacagggactttctttttctggttatgaagcatctctaaactggctgattttaggtatcatgactttctctgggaatgagaaatatggtcacaacntagactctatagaagnaaagcaacttgattatttctctgagccagcatcattganggaagcccgttgtttaatatggttgctagagaacacagagacaagttcccagcattgcatagtgctttagatgaattctttgatataatggatattttcacagcatcatgggaaagattgcatgttacactgacagaatctattaacagccgctgtactgtgttaaggaaacaagatagtggtgaagcaccgtttagttcaaccaaggtgaaaaacaaaagcaagaaaaagaagccaaaggattcaaagcctatgttagttgggtctggaacaacttcagtaacttcaaataatgagatcatcacttcaagtgaagaccatagcaatcgaaattcagattctgcaggcccatttgcagtgcctgaccatcttcggcaagatgtagaagaattcgaagctctctatgaccaacacagtaacgaatatgttgtccgcaataagaagctatgggacatgaacccaaaacaaaaatgttcaactctatatgattacttctctcagtttttggaggaacatggtcccttggacatgagtaacaagatgttctctgcagaatatgagtttttcccagaagaaactcgacagatactagaaaaagcaggaggtttaaaaccttttctcttgggatgccctcgttttgttgtgattgacaactgtattgcactgaagaaggttgcatcacggctcaagaaaaaaaggaagaaganaaacattaaaacaaaagtagaaggaaatttcaaaagcaggggagtatgtacgagttaaactacanctgaatcccagctgcttgggggnttttaaacccggttgttaaagtc

SEQ ID NO: 349076 - DNA, 1104 bp, Homo Sapiens
acaggggagtatgtacgagttaaactacaactgaatccagctgctagggaatttaaaccagatgtaaagtctaaaccagtgtcagattcatcttcagcaccagcttttgaaaatgtgaaacccaaacctgtgtctgcaaattctcccaagccagcttgtgaagatgtgaaggccaaaccagtatccgacaattcttctagacaagtttctgaggatgggcaacccaaaggggtctcttctaattctcctaaaccaggctctgaggatgcaaattacaagcgagtctcctgtaattcccccaaaccggttcttgaggatgtgaaaccaacttattgggctcaatcccatttggtcacaggatactgtacgtatcttcctttccagagatttgatatcacccagacaccgccagcatacataaacgtgttaccaggtttgccccagtacaccagcatatatacacccttggccagcctttctcctgaatatcagctaccaagatcagtaccagtggtgccgtcttttgtagccaatgacagagcagataacaatgctgctgcctattctgagggtcatcatttgaatgctgagaatgttgctggtcaccagattgcctctgaaacacagatccttgagggctctttgggaatatctgtaaagtcacactgcagcacaggtgatgctcatacagtcctgagtgagtctaacagaaatgatgaagcactgtggaaattctaacaacaaatgtgaagtaattccagaaaagcaccaagtgcagtaacaaaacattccacacgtgcagatggttgcccatacaggtatcttggaacataatacaccaaagaagtcaatactgagccatataatccttttgaggaacgacaaggggaaatttcacggattgaaaaggagccaccaagtattacaagaccaacttcaagaagtgtatgaaaattatgagcagataaaacttaagggcttagaagagaccagggacctggaagagaagttgaaaaggcacttagaagaaaacaagatctcaaagacggaattagattggttccttcaagatttggaaagagaaattaaaaaatggtcaacagg

SEQ ID NO: 349077 - DNA, 766 bp, Homo Sapiens
  misc_feature (383)..(383): n is a, c, g, or t
  misc_feature (385)..(385): n is a, c, g, or t
  misc_feature (552)..(552): n is a, c, g, or t
  misc_feature (556)..(557): n is a, c, g, or t
  misc_feature (566)..(566): n is a, c, g, or t
  misc_feature (570)..(570): n is a, c, g, or t
  misc_feature (572)..(573): n is a, c, g, or t
  misc_feature (577)..(577): n is a, c, g, or t
  misc_feature (579)..(579): n is a, c, g, or t
  misc_feature (592)..(592): n is a, c, g, or t
  misc_feature (603)..(603): n is a, c, g, or t
  misc_feature (613)..(613): n is a, c, g, or t
  misc_feature (629)..(629): n is a, c, g, or t
  misc_feature (670)..(670): n is a, c, g, or t
  misc_feature (759)..(759): n is a, c, g, or t
  misc_feature (761)..(761): n is a, c, g, or t
  misc_feature (764)..(764): n is a, c, g, or t
ggccacaagcacgaggacggcacgcagagtgactcagaggaccccctggccaaggcggcctcggccgctggggtgcccttggaggccagcggggagcaggtgcggctgcagaggcagatcaagcgggacccccaggagctactacataaccagcaggcctttgtcatcgagttcttcgacgaggacacaccccgaaagaagcgctcccagtccttcacgcacagcccgtccggggaccccaaggccgacaagcgccgtggcccaacgccggccgatagggaccgccccagtgtcccagccccagtccaggcagggggccgcagctcggggccacagagggccggctcgctcaagcgggagaagacagaggaacggctgggcancncctcgcccgcctcccgaacccctgcccgccccttcggaagcgtggggcgccgctcccgcctggcccaggacttcatggcccagtgtctgcgggagagctccccggccgcccggcccagccccgagaaggttcctccggtgctgcccgctcccctgacaccccatggnaccnnttccgttgntccncnnttcnantgctcgctcccanggactcccagntgatcaaggnacggaaacaggagaangacgacagcctcagtgacgcagggacatacaccatcgagancgaggcgcaggacacggaggtggaggaggcccggaagatgatcgaccaggtctttgggggtgttggagtcccctgaactctccaggggntnttngg

SEQ ID NO: 349078 - DNA, 913 bp, Homo Sapiens
  misc_feature (250)..(268): n is a, c, g, or t
  misc_feature (707)..(716): n is a, c, g, or t
ggatgtaagaaactaattatgtaataggtaatgaaactgaaactatactatgcccttaaggagatccagtttaattcaaggtgatcttttatttacctgtacaggagtgtaaacttttttgtgcttttatttttcaattgtgagaaccactgattggtatgttcaacaaatttgtgtatacaaagaaatggataaatcactgctatataagggaaactaccttaggaaagaatgtttactgaatgtttannnnnnnnnnnnnnnnnnnactatagagtgaggggttgttaacaaagaatatatattggtcattcttacaactactatttaaagtcagcaacttttcactgaatttgatagattttatgtttggccatatcttcatgctcacatttgatttctgaagacctcctacatacacttcaataaaagttaaatggacatactccctcttttttgatttactggtacatttttaaaataataaatctgccataaaatgcattatatctggagacttgcacttgtatggatgaatttattacattcaacatatttaattttatgccttctaattctaagatgcagaaaaaaataaatgaacatgattttattctatgccaacatttgggcctctgaatgtatctgttatttgaatttaagtatttgaaaaggaatggtcaatttgaaagtcattctaaactgannnnnnnnnnctaaagggctccttttttcctggactatgtggttttatgactaaagtcacatgtatgtattaaacattgaggctctgtagaggagagaggatgtacctctctggtgctgttacagtacattctgtacctgccatacaggctcattttcatgcaaattcttcctagagccaaataaataaagacttaggtgaattagt

SEQ ID NO: 349079 - DNA, 1028 bp, Homo Sapiens
gcgagagcggaggccgcactccagcactgcgcaggaccgccttggaccgcagttgccggccaggaatcccagtgtcacggtggacacgcctccctcgcgcccttgccgcccacctgctcacccagctcaggggctttggaattctgtggccacactgcgaggagatcggttctgggtcggaggctacaggaagactcccactccctgaaatctggagtgaagaacgccgccatccagccaccattccaaggaggtgcaggagaacagctctgtgataccatttaacttgttgacattacttttatttgaaggaacgtatattagagcttactttgcaaagaaggaagatggttgtttccgaagtggacatcgcaaaagctgatccagctgctgcatcccaccctctattactgaatggagatgctactgtggcccagaaaaatccaggctcggtggctgagaacaacctgtgcagccagtatgaggagaaggtgcgcccctgcatcgacctcattgactccctgcgggctctaggtgtggagcaggacctggccctgccagccatcgccgtcatcggggaccagagctcgggcaagagctccgtgtaggaggcactgtcaggagttgcccttcccagaggcagcgggatcgtgaccagatgcccgctggtgctgaaactgaagaaacttgtgaacgaagataagtggagaggcaaggtcagttaccaggactacgagattgagatttcggatgcttcagaggtagaaaaggaaattaataaagcccagaatgccatcggccggggaaggaatgggaatcagtcatgagctaatcaccctggagaacagctccccgagatgtcccgggatctgaactctaatagaaccttcctgggcataaccaaaaatgggctggtggggcaattcagccctgcctggaacattggggggtataaaggatcccagacaccttccttccaaggaaaggtacattccccccaagggccagggaaaaacaaaattccccca

SEQ ID NO: 349080 - DNA, 892 bp, Homo Sapiens
  misc_feature (752)..(752): n is a, c, g, or t
  misc_feature (861)..(861): n is a, c, g, or t
aaataaggggaaacatttttaacattccaagcaagagaaaggaagaacgactattgggaggaggtacaccagagattgctcagtgtgcagcctgctacctcacttttggctctggattgcctggtggtagaagggaagagtattatgtagttagcaccttacatatttgatgctcaggaagaaagtgcaagaagatccctaatagaacattaaagattcttaaaagtttttgaagtaggctgcttggggtgaccagccccacccttacatctccatagttggtacagttagcttgtagcagctgaagctgatgcctggagatcactgtctgttggtctgatctcagtatcatactgagacacctcccctgagccttacctacttaaattggtaaccgtcctaccaaaatttgtcaattttaatcaagtgaggcaagttgcaagggagccagagatacgtgaaaaaagaaaagcagaaatactgatactttctaagaaagaagttgtaataatttctttggcacattgacttactgatatcttttgaaatgcatagatgactcttgtgaaccaaagagagcagtagtggttattccccggcgcaataaaaatgcctttgtgtatcacttgcgattgccagtcatttctgtgccagttgctttcattccagagaatggcctcattctccaaaaaaagatgatgattttagaagtaggatttcctaacaaattatgtggtggggagggacggcgngggatttttattcatcccgtctgagctcttcatacagtatttaccattaggttttaaggaaccaaagattggggggagggaggggaggtaggaaagctgagagtacgtngaaccagctacaaggcattagtggggattcc

SEQ ID NO: 349081 - DNA, 1830 bp, Homo Sapiens
  misc_feature (30)..(30): n is a, c, g, or t
  misc_feature (1724)..(1763): n is a, c, g, or t
gacggccttagcttttcctcctctcctggncccgtgggcatgcctctccctagtcagggaccaggacattcacagacaccacctccttccctctcttcacatggatcctcttcaagcttaaacctgggaggactcacgaatggcagtggaagatacatctctgctgctccaggcgctgaagccaagtaccgcagtgcaagcagcgcctccagcctcttcagcccgagcagcactcttttctcttcctctcgtttgcgatatggaatgtctgatgtcatgccttctggcaggagcaggcttttggaagattttcgaaacaaccggtaccccaatttacaactgcgggagattgctggacatataatggaattttcccaagaccagcatgggtccagattcattcagctgaaactggagcgtgccacaccagctgagcgccagcttgtctttcaatgaaatcctccaggctgcctaccaactcatggtggatgtgtttggtaattacgtcattcagaagttctttgaatttggcagtcttgaacagaagctggctttggcagaacggattcgaggccacgtcctgtcattggcactacagatgtatggctgccgtgttatccagaaagctcttgagtttattccttcagaccagcaggtaattaatgagatggttcgggaactagatggccatgtcttgaagtgtgtgaaagatcagaatggcaatcacgtggttcagaaatgcattgaatgtgtacagccccagtctttgcaatttatcatcgatgcgtttaagggacaggtatttgccttatccacacatccttatggctgccgagtgattcagagaatcctggagcactgtctccctgaccagacactccctattttagaggagcttcaccagcacacagagcagcttgtacaggatcaatatggaaattatgtaatccaacatgtattggagcacggtcgtcctgaggataaaagcaaaattgtagcagaaatccgaggcaatgtacttgtattgagtcagcacaaatttgcaagcaatgttgtggagaagtgtgttactcacgcctcacgtacggagcgcgctgtgctcatcgatgaggtgtgcaccatgaacgacggtccccacagtgccttatacaccatgatgaaggaccagtatgccaactacgtggtccagaagatgattgacgtggcggagccaggccagcggaagatcgtcatgcataagatccggccccacatcgcaactcttcgtaagtacacctatggcaagcacattctggccaagctggagaagtactacatgaagaacggtgttgacttagggcccatctgtggcccccctaatggtatcatctgaggcagtgtcacccgctgttccctcattcccgctgacctcactggcccactggcaaatccaaccagcaaccagaaatgttctagtgtagagtctgagacgggcaagtggttgctccaggattactccctcctccaaaaaaggaatcaaatccacgagtggaaaagcctttgtaaatttaattttattacacataacatgtactattttttttaattgactaattgccctgctgttttactggtgtataggatacttgtacataggtaaccaatgtacatgggaggccacatattttgttcactgttgtatctatatttcacatgtggaaactttcagggtggttggtttaacnnnnnnnnnnnnnnnnnnnnnnnnnnnnnnnnnnnnnnnnggtttttagctcatttgcctggccggcaagttttgcaaatagctcttccccacctcctcattttagt

SEQ ID NO: 349082 - DNA, 1534 bp, Homo Sapiens
  misc_feature (352)..(598): n is a, c, g, or t
  misc_feature (611)..(652): n is a, c, g, or t
ggagttttgccaaggcccaaataccctaaagggggtggtgtggcactggacctccggaccttacttgaggagccaggtcttgacttaaaaccgcagggtctgatccccccaaccaatttggtgctaacgccttttaaaatcctgtgaacaattaaaagaagtttggattcggtaccacagatccctaaaagaaacctttgctctaaggtctgcccaaaatgagccaatctgaaaataaaagtaaacctggtggtgaatgctgatgtgttaaaatttggttaccagcccatttgaatctagctgcatttactaaagacttaaagagtttagcccaggcatggtggctcacacnnnnnnnnnnnnnnnnnnnnnnnnnnnnnnnnnnnnnnnnnnnnnnnnnnnnnnnnnnnnnnnnnnnnnnnnnnnnnnnnnnnnnnnnnnnnnnnnnnnnnnnnnnnnnnnnnnnnnnnnnnnnnnnnnnnnnnnnnnnnnnnnnnnnnnnnnnnnnnnnnnnnnnnnnnnnnnnnnnnnnnnnnnnnnnnnnnnnnnnnnnnnnnnnnnnnnnnnnnnnnnnnnnnnnnnnnnnnnnnnnnnnnnnagactcagtctcnnnnnnnnnnnnnnnnnnnnnnnnnnnnnnnnnnnnnnnnnncacattttggagatggcactgctagaaaatctgcagaactgcagagcacaatttgaaagtcatcgtgatggtagaggatggactagtgtgagtcagaaagttctgggcttctgtctaggctccatcacttcttggcattttggtgttgaggagaccacttaactcatctgagcttcggtctttctctttataaagagcaaaattataccacaacagggtggctgtatacattcaatgagatatacatgaaacactttgcacacagtaggccttcaataaatgtgagttccttttctctcctcttcatcctttgttgccactaaaagccttctctaagcaaaccagcctgctcactaaatccaaacctgccctaaacaaccctgctctcaagcatgcagtcccctcatgtccccctttctttggggacacctctcaggctgtggacctctggaaagtaaagcttaggttgagtcatctgtgtcttcagggcctgacacagcacctagctctgggaccatctatctgacacctagcagaaaggcaggaagaacacttcccaggttaaaacaacgacaacaatgacaacgacaacaacaaaaatctgcaggcagaggtggtcctattcactgggtgatgacacttttactggggtgatgaacttatttacacaaagggttagttagccttttacctgtctagatcagctcctcatctagactggaacctctctgagggcagggcccattttgtaggtttataactgctcaactgcaggttatagctgtagtcttgtaactccttgtacagtgtctcacaaagccaggcactcagagagaatttgctgatttgagaaaggaaaacacctagggttaaggctcccgg

SEQ ID NO: 349083 - DNA, 1432 bp, Homo Sapiens
  misc_feature (462)..(524): n is a, c, g, or t
  misc_feature (913)..(1158): n is a, c, g, or t
aggtgtatgtgtacacaggacattcacttgggggaccattttaagtagattagtatagttgaagggtcacaaggagatgccggtgttaaaaaggcttttctgacaatcttcgggatattcatccagttaactgtgacccacattcagaaacataagtaataagtttaaagtccaacctctgacattgttcacactggctggaagagtcctcgcaatatgcgagcacagcactcagatttacataagagatgaaacggtttctaacaccaggtagactggaagtcaactggaagcatattagctgttaccacacaactgtcagaacaataaagaaagcatgcattgagcagacaggaacatcgtgaaaatcctaagagcttcaatgtattgagggctttctgtgttccagatgtcatgcaacgtgcttaaaaagcattaagtcatttgttcataacaaccgtnnnnnnnnnnnnnnnnnnnnnnnnnnnnnnnnnnnnnnnnnnnnnnnnnnnnnnnnnnnnnnnttacagtatgcacaaatctaccacaagactacacatcaactgtgttggagatttgcctagcacatataactaaatggtgctcatctgcactgcactcacacacttacgtgatacacaggtctgatctaaatacacaggtctgatctacacaaccatgtggtgctaccgcttttaaaatctgtgaacaattaaaagaagtttggaatacgtacacagatacaataaaggaaactttgctctaaggtctgcacaaaatgacccaatctgaaaataaaagtaaacctggtggtgaatgctgatgtgttaaaatttggttatcagcccatttgaatctagctgcatttactagagacttaaagagtttagcccaggcatggtggctcacacgnnnnnnnnnnnnnnnnnnnnnnnnnnnnnnnnnnnnnnnnnnnnnnnnnnnnnnnnnnnnnnnnnnnnnnnnnnnnnnnnnnnnnnnnnnnnnnnnnnnnnnnnnnnnnnnnnnnnnnnnnnnnnnnnnnnnnnnnnnnnnnnnnnnnnnnnnnnnnnnnnnnnnnnnnnnnnnnnnnnnnnnnnnnnnnnnnnnnnnnnnnnnnnnnnnnnnnnnnnnnnnnnnnnnnnnnnnnnnnnnnnnnnnagactcagtctcaaaataatactaataataattaaaaaaataaagagtttaaaacacattttggagatggcactgctagaaaatctgcagaactgcagagcacaatttgaaagtcatcgtgatggtagaggatggactagtgtgagtcagaaagttctgggcttctgtctaggctccatcacttcttggcattttggtgttgaggagaccacttaactcatctgagcttcggtctttctctttataaagagcaaaattataccacaacagggtg

SEQ ID NO: 349084 - DNA, 1448 bp, Homo Sapiens
  misc_feature (27)..(27): n is a, c, g, or t
  misc_feature (30)..(30): n is a, c, g, or t
  misc_feature (1086)..(1330): n is a, c, g, or t
  misc_feature (1343)..(1376): n is a, c, g, or t
acatgtcatcattccgtttgtgatggnttnctttaggaatcagaaaaactcaggattttattagcatatatttattttataacttcacatttataacattttactttgtataccgccaataaatgacaatgaaactattttcataaatacaaaaacacatgaaattagggtgtcatggtaaccactgcatcactttggtggaacagtattaaaaatagaatttagaaagataaatgatcacaagtgataccttttaaaaaatgcttttcttacaatctcaggatattcttcagttaaactgaaccacaatcagaaaaaataagtaattatttaaaagtcaaacctctaacaattgtcaacaactgctggaagagtcatcacaaatataaaaaacaacaagcactcaaatttacaataagagatgaaacggtttctaacaccagggtagactggaagtcaactggaagcatattagcttgttaccacacaactgtcagaacaataaagaaagcatgcattgagcagacaggaacatcgtgaaaatcctaagagcttcaatgtattgagggctttctgtgttccagatgtcatgcaacgtgcttaaaaagcattaagtcatttgttcataacaaccgtgtactctcatcttcttatttttcagatgtggaaactgatgtctagagaagctaagcaatttgcttacagtatgcacaaatctaccacaagactacacatcaactgtgttggagatttgcctagcacatataactaaatggtgctcatctgcactgcactcacacacttacgtgatacacaggtctgatctaaatacacaggtctgatctacacaaccatgtggtgctaccgcttttaaaatctgtgaacaattaaaagaagtttggatacgtacacagataccataaaggaaactttgctctaaggtctgcacaaaatgagccaatctgaaaataaaagtaaacctggtggtgaatgctgatgtgttaaaatttggttatcagcccatttgaatctagctgcatttactagagacttaaagagtttagcccaggcatggtggctcacacnnnnnnnnnnnnnnnnnnnnnnnnnnnnnnnnnnnnnnnnnnnnnnnnnnnnnnnnnnnnnnnnnnnnnnnnnnnnnnnnnnnnnnnnnnnnnnnnnnnnnnnnnnnnnnnnnnnnnnnnnnnnnnnnnnnnnnnnnnnnnnnnnnnnnnnnnnnnnnnnnnnnnnnnnnnnnnnnnnnnnnnnnnnnnnnnnnnnnnnnnnnnnnnnnnnnnnnnnnnnnnnnnnnnnnnnnnnnnnnnnnnnnagactcagtctcnnnnnnnnnnnnnnnnnnnnnnnnnnnnnnnnnnagtttaaaacacattttggagatggcactgctagaaaatctgcagaactgcagagcacaattttgaaagtca

SEQ ID NO: 349085 - DNA, 2103 bp, Homo Sapiens
  misc_feature (2051)..(2051): n is a, c, g, or t
  misc_feature (2080)..(2080): n is a, c, g, or t
aagatgtgacaaggctgccctctcctacatcccccttctcatctctttcccaagaccaggctgccacttctaaagccacattgtcttccacatctggtcttgatttaatgtctgaatctggagaaggggaaatctccccacaaagagaagtctcaagatcccaggatcagttcagtgatatgagaatcagcataaaccagacgcctgggaagagtcttgactttgggtttacaataaaatgggatattcctgggatcttcgtagcatcagttgaagcaggtagcccagcagaattttctcagctacaagtagatgatgaaattattgctattaacaacaccaagttttcatataacgattcaaaagagtgggaggaagccatggctaaggctcaagaaactggacacctagtgatggatgtgaggcgctatggaaaggctgactggggcaaagaccaaccttccctgccatttatacggcataaaaccctcaatctcaccagtatggctaccaaaattataggttcacctgaaacaaagtggattgatgcaacttctggaatttacaactcagaaaaatcttcaaatctgtctgtaacaactgatttctccgaaagccttcagagttctaatattgaatccaaagaaatcaatggaattcatgatgaaagcaatgcttttgaatcaaaaggaagctctgattcggtggttcctgatcttccagttccaaccatcagtgccccgagtcgctggggtgtggggaatcaagagaggagcggaaagcggcaaggagaggtggcagaaggagcaagaccgcctactgcaggaaaaatatcaacgtgagcaggagaaactgagggaagagtggcaaagggccaaacaggaggcagagagagagaattccaagtacttggatgaggaactgatggtcctaagctcaaacagcatgtctctgaccacacgggagccctctcttgccacctgggaagctacctggagtgaagggtccaagtcttcagacagagaaggaacccgagcaggagaagaggagaggagacagccacaagaggaagttgttcatgaggaccaaggaaagaagccgcaggatcagcttgttattgagagagagaggaaatgggagcaacagcttcaggaagagcaagagcaaaagcggcttcaggctgaggctgaggagcagaagcgtcctgcggaggagcagaagcgccaggcagagatagagcgggaaacatcagtcagaatataccagtacaggaggcctgttgattcctatgatataccaaagacagaagaagcatcttcaggttttcttcctggtgacaggaataaatccagatctactactgaactggatgattactccacaaataaaaatggaaacaataaatatttagaccaaattgggaacacgacctcttcacagaggagatccaagaaagaacaagtaccatcaggagcagaattggagaggcaacaaatccttcaggaaatgaggaagagaacaccccttcacaatgacaacagctggatccgacagcgcagtgccagtgtcaacaaagagcctgttagtcttcctgggatcatgagaagaggcgaatctttagataacctggactccccccgatccaattcttggagacagcctccttggctcaatcagcccacaggattctatgcttcttcctctgtggcaagactttagtcgcccaccacctcagctggtgtccacatcaaaccgtgcctacatgcggaacccctcctccagcgtgcccccaccttcagctggctccgtgaagacctccaccacaggtgtggccaccacacagtcccccaccccgagaagccattccccttcagcttcacagtcaggctctcagctgcgtaacagtgtgttgcctgtgagtgtgacctcggaggctcttcctcaggagctgaagtcaggatcagaaaccaccaactgtactgcaacgactgctatctcagattcaaatctgggacggccaaccgccatgtgatgtaagcctccatacgaanagcactgttgcagatagaagaagaggttngttgctggctcatgtaggtgtat

SEQ ID NO: 349086 - DNA, 155 bp, Homo Sapiens
aaaaaaagccataaaattaatagtaattttcaagaggtagaattttagtagcaataagtttgtgcatgtatagtaatttgcattagcaaggttgtacaatagaataagtgatactactggagtttgtggggctctgcaaccaagagttgcacaag

SEQ ID NO: 349087 - DNA, 3603 bp, Homo Sapiens
  misc_feature (1860)..(1871): n is a, c, g, or t
  misc_feature (2259)..(2310): n is a, c, g, or t
  misc_feature (3161)..(3194): n is a, c, g, or t
ggcagaacacaacacaccctcattatccctaagctgaagcatgattttagtcactttgattttgttcgagtgtcatctggctggtcaaaaataagcaggacagataaaatgtatttcagacataccatcagaaaatggtttatcaccatcaaaggcaatcctttgaaagtgatagagtccctctaaaggtacagtccttagaaagagggactgtattaaaaagtattttgggaatatcaaagctttaatattccaacaaagactaagagaaaaacaatactcagtgggtgattgcagtcctaaattgtcatatgttgttattttcaggtcaagagcatcaacttcaattccatacattcaccaaatattctcagtatacacacagtcttgattacatgtatcaatttcaccagttatgacttctaaaaattatatatattttttcagaacaagaccactattattaactaacttgaacaattgtatcatccaaaggccaaagatcatatggcagatcagggaagtcatgaagttgatttggtcttgacgtggaaaaccattaaacaacaaaagcaactgaacccatgtatgcacagaaacaatcaaacactagttcattttatagtgcccaggaaaatgttccttcttttaaaatggattttatttgaaagcgcagaaaatgaaaactagtgagatatatttttggcattataataggcaattggttgaggttcaagtttagtttcaggtaatattatcagggaagattccatgttttaaaatagtatttatggatcatgggtaggttaagaaagatgcattggcatatagtcttgatagttaagtccacgattatcattttagaatccaggctatgcttgctgctctttttatccacattttaaattacaattgcattttttacttgttcagtgcacactttgatgcaccacaagtgcattaattttgaatcgtgtgcaatatagaaatattttgagactcacaacattgaaacaaggtgacaccctagttgactttatcactaatgtgatttgaacattatttaaacaaatctagactgaacatgaaagaaaggagttttgggcagtgacatttttcacagaatgtatatctcaaaggtgaaagcagagtttttccagtgcaataaaaagaaacagaatatgcagattttgagctactcactctatagaggataacctaacacggctgaaaattgagctgggacattcagacgaaagtgacaatccatggacagaatagggaataacaggtgtgaagagaacaaacttatcactgaatgtttgcaagctggttaaggcatagccttgatggctctctagcaaactgtagaaacaatgtagctttgggtagtttcatgctttgcagaatttcttagactataaagtgacacagcctggaatataggttgataattcactataggtcttcaaaatacttatctttgaaaaccgcttctctgtttggtggggtacaatttgggggtcatttccttatgctctttcttaaatggagttttcattttgatgttagtttatgtataataggtaggatgcaaaaagatatgtaattgaaacaaaaaacattggactaaaatatcagtaattgaacatgtttatgtttgattattatttacactatggaaagatgcaattctagtactttgttaggaaactgcattaaagcagttctgccttgtataatctgtaagtacctattaagacaaaatacttctaaagatacttatgaaatgtatacacattttttcttgcacgttacaaagaaaatactcaattgcataacacggatgtttgacaaacnnnnnnnnnnnnaatgcatttctttctttcatgagacattgaaaccactgatagctcatttcaccctatcttaaacccttctcttgtctataaaactaatacgggtcacaccggaccttcggattaattggatccacattccccaatgatgtttgcaccccattcaagatagccatgccattgtcatttaactcgtgaacctctctttaaaactaaaatggatgtgaaagaataaaattcagtgtactgtaagtattcacagtaattctagtagaattagctgtcataacatgtttattatataatgagctggcatgacacagaaatatattttgtgtttgtatgacttttattttaaataggttaaatctggtgccactccatatatagagtgcttttnnnnnnnnnnnnnnnnnnnnnnnnnnnnnnnnnnnnnnnnnnnnnnnnnnnntaagcaactgtgccttttatacctgttgttacggtaaaaaaacggttgttgggtttggacaatgaggggaaatgggctattcccaacttttttgatcctggatatttgcccatggtttattttctgaccctaataaataatatattaaaaatttgccttctgacaaactcagataatggaccagccctaaaatattgttatgtcataaagcaaaggttaaggcattaatatggggctgcttaaatctgactaaaagatgaaaagcgtttattgtaagtgtaacacagagatactatcaggagtgaaatcagtccatttggcaaggtaaaatactgatttagagttttattctttatttcttttttgttgtgtttctttcagctatggtttcattttggttgtacagtatataaaccatatttgttttctgtacacaagactctcaagtgaattttgcatgcattatacattaggacacatttataaattaatgagtaactatataaatttatgtgtattaaaacgtctgtagcttcaatctaaaatctactgctctttctgaatctccagatatcatttctgtatggtttctgactggcctgctgcctgagtttcagaaaacaagggaggcattatttttatgggaggaggaactaagatggtactgaggatgtctgactgaaacactaccctaggaagctgtcttgtaggaaaatagaataaaacacacagaccagaagaaattgtcaagaaacaaacagccatccaaaaacagtcatgagaaatctaaagacctaaataatcttaggtatatgctctcagtgagaaataagaaaatgtgtccttaagcnnnnnnnnnnnnnnnnnnnnnnnnnnnnnnnnnngtgagcatgatcatgaatatagtaaatcttgtgagttgtgacctaggtgaaggtataatgataacatctggaggaagcatcatttgttcagctacctagggtttactttcagacttttcctacagtttaaagcacttgcgttcagtgtggtacgatctgtttgtaatgttaatcattgactattgttctgctacttggatgttgatagtgaagcagagaacaatttatcatcgtttattatgagtcactatgcacgcaactatgcttaacatggcgaaatgtattaaacactcgtccaactatttatgaaatactttgcataatttaattcgcttttgtacagttttatgtaaataaattgcttgtcatttttgtctctgcaaattaaaatataacatggtcaaatggt

SEQ ID NO: 349088 - DNA, 861 bp, Homo Sapiens
ggggaacgaggaggaagaaaatctctgcaaataatgattttatgtttgttggccaagtgaaatgatctatcattgtgtttgggaggttttattttcttatgtttttaaaattggtaaatgctttatagatgtatttttatccaagtgccactccaatttgtgtatgtaataaaattatttatattaaaagtgggaaataattgtcaacattttttttgagtatagatttattaggggtggcaaagaagagtgctagttaccagttttccatgtaaagttgtccttgactgatttgtccacacgtcagttgtaactcccccactccctggcaaaaggaattatttccaacccacatgtatcacttgaaactttttagaagcaaaataatcagggaagttcctagaaaggtgtttggctttttggtttttgagggttggggtaaagaagacttcccccacaactgtcagcacaaaacagggtattgatttttaactctgatgtttctattggagttgaatactaaataaataactataatgagggaaatacatttctaataaaattccctacattctagaaacatccctgttttaatttttttatctaaatctttttgtgctttatgtgtaaagaaaaaaatgtactgagttacaatgcattttattaacactatgtacataatagctgctttgtgttcagaatggtagcagttgctttgtatattaaagtgatccttgtgaatttgtgaaatattgtcataaagtgctttttcttactgtaatctttgtggtatcaactgtcataatgctctttttacacaaacatttatgtgcagtcacataaacatgcttttaaaaactc

SEQ ID NO: 349089 - DNA, 1997 bp, Homo Sapiens
ttcggagaagagcgagatccacctcttcctgcagcgctgccttgctcgcctccgtggctctgaccgccagctgccccaggtcctgcacatgtcagagctcctgaatcgcggcctgggtgtgcaccatagcggcatcctgcccatcctcaaggagatcgtggagatgctcttcagccgtggcctggtcaaggtcttgtttgccacagagacctttgccatgggagtaaacatgcctgctcgtacagtagtgtttgactccatgcgcaaacacgatggctccaccttccgggacctgctccctggggagtatgtgcagatggcaggccgggcagggcggaggggcctggaccccacaggcaccgttatcctgctctgcaagggccgagtgcccgagatggcagacctgcaccgcatgatgatggggaagccgtcccagctgcagtcccagttccgcctcacgtacactatgatcctcaacttgctgcgagtggatgccctcagggtggaggacatgatgaagaggagcttctctgagtttccctcccgcaaagacagcaaggcccatgaacaggccctggctgaactgaccaagaggctgggagctttggaggagcctgacatgactggccaactggtcgacctgcctgaatattacagctggggggaggaactgacagagacccagcacatgatccagcgacgcatcatggagtctgtgaacgggctgaagtctctctcagcaggaagggtggtggttgtgaagaatcaggagcatcacaacgcattgggagtgatcctacaggtctcctcgaactccaccagcagagtattcacaaccctggtcttgtgtgataagcccttgtcccaggacccacaggacagggggccagccactgcagaggtgccctatccagatgacctcgtgggattcaagctgttcctgcctgaagggccttgtgaccacaccgtggtcaagctccagccaggagatatggctgccatcaccaccaaggtgctccgggtgaatggggagaagatcttggaggacttcagcaagaggcagcagccaaaattcaagaaggatcctccccttgcagccgtgaccactgctgtccaggaactgctgcgtctggctcaggcccacccagccggacctcccaccctcgaccctgtcaatgacctgcagctcaaagatatgtcagttgtagagggtgggctccgggcccggaagctggaggagctgatccaggggggctcagtgtgtacacagccccccgttttcctgcccagtacctgaagctgcggggagcgaatgcagatacagaaggagatggagcggctgcgcttcctactgtcggatcagtcattgctgctgcttcctgagtaccatcagcgagtagaggtgctccgaaccctgggttacgtggacgaggcgggcactgtgaagctggcagggcgggtggcttgtgccatgagcagccatgagttgctcctcactgagctcatgtttgacaatgcactgagcaccctgcggcctgaggagattgctgccttgctctctggcctggtctgccagagccctggggacgctggggatcagctcccaaacaccctcaagcagggaatagaacgtgtccgggctgtggccaagcggattggtgaggtccaggtggcttgtggcctgaaccagacggtggaggaatttgtgggggagctgaattttgggctggttgaggttgtatatgagtgggcccggggcatgcccttctccgagttggcagggctctcagggacccctgagggcctggtggtccgctgcattcagcgcctggctgagatgtgtcgctcactgcggggggcagcccgcctggtaggagagcctgtgctgggtgccaagatggagacagcggctaccttgctacggcgggacatcgtatttgcggccagcctctacacccagtgaatgccccatgtaaaaacatgatgataaaacagca

SEQ ID NO: 349090 - DNA, 395 bp, Homo Sapiens
  misc_feature (31)..(31): n is a, c, g, or t
  misc_feature (48)..(48): n is a, c, g, or t
  misc_feature (63)..(63): n is a, c, g, or t
  misc_feature (70)..(70): n is a, c, g, or t
  misc_feature (95)..(95): n is a, c, g, or t
cttgtggccctgaaccaaacggtggaggaanttgtgggggagctgaantttgggctggttgangttgtanatgaatgggcccggggcatggtgantacctgaggtttgggattttgcaaacggctggctggggagaacctgccccaggctgagtgcatccagtcctcaccctactttccccaacagcccttctccgagttggcagggctctcagggacccctgagggcctggtggtccgctgcattcagcacctggctgagatgtgtcgctcactgcggggggcagcccgcctggtaggagagcctgtgctgggtgccaagatggagacagcggctaccttgctacggcggcgttggatgcagtcaggcggctggatgcagtcaacggcgttgat

SEQ ID NO: 349091 - DNA, 1541 bp, Homo Sapiens
cggatatcgtcgacccacgcgtccgaagacggattctcagacaaggcttgcaaatgccccgcaggggatcatttaactgcacccgcagaatagttacggtttgtcacccgaccctcccggcatcgcctaatttgtccctagtgagaccccgaggctctgcccgcgcctggcttcttcgtagctggatgcatatcgtgctccgggcagcgcgggcgcagggcacgcgttcgcgcacaccctagcacacatgaacacgcgcaagagctgaaccaagcacggtttccatttcaaaaagggagacagcctctaccgcgattgtagaagagactgtggtgtgaattacgggaccgggaggcgtcgaacggaggaacggttcatctctagagactaattttctggagtttctgcccctgctctgcgtcagccctcacgtcacttcgccagcagtagcagaggcggcggcggcggctcccggaattgggttggagcaggagcctcgctggctgcttcgctcgcgctctacgcgctcagtccccggcggtagcaggagcctggacccaggcgccgccggcgggcgtgaggcgccggagcccggcctcgaggtgcataccggacccccattcgcatctaacaaggaatctgcgccccagagagtcccgggagcgccgccggtcggtgcccggcgcgccgggccatgcagcgacggccgccgcggagctccgagcagcggtagcgcccccctgtaaagcggttcgctatgccggggccactgtgaaccctgccgcctgccggaacactcttcgctccggaccagctcagcctctgataagctggactcggcacgcccgcaacaagcaccgaggagttaagagagccgcaagcgcagggaaggcctccccgcacgggtgggggaaagcggccggtgcagcgcggggacaggcactcgggctggcactggctgctagggatgtcgtcctggatcaggtggcatggacccgccatggcgcggcctatggggcttctgctggcctggcttgtgggcttctggagggccgctttcgcctgtcccacgtcctgcaaatgcagtgcctctcggatctggtgcagcgacccttctcctggcatcgtggcatttccgagattggagcctaacagtgtagatcctgagaacatcaccgaaattttcatcgcaaaccagaaaaggttagaaatcatcaacgaagatgatgttgaagcttatgtgggactgagaaatctgacaattgtggattctggattaaaatttgtggctcataaagcatttctgaaaaacagcaacctgaagcacatcaattttaccccgaacaaactgacgagtttgcttaggaaacatttccgtcaccttgacttgtctgaaccgatcctggtgggcaatccatttacatgctcccgggacattatgtggaacaagactcttaaagaggcttaaatccagtccaaaccctcaaggatttgttcctgccttggaggaaagcccgaagaaatattccctcgggcaaacc

SEQ ID NO: 349092 - DNA, 588 bp, Homo Sapiens
aagtcactggcaggtatctgtgcattcatagaacttataaaggtcccaggatcacttttaagggatttttattagtttaaaggtaaataaagtcagctgaatctacatgtctcttgttttatttctctctaaacttgaaaacagtaaatctgcagatactgtgaggcacaaattatactgtcaacctactgttgctatggttatatactcccacttcatacattaccaagagtcgatcactgatttaaaatttttaatttctatagttaagatttactgcataatatagaatataaagttaagttaacatactaacatttctcctttggaggaagttttaatctacttcaggatgcatattattatcaagatactttcatatacaggatagcctaattttatttgtttaaatatgcttaatatgccccagattgcaaatgcatccagtcagtaatatcactgtctgtatgtggaggacatgttcccatggatcatatgtgaagatgtcaataagcttgcattaagccacctgctttgtaagtggattgattaataaataacttatatttcaaaaaacccacgcgtccg

SEQ ID NO: 349093 - DNA, 2089 bp, Homo Sapiens
gctcacaaacaataagacatcacaaataatacagcagaaccacagtgccaagaaatgccaagaccaatatgctactgaaacaactggtagaaatgttacagacaactattcactatgtattgtaatattcttgtagttctgaggtgaaggtaaaccaacaggagagattactccttgtaactggctttggtttaagtgatctttcacatttttttctaaccataccttcttataaaaaatgtagcaattacatgttactgagggaaaatagtactaggttttaatattcacaaccaactactccagctgacacaggatgccatcaaccattaaaatttattgatcatacttagattttctaaggctgatcaacagatagcaaagatggaacccttttgggaaaaaataaaatcccttctaccccagttttgacactgttaagaagttataaaggaatgttaaattatttaagatatttcaaaaaagaattaagaatggaagagtaaattctgctggaaaagatagggcagctttacagtctgcaaagtaaataatctacagagatgcagcttaactttttttattataataaacatacttatttccataaggtgctgtgactttgcagctagtgcatactaatgccacccactgtacccaatgtgcaaaaggaaataatggagatggctaacctccagttttctgatccttgatttgcataagtggtgatgtacaccaaatacacaaaagctggagtataaatatttatttttaaaaattaggccaaactgaatatagatatttaatctggtttcacaaactcttaaaataattttctgaggaaacaatgatgaggaatgtgtaggaaaggcaatgtttctatgctagcggtaccaaacctggaactttaagtatcattttttagctcattaactatatagaagattactaagaccagtaagggagccattttcttcccctcctctatttttattacttatctctctcctctttactcttaaaattggcaatcttctgacaacccaagctaataaaataatatagctatatataattcaaataactaaagaacttttgagtccatatatgcaggatttttgaatacctcactacatttgctcttataccctcactgtcctggtatcataaatattattaagggaagataacttagaaggggaaagcaattccaacctgggataaaaaagtgattacaaataattatcttgttgatagtaagggcttatggtaacaagtagctctgatttttcacataaagatccccccccaaaaaaacaaaatacaaacaattccagtttttttcccccagaatgtgacttatttccattatacaaagtagtataacaaaataagctctcttctgcacaaaaaacgattaatggtttataagacaaataagtagaatgcttctctttgcctttaaattaaaatactatgaacctaggtaacaaaacatacatggctttcttcaaaagggccacaagatttcttctggttattgtgacagctacccaatttaatgggaaataacactcaagcagtcatttggtaagtttcccatgaatttcagcatttacagtgccacaaacacaactgccacaattatgacaactctctgaaaagcacaaataaagcaaatttaaaacattaatcctcataagcagtacaaggcagaacaaaagtgctgagtggtaggaaaatgaataaaaatttcctatcaggagaataaagtttgtgtaaactatcttatatcctgaagatcactttaatgaccacctataaaatacaaagtttcctaaatactctctgatttatagatatttctcttacagtccactgctcctataaaattacagcaaaaaatattaaaattatttaccttcttcttaaatatccatggcacttgtcaagtacatgctactgtgaatctactggtcattatataatttaaaaatagtgaaaaacatctgagggaggtggctacaataacgaacatgacatatcctatagtattaggcagagaagctatcctaaaacaaaatgaaac

SEQ ID NO: 349094 - DNA, 2330 bp, Homo Sapiens
  misc_feature (44)..(210): n is a, c, g, or t
tggttgaatctcggctcaccgcagaactatgcctcccgggttcnnnnnnnnnnnnnnnnnnnnnnnnnnnnnnnnnnnnnnnnnnnnnnnnnnnnnnnnnnnnnnnnnnnnnnnnnnnnnnnnnnnnnnnnnnnnnnnnnnnnnnnnnnnnnnnnnnnnnnnnnnnnnnnnnnnnnnnnnnnnnnnnnnnnnnnnnnnnnnnnnnnnnnntgagccaccgagcccagcccctccttaaaacagtttctaattagatccgttattttacccaaatgggttgagggaacaaaaaccaaccctcatcaccctatttggtgaaaataaatataaaaaaagatgatcctctcttaaagggtcaccttccttcaggggtttgtaagactcagcactttaaaaagcttgaacagaagtccggtattgccactgtggactgtttttgaggcaagttccctaatgtggacagccccacacctaagagcagcagatctaacttggaacgtctcaaccatgggttaaaatcagacgggatgaaagaacacctgcagtgactctcaacagctacggaagtctcacattgcagggctgactgatgaggtgctggcttcttattctccggccctctttcctaagcaatgtttgtcagggaataccaggtccgcttcctgaaatgccagggcccctctaggaccttatcattccacagccacatcagtattaggaaaaccaccaatggctacctggaggtggcaccaacttggaaagggaaggctgggcaggggtttggacactaagcccatgagctgtttggacaacttcaatctctggaattgagtttaaatttctgtaaaaaactttaaagtcaactccagagagacattttgtgtgactggtccaaataaaacagcacatttaatgaggtcatattcttcttaaactttttaagagaagcaaaaacaatggaaaagccattaaaatttacacaaagaccattaaaactctactagtgtcaattaaaacaaagccaataaaacatgaacaacttcaaagttaccatcactttccacactgttctacagttataggaatatattcaagcaccatattgataataggtaggtaaacgatgaagtcctactttggcggtctgacccacgctcacacaaacgaggagcttcctagtcaagatgcccccagtccttggcaatgtgcctgcttcctgggcattgctcagtggcaatggaagagccaataaatcaaatcgctggtggaatattttactttgaaatggagtgatgtttggttaataatttgagatccactaatccttaaatggggtgacccatttaaaatggcctctgtgtaaattcacagttcattaaatagagtctggtttgaacaggtcattatgtagttagtatataagtaatggattgagcaaggatggctggggatacccatggggacacactggctgagtctggtggctttcataacactgtcaagctttcttttaatgtgagattcatttaaatcaccaacttaaatttaggtggttttgcttagtaacctcttttggtttacagtagaaaatgcagtgcaaaaattttaaatgaggaatattccatttacaattaatttaaaacttatgaagctgttttaactggcccatctaaatgtgttaattaacatcaatgatggtttcttatttttcacactttgttactctgatcattaacagtgatggaaaagctaaattaagttaatggggaacggattataaattcttaaaggacttcttagtttgttttcaactggaaaatatatagagaaagatgaaggggcatttttgcctctactcatcaatttttggtaccaaatttcttaaaaaccagatggtttaaagaaaatttttccaaaaattatgttaacattctgctcagacatggctgctaaaaaaatagcatatacacatataatactgaacagcttctgcagtgcctgtaaactctcagctcattttctctttctaaaaaaaatatatattataactgatcccagaactcaatctctattgtgcagcagtatcaaaggtccttaaattctcaacaatgaaggaaaaacaaaacccattccccggaccgcttgagcaggactagggaaggaggagtccgtggatgcaaaggttcgctgccccgacgccctcagattcctcgaggctgcacctctgcgggcagctggcgcggcgcaggccaagcccctcacacccgcctcgtgccgaattcaccacccaggcctcgttaccttataaccgtaatagtactgcctcgtcg

SEQ ID NO: 349095 - DNA, 905 bp, Homo Sapiens
  misc_feature (895)..(895): n is a, c, g, or t
aaaggtgcacagggcaccgtggcggacaggccccagcttgctggcctatgagacgagctggtttgtttccatccctgaagcctttggacgagctggatgaggtcttgataactgagaactttggaaagcttcctctaatgagactgggaagggctggcagggtgggggcaggggcctccccgaggaagcagctgggggaaggatggattggcatttccagaggagactttacagatggcgcctgatctcatgggacacgattcagcgctcaatttggggctaatttgccgaatgaggtagttccatcctgacctctccaggcatggtgggtctgggaagacaggagccaagccttcctcctaaaacccctggtgatgaacagtggctgagaaagccagatgtggactcccagaatgcaatgggaaaaaaataaagaaggagggctgcaaaggattctgggtgcggctgtgagctgaatggcaccttctacccatgattattgatcctgacacctgggcttagaggacaagagccctccctaccctgatactccacaagccctggagacaagggagccagctggaggaagagccttggggcttccagggcacaagcatgtgacagtgacccctacaaaactcgggaaggaccacaaagttccagcctctgtttgtttcagagcggcaagcacagcatgggagtcagggggtcttcagcctcagagacaagggcagggctgtgggtctgtcttctgggcctgcgaatattggggagcccccagctaggctgtccgggtcacccttctggaatcaccagctctctcccctctcctcagtgtgccaggagagagggtggggggcatccactcggcatgggcccatggtgggagcccagncccccttccc

SEQ ID NO: 349096 - DNA, 1020 bp, Homo Sapiens
  misc_feature (119)..(368): n is a, c, g, or t
caagattttaatcacctggtcaccagaccctcacggcccatatccaattcgaatttcagaaatttctctgtttgctttaaataactctttacaaataagggtcgggcacggtggctcannnnnnnnnnnnnnnnnnnnnnnnnnnnnnnnnnnnnnnnnnnnnnnnnnnnnnnnnnnnnnnnnnnnnnnnnnnnnnnnnnnnnnnnnnnnnnnnnnnnnnnnnnnnnnnnnnnnnnnnnnnnnnnnnnnnnnnnnnnnnnnnnnnnnnnnnnnnnnnnnnnnnnnnnnnnnnnnnnnnnnnnnnnnnnnnnnnnnnnnnnnnnnnnnnnnnnnnnnnnnnnnnnnnnnnnnnnnnnnnnnnnnnnnnnagactccatctcaaaaaaattataaataactctttgcaaataggaaagtgaagctcaagggtaaccagtgaggctatgaaattgccagtgaattaagaccagggctagagtcaacagtccagaacccctatccgtatgaacaggggcccgtttctggttgaaatcaaggttaggatgcaactgagaaaataaaagactgcactttggagaggcaagcacgctatccgggttgttgttttgttttatgtcttggtgcttaggtgaggacttagctgggtttattcaaagtgggcgggtctgggctattcttgagaatgtcccttccatttctgagaacaagtcagccccttctacctgcctccacccaggagactgatgcacaagatctgtttgtgaaagcctgatttaaaaagaaacaaaaaattccttaagccaaatggtgttccaagttggttgctgtgacaacctccaggaagagccacttgttaccctctattctttctagtgctttcagtcagtggcaacacataggccccttggaccgtggggatggcggccctgagattctgtcagtgggaccacctggcctcctttctacctccactcagcacctgttgccatggagtaaatgcagggatcctctagatcacct

SEQ ID NO: 349097 - DNA, 996 bp, Homo Sapiens
aagaaaatcttgaagaaactctgcaactagaaatagaaaactgcaaggaggaaatagcttctatttctagcctaaaagctgaattagaaagaataaaagtggaaaaaggacagttggagtccacattaagagagaagtctcaacagcttgagagtcttcaggaaataaagatcagtttggaagagcagttaaagaaagagactgctgctaaggctaccgttgaacaactaatgtttgaagagaagaacaaagctcagagattacagacagaattagatgtcagtgagcaagtccagagagattttgtaaagctttcacagacccttcaggtgcagttagagcggatccggcaagctgactccttggagagaatccgggcaattctgaatgatactaaactgacagacattaaccagcttcctgagacatgacaccctcatggcaggattctagcctgcactttgggtttttaactcatctttagagcaacagtaattattatttaactcttaactgaagaaagagaagtcacaacaaaaggaagactggagaaatgcttacttctagagggagaagactgtgcggcacaggaaacagcaaacagtggggtgatctgcagcccagagaccttcaaatgcgaacactataaactccaggcttgattccaacaggcgtgggatcagatttggtgatggaaaaagcgctgtttccttgcctgctttctccaagacagattttcggaacacatttccctaccctaaagcgacatcccagtagtgtttggaattttctgttcatagatattggaagagagaatttgctttatctgttgtctagagctcatcagtaacagtattcagttagcagacagaagtgtagtatgctgtatgaatattttatattaaaatatgaaggtttgagagcaggccattggctaactggactgtatttcccttggcttcagtacatttttgttttcctttttaccattttatc

SEQ ID NO: 349098 - DNA, 1614 bp, Homo Sapiens
  misc_feature (1435)..(1435): n is a, c, g, or t
  misc_feature (1585)..(1585): n is a, c, g, or t
  misc_feature (1604)..(1604): n is a, c, g, or t
tcggctctacctgttctctcggctctacctgtctctcggctctaccttgtctctcagcgttactgatgagagacatgcagcgaatggagatgtgctaacttcagaacagctccgacaagttgaagaactgaagaagaaagatcaggaggatgatgaacaacaaagactcaataagagaaaggatcacaaaaaagcagatgttgaggaagaaataaaaataccagtagtgtgtgctttaactcaagaagaatcttcagcccagttatcaaatgaagaggagcatttagacagcacccgtggctcagttcattccttagatgcaggcttgctgttgccatctggagatcctttcagtaaatcggacaatgacatgtgtaaagatggactcaggagagcacagtctacagacagcttgggaacctcgggctcattgcaatccaaagctttaggctataactacaaagcaaaatctgctggaaacctggacgagtcagattctggaccactggtaggagcagattcagtgtctgagaactttgatactgcatcccttgggtcactccagatgccaagtgggtttatgttaaccaaagatcaggaaagagcaatcaaggcgatgacaccagaacaagaagagacagcgtccctcctctccagcgttacccagggcatggacgagtgcctatgtgtcccctagtggttatcgtatagttagtgaaacagaatggaatctcttgcagaaacgaggtacataatgctggaaataaaccttggtagacgttgtgatatgtgttccaattacgaaaaacagttacaaggaacttcagattcaggaggctgaaaccgagagaacaggtgaaaaaacttacagctgatgctaaggcaagctaatgaccagttagagaagacaatgaaagataagcaggagctggaagacttcataaagcaaagcagcgaagattcgagtcaccagatctctgcactcgtcctaagagcccaggcctccgagatcttacttgaagagttacagcaggggctttcccaggcaaagagggatgttcaggaacagatggcggtgctgatgcagtcacgggaacaggtttcagaagagctggtgaggttacagaaagataatgacagtctccagggaaagcacagcctgcatgtgtcattacagcaagcagaagacttcatcctcccagacactacagaggcactgcgggagttggtattaaaataccgtgaggacatcattaatgtgcggacagcagcagaccacgtagaagaaaagctgaaggctgagatacttttcctaaaagagcagatccaagcagaacagtgtttaaaagaaaatcttgaagaaactctgcaactagaaatagaaaactgcaaggaggaaatagcttctatttctagcctaaaagctgaattaganagaataaaagtggaaaaaggacaggctaccgttggacaactaatgttttgagagaagaaataagctcagagattacagaccgaattagatgtcagtgagcaagtccagagggattttgtaaaagctttcacagacccttcaggtgcagtntagagcggatccggcaagnctgactcctt

SEQ ID NO: 349099 - DNA, 408 bp, Homo Sapiens
  misc_feature (20)..(20): n is a, c, g, or t
ggattggcaatggagccccnaggttccccaagctgtctgtagactgtgctctccctgagtcccatctttaaacatgtcattgtcccgatttactgaaaggatctcccagatggcaacagcaagcctgcatcctaaggaatgaactgagcccacgggtgctgtctaaatgctcctgaaatgtgaaaatacatatggcccaagttagacaattctctgcgtttttaaagacaaaaactataataaatgtattccgccactcattacacatgataatcattaatgtgctaccttcacagactcattgaacaaacactaagtgtcatttctacatgctggacacaaaaccaggccctcaggatacaactgtgagcaagatataatccctgacctcgagatacatacggcttc

SEQ ID NO: 349100 - DNA, 369 bp, Homo Sapiens
ttttaactgataacaatgaaagtggtaaatcagtgtaaaagtgtcatattctcagacttgtgaggcggtttatagtcagaaagatttacggatttttttcctgtaacataaaagattgtgaactttttttaattaaaaaatatttcctagggctgtagttatttgggagtttcataacctgttatggtgcttttggtggaatttttattatttagcattttaggagaccgctgtcaactggttttaatctatggatgctaatgtgttttccactgtaccctcatctcagggaataaaactgctttaacgggggatgatgtcagggtaccaaatacactataggaggtccaaaatacccttttacaaagg

SEQ ID NO: 349101 - DNA, 2350 bp, Homo Sapiens
  misc_feature (263)..(273): n is a, c, g, or t
  misc_feature (1779)..(1795): n is a, c, g, or t
  misc_feature (1812)..(1868): n is a, c, g, or t
  misc_feature (1939)..(1950): n is a, c, g, or t
  misc_feature (1953)..(2045): n is a, c, g, or t
tccgcagcaagttcaccgtccgaacaaggctgctggtgagactccaggaaggcaatgagtcactgactgtggaagtctccattgacaggaatcctcctcaattacaagggtaggtgcttgacaaggacactgcaaacatctgtacagctgtatgacctgcagaaccacattcggcagccctgtgtggcacaaacaaggaagagggggatttgggagatggacaaagggagatggcgagatctgaaatgaagtggaacttctgnnnnnnnnnnnctgctgagtttttaaaataattccattccttgtctccatgtatcttcctcctggaacagcttccggaagttcaacattctgacttcaaaccagaaaactttgacccccgcagaaggggcaagagtcagggttcgatttgggactttggttacctgactctggtggagcaacgttcaggtggttcaggaaagggcagcaataaggggccactaggtgtgacagaggaactgcacatcatcagcttcacggtcaaatatacctaccagggtctgaagcaggagctgaaaacggacaccctccctgtggtgattatttccaacatgaaccagctctcaattgcctgggcttcagttctctggttcaatttgctcagcccaaaccttcagaaccagcagttcttctccaaccccgcccaaggcaccctggagcttgctgggccctgctctcagttggcagttctcctcctatgttggccgaggcctcaactcagaccagctgagcatgctgagaaacaagctgttcgggcagaactgtaggactgaggatccattattgtcctgggctgacttcactaagcgagagagccctcctggcaagttaccattctggacatggctggacaaaattctggagttggtacatgaccacctgaaggatctctggaatgatggacgcatcatgggctttgtgagtcggagccaggagcgccggctgctgaagaagaccatgtctggcacctttctactgcgcttccagtgaatcgtcagaagggggcattacctgctcctgggtggagcaccaggatgatgacaaggagctcatctactctgagcaaccgtacacgaaggaggtgctgcagtcactcccgctgactgaaatcatccgccattaccagttgctcactgaggagaatatacctgcccactgcgcttcctctatccccgaatcccccgggatgaagcttttgggtgctactaccaggagaaagttaatctccaggaacggaggaaatacctgaaacacaggctcattgtggtctctaatagacaggtggatgaactgcaacaaccgctggagcttaagccagagccagagctggagtcattggcccttggtggggagcacagacacaggataggactccatttctttcttccattccttcatgtctaggataacttgctttcttctttcctttactcctggctcaagccctgaatttcttcttttcctgcaggggttgagagctttctgccttagcctaccatgtgaaactctaccctgaagaaagggatggataggaagtagacctctttttcttaccagtctcctcccctactctgcccctaagctggctgtacctgttcctcccccataaaatgatcctgccaatctaatgtgagtgtgaagctttgcacactagtttatgctacctagtctccactttctcaatgcttaggagacagatcactcctggaggctggggatggtaggattgctggggannnnnnnnnnnnnnnnnaaacagggtctcactcnnnnnnnnnnnnnnnnnnnnnnnnnnnnnnnnnnnnnnnnnnnnnnnnnnnnnnnnntgggttcaagcaatcctcctacctcagcctcctgggtagctagcaccatggcatgcgccaccatgccctannnnnnnnnnnnaannnnnnnnnnnnnnnnnnnnnnnnnnnnnnnnnnnnnnnnnnnnnnnnnnnnnnnnnnnnnnnnnnnnnnnnnnnnnnnnnnnnnnnnnnnnntgacgccactgtgcttggccaggttttttttcggagagggagttccccctctgggtcgcccacgcgttggaagttcccaacggggtgtagactcctccggcctcactgtgacccccccgcctcccggggtccaaggtgactcctcctgccctcgaagccctcccccagtactgtgggatttcctgattttgcccaccatgcccagctattttggtatttctagaacaaacgggggtttcccccagtttgtgccggcgtgtctcctcaacttcctgacctcgagtgttttgtccccctcggctcca

SEQ ID NO: 349102 - DNA, 1712 bp, Homo Sapiens
  misc_feature (209)..(220): n is a, c, g, or t
  misc_feature (421)..(437): n is a, c, g, or t
  misc_feature (486)..(501): n is a, c, g, or t
  misc_feature (596)..(604): n is a, c, g, or t
  misc_feature (643)..(643): n is a, c, g, or t
tataaatattattatatagtgctacacgtcttgtcacctcctcttatctacgcttgccctcttatatacggtagatcttgggtaacttataatttttgcattttgacattcgtttctatcacattagaataggtcgctaccgtgttaataggtgatttataggttatgggtgtgtaattactatattgctatatgttgttgttttcatnnnnnnnnnnnntatataattaagcgggttgttggccctcgcccactcggtatggggttctctacacaccccagggtgtggtggttgaaaagggatatagtctatcaacccacacagtgagggtggtatgacccagcataaggagggaatatatgcaccccccaaccgctcttttgacagtgataccacaaatagttggtcgccttctttttnnnnnnnnnnnnnnnnntttcccccaaaaatttttttctttttccccccgtctctcagagggatannnnnnnnnnnnnnnnaaccctttgaaaaaaaggggaagatttgggggccgaaaaaattgttgggagaaagttttcccccctcccccttgggttggccgggattatttttnnnnnnnnnaacccggtaacccccagtttagggccaagatagggaganaagattggtaagaaaaggagtgtaattcctatccatccttttttcaaggtaggagtttcacatggtaggctaaggcagaaagctctcaacccctgcaggaaaagaagaaattcagggcttgagccaggagtaaaggaaagaagaaagcaagttatcctagacatgaaggaatggaagaaagaaatggagtcctatcctgtgtctgtgctccccaccaagggccaatgccagtatgcaccagtttagcctaaccaactattaaaatgttgaaatccttccatactggaaagaagccactgccctgagccctccaagtacctgtcaactgccctggcctgcccccaggacccctatacctcccagcacagcaggcagcctccaggatcctatttagacctatggctcagcatctgttctgattcattgttgtcccctctgtacccatgttatgctttcacctctcaccccaatggagtcacacaggcctgagtttgaacagttaacacagcttggaagggacacaggcctgattcccatccttggagaacaatatcatgctatgaggagtaggaagggcaagagatatgaaaagaacagaggaaatgtggttcctagaagtcagaaggcatcaagggtccatcagtgtagaagtggctggggcgggagacgtaaacctcatccacggtgttctggccagccaacagtgggtcaccattcggcatgatttcttcaatctttacacagtttctgaagatttccattggctcagtgttcaaatgtctcagatcacagggcaaatctggctctggcactggctgtgatacaggtccttggtctggctctggcactgtttgtgataccatgcatagtgtgggctctatcacaggctccagagtggactccagcacagactctagctctggccccagatccagccctgccttcagcagtggctctaagtccaggctgagctctggctctggcaccagccctagttccagctctaatgactccagctctggctctggcgttaagctccagcggttgttgcagttctctctacctgaag

SEQ ID NO: 349103 - DNA, 387 bp, Homo Sapiens
gcaggagagagaactgttggtgctgcaggtgatgggagcagcgataggcaggctcagaaggcaacctatcacaccgagcttccacagcccatcctctacgagctcttgatcatgtcggacccactcccctaactgaaggttggggctgagcaaatcgaaacagagaactgaatgtcccaggcatattgagagtcgggttcatgtgggaaataaatcaccacagggagggtgtacgtctggggagaagacaggagtcacagagagggatgtgatgtttctaactgcaggtatttgttagaggaaaggagtgctaacccaccccaagaggcttctgtttatccccttcttatgacttcttccaaagctggagttctctctccctggcaa

SEQ ID NO: 349104 - DNA, 987 bp, Homo Sapiens
gccaggctctgagggagactacatggtgctgccccggcggactttgagcctgcagcctggcggtgggggtggaggtggtgaggatgcccccaggcccggcccgagggaccccccggcgagctgccaagacagtggcccacactgaaggctaccccagcttcctgtccgtggaccactcgggcctggggctgggccctgcctatggatctctccagaatccctatggaatgaccttccaaccgccaccgccgacacccagcgcccgccaagtgcccgagccaggggagcgcagccggaccatgcctcgcaccgtgcccggctctaccatgaagatgggctccctggagcgaaagaaattacggtattcagacctggactttgagaaggtgatgcacacccggaaacggcattcagaactctaccacgagctcaaccagaagttccacactttcgaccgctaccgcagccagtccacggccaagagggagaagcggtggagtgtgtcctcgggtggggcggccgagcggagcgtgtgcaccgataagcccagccctggggagcgccccagcttgtcccaacatcggcgccatcagagctggagcaccttcaaatctatgacactgggctcgctgccccccaagccccgagaacggctgactctgcaccgggcagcagcctgggagcccacagaaccaccggatggtgacttccagacagaggtgtgagtgccacgctggactgcccactgcatataaatatatatatctctctattttcacactccactttggaactacccaggagccagcgccctctcccctctcccgagggctgggcagggaggcgccgtggactcagccaggctgggggagccggacatggcttggcctggggtcccagggcccttccttgtttctcagaggcccctcagccactggaaccccatcttcagcccagcctgtccgtccctgtcccgggcttgggagg

SEQ ID NO: 349105 - DNA, 1765 bp, Homo Sapiens
  misc_feature (783)..(813): n is a, c, g, or t
  misc_feature (1067)..(1079): n is a, c, g, or t
ccttcagccaagattcggcacaagagtgccgagccagggagcccagccgaccatgcttggaccgtgcccggttctacaagaagatgggctccctgaaggaaaagaattagggaattcagacctgactttgagaaggtaatgcacaccgggaacgggcattcagaactcaccacgagctcaaccagaagttccacactttcgaccgctaccgcagccagtccacggcaaagagggagaagcggtggagtgtgtcctcgggtggggaggccgagcggagcgtgtgcaccgataagcccagccctggggagcgccccagcttgtcccaacatcggcgccatcagagctggagcaccttcaaatctatgacactgggctcgctgccccccaagccccgagaacggctgactctgcaccgggcagcagcctgggagcccacagaaccaccggatggtgacttccagacagaggtgtgagtgccacgctggactgcccactgcatataaatatatatatctctctattttcacactccactttggaactacccaggagccagcgccctctcccctctcccgagggctgggcagggaggcgccgtggactcagccaggctgggggagccggacatggcttggcctggggtcccagggcccttccttgtttctcagaggcccctcagccactggaaccccatcttcagcccagcctgtccgtccctgtcccgggctggggaggggggaggggaactttgttgggaataaacttcactctgtgcgaaacacnnnnnnnnnnnnnnnnnnnnnnnnnnnnnnngggggcgccgcccaaaaagttccccccgagaggggcgcccaaggtgttataccgcgttcccccaggttttcctgtgggtcccaacggtggcgccccataatagggagagcgctcggtattatttaacgcgcatagggcatttggcgccggcgctgtttacacaaccgtctgggtaagaccgtggggagaacaccttggcaccgcctggggggcctcttcggaaaagaggggagccccttttaactctccctgtnnnnnnnnnnnnncagccaatattctgggggcgccacaacctcaccccataacagaagagattttaaaacggcctctacaagggggggacaatttttataaagcttttttaaaaacgcggttgtcataaccggggtgtgttaccacacataccgcgcgggcaatattgcgacttgggcagcctttggaacagagcttttgtgggccagaatcgcggggagtatattgaactttgtggaacaaacattttttttatacccgcgcggggcctttgcttttattataaaaccgcggcgaaccgagcgtgcggcgacctcacgctggcaggccgcccagcgcgacaacagcagacgcctccatccaggcagacgccatctcgaacgagctggcggcgcggataagcgcgatagtacgagacgcacggcgcagggctgcgtctcgtggatggtacgggatacgactgggacagctcgagacgtgcgtgcgcagcgctgtcgaactgaagcagcaaacacgacgcacactgcgacgaacaactgaaattacaccgacgaacagtgcggaggctgcgcagccatccaagcgagcgctgctcccggcaagccacacccgccaccgcgcaggccgccgcgactagaccacacaggtaacagcacacgcaaccacaaaccggcacgcgcacacacacctaacacacccc

SEQ ID NO: 349106 - DNA, 473 bp, Homo Sapiens
  misc_feature (15)..(15): n is a, c, g, or t
  misc_feature (25)..(25): n is a, c, g, or t
  misc_feature (131)..(131): n is a, c, g, or t
  misc_feature (171)..(171): n is a, c, g, or t
  misc_feature (226)..(226): n is a, c, g, or t
aacttttcccaaaanaggcgccatnaaaactggaacacctttcaaaatctatgaaaactggctcgctgccccccaaaaccccgaaaaacggctgaactctgcaaccgggcaaacaaacctgggaaacccanagaaccaccggatggtgacttcccaaacagaggtgtgaantgccacgctggactgcccactgcatataaatatatatatctctctattttcaaantccactttggaactacccaggagccaacgccctcttccctctcccgagggctgggcagggaggcgccgtggactcagccaggctgggggagccggacatggcttggcctggggtcccagggcccttccttgtttctcagaggcccctcagccactggaaccccatcttcagcccagcctgtccgtccctgtcccgggctggggaggggggaggggaactttgttgggaataaacttcactctgtggg

SEQ ID NO: 349107 - DNA, 1283 bp, Homo Sapiens
ccgctggccgtcacatcccgggtgatgacagtgactgtgcgcccccctacccagcctccagctgagcccctcatcactgtggagctctcctacatcatcaatgggaccacggatccccattgcgccagctgggactactccagagcagatgccagctcaggagactgggacactgaaaattgccagaccctggagacccaggcagctcacacccgctgccagtgccagcacctgtccacctttgctgtactagcccagccgcccaaggacctgaccctggagctggcgggctccccctcggtccccctggtgatcggctgtgcagtgtcgtgcatggcgctgctcaccctgctcgccatctatgccgccttttggaggttcataaaatctgaacgctccatcatcttgctgaacttctgcctgtccatcttggcatccaacatcctgatcctcgtgggccagtcccgggtgctgagcaagggcgtgtgcaccatgacggctgccttcctgcacttcttctttctctcctccttttgctgggtgcttaccgaggcctggcagtcctacctggctgtcattgggcggatgcgcacccgcctcgttcgcaagcgcttcctctgcctgggctggggtctgcctgccctggtggtggccgtgtctgttggctttacccgaacgaaaggatacggtacatccagctactgctggctctccctggagggcggcctgctctacgcctttgtgggccctgcagccgtcattgtcctggtgaacatgctcatcggaatcatcgtcttcaacaagctcatggcacgtgatggcatctccgacaaatccaagaagcagagggccggggcctcactctggagctcctgcgtggtgctgcccctgctggcgctcacctggatgtctgccgtcctggctatgacagaccgccgttccgtcctcttccaggacctctttgctgtcttcaactccgcgcagggctttgtcatcactgctgtgcactgcttcctgcgccgagaggtccaggatgtggtgaagtgccagatgggggtgtgccgggctgatgagagcgaagactcccctgactcgtgtaagaacgggcagctgcagatcctgtcagactttgaacaaggatgtggatctggcttgtcaaacagtgctgttcaggaggtcaacactttgcaacccgtccaccatcacgggcacactatcccggctgtccctggatgaggattgaggagcccaagtcctgcctcgtgggccctgaaggcagctca

SEQ ID NO: 349108 - DNA, 1714 bp, Homo Sapiens
cagccgtcattgtcctggagaacatgctcatcggaatcatcgtcttcaacaagctcatggcacgtgatggcatctccgacaaatccaagaagcagagggccgggtcggagcggtgcccctgggccagcctgctcctcccctgctcagcgtgtggagcggtccccagccccctgctcagctcagcctcggccaggaacgccatggcctcactctggagctcctgcgtggtgctgcccctgctggcgctcacctggatgtctgccgtcctggctatgacagaccgccgttccgtcctcttccaggccctctttgctgtcttcaactccgcgcagggctttgtcatcactgctgtgcactgcttcctgcgccgagaggtccaggatgtggtgaagtgccagatgggggtgtgccgggctgatgagagcgaagactcccctgactcgtgtaagaacgggcagctgcagatcctgtcagactttgaaaaggatgtggatctggcttgtcaaacagtgctgttcaaggaggtcaacacttgcaacccgtccaccatcacgggcacactatcccgcctgtccctggatgaggatgaggagcccaagtcctgcctcgtgggccctgagggcagcctcagcttctcaccactgcctgggaatatcctggtgcccatggcagcctcaccagggctgggggagcctccgcccccacaggaggccaaccctgtttacatgtgtggggagggtggcctgcggcagctggacctcacatggctgcggcccactgagccaggctctgagggagactacatggtgctgccccggcggactttgagcctgcagcctggcggtgggggtggaggtggtgaggatgcccccagggcccggcccgaggggaccccccggcgagctgccaagacagtggcccacactgaaggctaccccagcttcctgtccgtggaccactcgggcctggggctgggccctgcctatggatctctccagaatccctatggaatgaccttccaaccgccaccgccgacacccagcgcccgccaagtgcccgagccaggggagcgcagccggaccatgcctcgcaccgtgcccggctctaccatgaagatgggggctccctggagcgaaagaaattacgggtattcaagacctggactttgaggtgatgcacacccggaaacggcattcagaactctaccacgagctcaaccagaagttccacactttcgaccgctaccgcagccagtccacggccaagagggagaagcggtggagtgtgtcctcgggtgtgggcggccgagcggagcgtgtgcaccgataagcccagccctggggagcgccccagcttgtcccaacatcggcgccatcagagctggagcaccttcaaatctatgacactgggctcgctgccccccaagcccgagaacggctgactctgcaccgggcagcagcctgggaacccacagaaccaccggatggtgacttccagacagaggtgtgagtgccacgctggactgcccacgtgcatatagtattttatctctctattttcacactcccactttggaactaccccaggagccagtgcctctcccttctccgaggctggcaggagccccgtggactccagccggctggggagccggaccatggctttggcttggggtccgggcctccttgtttctcaaaggccttcgccttggacc

SEQ ID NO: 349109 - DNA, 1833 bp, Homo Sapiens
  misc_feature (1453)..(1453): n is a, c, g, or t
  misc_feature (1527)..(1527): n is a, c, g, or t
acagctggatgtgtgactggaggggaggaaatttatcttctttgtgacaaagttcagaaagatgacatccagattcgattttatgaagaggaagaaaatggtggagtctgggaaggatttggagatttttcccccacagatgttcatagacaatttgccattgtcttcaaaactccaaagtataaagatattaatattacaaaaccagcctctgtgtttgtccagcttcggaggaaatctgacttggaaactagtgaaccaaaacctttcctctactatcctgaaatcaaagataaagaagaagtgcagaggaaacgtcagaagctcatgcccaatttttcggatagtttcggcggtggtagtggtgccggagctggaggcggaggcatgtttggtagtggcggtggaggagggggcactggaagtacaggtccagggtatagcttcccacactatggatttcctacttatggtgggattactttccatcctggaactactaaatctaatgctgggatgaagcatggaaccatggacactgaatctaaaaaggaccctgaaggttgtgacaaaagtgatgacaaaaacactgtaaacctctttgggaaagttattgaaaccacagagcaagatcaggagcccagcgaggccaccgttgggaatggtgaggtcactctaacgtatgcaacagggaacaaaagaagagagtgctggagttcaggataacctctttctagagaaagctatgcagcttgcaaagaggcatgccaatggcccttttcgactacgcggtggacaggagacgtgaaagatgctgctgggccgtccagcgccatctcactgctgtgcaagatgagaatgggggacagtgtccttacacttagcaatcatccaccttcattctcaacttgggaagggatctactagaagtcacatctggtttgatttctgatgacattatcaacatgagaaatgatctgtaccagacgcccttgcacttggcagtgatcactaagcaggaagatgtggtggaggatttgctgagggctggggccgacctgagccttctggaccgcttgggtaactctgttttgcacctagctgccaaagaaggacatgataaagttctcagtatcttactcaagcacaaaaaggcagcactacttcttgaccaccccaacggggacggtctgaatgccattcatctagccatgatgagcaatagcctgccatgtttgctgctactggtggccgctggggctgacgtcaatgctcaggagcagaagtccgggcgcacagcactgcacctggctgtggagcacgacaacatctcattggcaggctgcctgctcctggagggtgatgcccatgtggacagtactacctacgatggaaccacacccctgcatatagcagctgggagagggtccaccaggctggcagctcttctcanagcagcaggagcagatcccctggtggagaactttgagcctctctatgacctggatgactcttggggaaatgcangagaggatgaaggagttgtgcctggaaacacgccctcctagatatggccaccagctggcaggtattttgacatattaaatgggaaaccatatgaagccagagtttacatctggatgatttactagcacaaggagacatgaaaacagctggctgaaaaatgtgagctgccgctgtataagttactaaaaatttccggatccagaacaaaaactgggcttactctggcggcagaaaataaggccctggggatccttaaaaaatgcctttccggcttgagtcctggttccctctcaaaccccttatggt

SEQ ID NO: 349110 - DNA, 132 bp, Homo Sapiens
aagctcgtacctgatcttacgtgcctctttgaagaagtacggattaggagaaaatgtacttttgcgtttactgtcaccgcgtagtcgaaaagggcataggcatgcctctttgcaagctgcatagccttctct

SEQ ID NO: 349111 - DNA, 1141 bp, Homo Sapiens
  misc_feature (1004)..(1004): n is a, c, g, or t
  misc_feature (1006)..(1006): n is a, c, g, or t
  misc_feature (1008)..(1008): n is a, c, g, or t
  misc_feature (1020)..(1020): n is a, c, g, or t
  misc_feature (1034)..(1035): n is a, c, g, or t
  misc_feature (1046)..(1046): n is a, c, g, or t
  misc_feature (1049)..(1049): n is a, c, g, or t
  misc_feature (1069)..(1069): n is a, c, g, or t
  misc_feature (1076)..(1076): n is a, c, g, or t
  misc_feature (1078)..(1078): n is a, c, g, or t
  misc_feature (1087)..(1087): n is a, c, g, or t
  misc_feature (1089)..(1091): n is a, c, g, or t
  misc_feature (1097)..(1097): n is a, c, g, or t
  misc_feature (1107)..(1108): n is a, c, g, or t
  misc_feature (1113)..(1113): n is a, c, g, or t
  misc_feature (1124)..(1124): n is a, c, g, or t
  misc_feature (1134)..(1134): n is a, c, g, or t
  misc_feature (1137)..(1137): n is a, c, g, or t
agcggtgggcgcgaggccgggaaggtgaagtcaggactggtggagtcaacacagtcaatcaatagccaacctcaacctgagacaggacagaagagaactcagaatctttttgtcttttggacttcagccaagtccatgatgcctaacctgtgaagatctctcaccatccaaaaaacgcaatgtccctgctcttctctcgatgcaactctatcgtcacagtcaagaaaaataagagacacatggctgaggtgaatgcatccccacttaagcactttgtcactgccaagaagaagatcaatggcatttttgagcagctgggggcctacatccaggagagcgccaccttccttgaagacacgtacaggaatgcagaactggaccccgttaccacagaagaacaggttctggacgtcaaaggttacctatccaaagtgagaggcatcagtgaggtgctggctcggaggcacatgaaagtggctttttttggccggacgagcaatgggaagagcaccgtgatcaatgccatgctctgggacaaagttctgccctctgggattggccacaccaccaattgcttcctgcgggtagagggcacagatggccatgaggcctttctccttaccgagggctcagaggaaaagaggagtgccaagactgtgaaccagctggcccatgccctccaccaggacaagcagctccatgccggcagcctagtgagtgtgatgtggcccaactctaagtgcccacttctgaaggatgacctcgttttgatggacagccctggtattgatgtcaccacagagctggacagctggattgacaagttttgtctggatgctgatgtgtttgtgctggtggccaactcagagtccaaccctgatggcagacggaaaagcaccttcttccacaaggtgagtgagcgtctctcccggccaaacatcttcatcctgaacaaccgctgggatgcatctgcctcagagccgagtacatggaggaggtgcggngnanacattggagcgntgtaccagcttccnngtggatgagcnggngtggtggatcgatccaggcnggggacncntcttctttntnnntctaangagggctcannccagnatcaaaaaccnagggattctnaangagg

SEQ ID NO: 349112 - DNA, 461 bp, Homo Sapiens
  misc_feature (14)..(14): n is a, c, g, or t
  misc_feature (30)..(30): n is a, c, g, or t
  misc_feature (36)..(36): n is a, c, g, or t
  misc_feature (141)..(151): n is a, c, g, or t
ctctgccccggtgnacaacctgtgggtggnaggttntcccccgtgtgccgggccctgaaatggacaggggcccacttcacagcatgtccagggaaaatcactgtccacacaattcccaatggattttgtgcctctttttgnnnnnnnnnnnttctttagcgtaaacatgaattttttatcaatgtagcccctggggaatgaatgaaattttgagcttcttcaatacgtaaaattaaatttataccactgagggagagaccctttctgaaagaagtatggccaaaagcactttaatgctgctgacattgttgtttttatgttcatttgctggagcgcaagacgtgctgacacagtgagttttctctgatgtatttaaggtgatgtatttgcttgagttactcctgtatcattgctcataatattggaaactaaaataaaacctagttggaaatccttaaaaa

SEQ ID NO: 349113 - DNA, 1386 bp, Homo Sapiens
ggctggtactggtccggaagtccgggatatcgtcgacccacgcgtccgtttgattgcttgataaggcctcaggatctcagcattgcacaatgcctcatggaagcctttgagggtatcacacagacacccccaccttcctccagcctgtgcgcacctgccctccttgcagcccagcacacctgcaggtgtaagggacgattggagtttcttcccagagagtctgtcccagaaggactgtggcttgtgtgtgtccatctcgcctgttggctcagtgcttcatcccatttgcagagcctcagacacgtcttggtggtgaggctcagttacccctgggcttaggctgaggcgggccctgtgctgggggtggtagaaaggatgctgctgaggcagctggaggagtgggagtagctcagaggggagggctgttggatgtatggggagctggcagagcaggtggcagtcactgggacaaggagggacttgcctctcttctcattattgtgtcctttgctttagtgtcagtcctggacttgtgcaggcctgttttgtgtagatctgttttggaagatggcatggtctaggtggttgaaggatgtagtagaaggatggatggtggaaggtggggacgttggtggctggctgaggtgcatgggccccacacaggacagctggagaatgggccgtccacttggcctcgttctgcgaggggctcatgggtctgagagcccccacccactaggcttgattgcatccctgttgtgccctttaagagacatgtttccaccccacccccaaccttgtcccaagtgccctggactaaatttcctgtgccagtgactgcagttggccaagggacaatgtggaaaacccagtgtccatctttccaccctccctgatctccagaaccttcgactgacccccttgtctttatgctgatgttgagttttgggattgttactggttgaagtgggggcagatgcctgtcaccaaggtgttgactgtgtgagaaaagcagtttgggtgacaaatcctgtgtggcacaagttggatcgcttcctagaaataagcaacacctctcccaaaaagcagcccacaaggcaggggcccagcagcccagccatcactcatctttgaggaaatgagttggtagcctctgtgcactgtttggtggccacatcacaggtgatgtcctgttcacatacctgcttgtatttaaagccctcagtctgtcctgttgtgtggggcgaagtgatggactctgccaggtggacatgctgtgggtggatgttcccggcgtgtgccgggcctgaatggacaggggccacttcacagcatgtcagggaaaatcactgtcacacaattccaatggattttgtgctctttttg

SEQ ID NO: 349114 - DNA, 1451 bp, Homo Sapiens
agcggagtgagtgtgatggccgccgcgaggccgggaaggtgaagtcaggactggtggagtcaacacagtcaatcaatagccaacctcaactatgacctaaactgtgacaagctgtgtgctgacttccaggaagacattgagttccatttctctctcggatggaccatgctggtgaataggttcctgggccccaagaacagccgtcgggccttgatgggctacaatgaccaggtccagcgtcccatccctctgacgccagccaaccccagcatgcccccactgccacagggctcgctcacccaggaggagttcatggtttccatggttaccggcctggcctccttgacatccaggacctccatgggcattcttgttgttggaggagtggtgtggaaggcagtgggctggcggctcattgccctctcctttgggctctatggcctcctctacgtctatgagcgtctgacctggaccaccaaggccaaggagagggccttcaagcgccagtttgtggagcatgccagcgagaagctgcagcttgtcatcagctacactggctccaactgcagccaccaagtccagcaggaactgtctgggacctttgctcatctgtgtcagcaagttgacgtcacccgggagaacctggagcaggaaattgccgccatgaacaagaaaattgaggttcttgactcacttcagagcaaagcaaagctgctcaggaataaagccggttggttggacagtgagctcaacatgttcacacaccagtacctgcagcccagcagatagtgggcacctgaggcggagtctgcgtggagaggggcggtgctgccagccctaagtgccgtgtgggctcccccaggggcacgtgtggctcctgccccctggccactgccaagagaatgaagcacccagtctcgtaccattttgagccctccagcactacttattttcccccacctttgcctgctgttgctggaagagctggctcatacccccaaaggacactttcagcgacagctatggacagcatggtaccaaggagttaagttgaggctttttccagctttctctggttcatttgattgcttgataaggcctcaggatctcagcattgcacaatgcctcatggaagcctttgagggtatcacacagacacccccaccttcctccagcctgtgcgcacctgccctccttgcagcccagcacacctgcaggtgtaagggacgattggagtttcttcccagagagtctgtcccagaaggactgtggcttgtgtgtgtccatctcgcctgttggctcagtgcttcatcccatttgcagagcctcagacacgtcttggtggtgaggctcagttacccctgggcttaggctgaggcgggccctgtgctggaggtggtagaaaggatgctgctgaggcagctggaggagtgggagtagctcagagggga

SEQ ID NO: 349115 - DNA, 1167 bp, Homo Sapiens
ccactatacggctaaggtacgaggctgggttgcgaattcggcacgaggggaagacattgagttccatttctctctcgtgatggaccatgctggtgaataggttcctgggccccaagaacagccgtcgggccttgatgggctacaatgaccaggtccagcgtcccatccctctgacgccagccaaccccagcatgcccccactgccacagggctcgctcacccaggaggagttcatggtttccatggttacctggcctggcctccttgacatccaggacctccatggcattcttgttgttggaggagtggtgtggaaggcagtgggctggcggctcattgccctctcctttgggctctatggcctcctctacgtctatgagcgtctgacctggaccaccaaggccaaggagagggccttcaagcgccagtttgtggagcatgccagcgagaagctgcagcttgtcatcagctacactggctccaactgcagccaccaagtccagcaggaactgtctgggacctttgctcatctgtgtcagcaagttgacgtcacccgggagaacctggagcaggaaattgccgccatgaacaagaaaattgaggttcttgactcacttcagagcaaagcaaagctgctcaggaataaagccggttggttggacagtgagctccacatgttcacacaccagtaaccctgcagcccaccagatagtgggcacctgaggccgagtctgcgtggagaggggcggtgctgccagccctaagtggccgtgtgggctcccccaggggcacgcgtggctcctgtccccctggccactgccaacaagaatgaaacacccagctctccgacccattttgagcccctcccaccactacttatttttcccccaccttttgccctgctggttgcctggaaaaagcctggttcattaccccccaagggaaccttttcagcgaaagcctatggaccagcctgggtaccaagggagctaaggttgagggcttttttcccaccttttttctgggcttcctttgaattggcttggaaaaggggctccaggcacctcaagatttggaccaatggcccctcggtgaaaccctttggaggggaatcccccaagaacaccccccaccctttctttccaagctggcgggtgccccctgggc

SEQ ID NO: 349116 - DNA, 1564 bp, Homo Sapiens
  misc_feature (84)..(84): n is a, c, g, or t
  misc_feature (123)..(123): n is a, c, g, or t
  misc_feature (146)..(146): n is a, c, g, or t
  misc_feature (1547)..(1547): n is a, c, g, or t
ctcttctccccagcagcctgttggtgcattccggtgcctacgtgctgcacccgtctgctgccaggtcccgtccaaggcggtaanccaccaagtcccataggtctaaccgactgtcctctcagncggaacaagtggcggcccggaancgaaaaggccctccgtcagaagctgagcatgctgctctgcgtgtgcggtgttggtggactgcagggataaggtcggcatttggatggtaaggggggggatggcttcgtccagggtggaagcactgtgagccccgttgaccatctggccctgggagggctatgacaagggagaggctcacgctggtcttgctggtgctctgggcgctggagtatggcacagacacagggtacactcgtcctcctgcagctggggctgggctcggtgtgggctggctcatttcgcccagcgggtagccaaagttcctcactagcagggtcatgtcctcgtgccgggggcagaacctggcacgctccccaccactggcgaaggtgtcgctgtggatgcgcttcacccggtccacgacggcctgggccactgcgtccagggaggtctgcttggcaaactcagtgtcaatcatcgcagcaatctcctggttggcctgcccaggcccatgggctgcctctagggccttgtacaacccctccgacatcagcaccaagaagcccgtcaccccatccagcggctgtgccccatggatttctggctctgcgatgattggtttggacttggcagcgctgagaaggtcaatgtccgtgtagccatatttaaccttgtaatccccgatccgccgggtgctctcctgcccacagatgatccccacctgcttgatctttccagcatccaagcccagctgcgaaagacggaagagctcatcctcgttctctgtggtgtggtccacgttcagctgtgtcacctgcaacccatccactgtcgatttgcataaaagtgcacggtttgtaccgacattggcgacgtagagcttgttgttgagaaggaccgccacaacggccatggcccctcccgaaatttccctctctaacgtcttgagtctctcaaggatcttctgatactgaggaggcagctggtgctgagggactccctctggcaattgcgactggaggcttgccttctcagccaaggcgtcgtcaatggactccaggaagctcctctccaccacatcgaaggcctgcagcagcacacgccgcacatcggcctcggcgtgctcggcattcagctggcccagcaggagctctgcggacagccgctgggccacgaagttggtcactcggttgccatcatagccgttgaagaccccatacaggaagcagttgttctcactcctgaacttgagccagctgtcctctggcgggtggctctcagtgcccttgccatcagcagagtagctgcggttggaggctgagccaaccccagagaggtggcagagaggcaggtcatctgtccagcttggctgctgctcactctgcagcaagctcctcctctgcgccgccatcttggagganatcctgcgggagcgccc

SEQ ID NO: 349117 - DNA, 651 bp, Homo Sapiens
  misc_feature (221)..(221): n is a, c, g, or t
  misc_feature (420)..(420): n is a, c, g, or t
  misc_feature (612)..(612): n is a, c, g, or t
cgaaataaaaaaatggattctctcaaaacactgccatttgaatagcgacagaagtgctcccccagcccccaactttggacagcaaagttgacgagaatgagcagacacagttgtttgcttgatctgaatctctctaaagtaaagtatttccaaactgtgtgacaagagcctacctaccactgtagcggtcaaagctgaagcttcttacagcagtgaaacgngagcaccacctcccccacactcctcattccccgcttaaaacatggatactttcaaatttgactgtttcttaaactgccatcctaagatatggaaaatttttatagtaaagtgtctagttagcttatttccttttctaaaacaagtgttttcaagataactgtattttacctttatatgtactgaatagctgtttctttntgaattatttgccttttaaaatttgataatgtctctgggatataacaggacaggagttcttaaaaaatatcttaaggaaattcactttatggggtaaacccaaggtttttgccaacttgttgcctaggaaaataaggggctagtttcaggtttattaccaaataggaattatttaaacatttttacagtccntggattagggaaacccggaccccaatcttccttattaac

SEQ ID NO: 349118 - DNA, 1387 bp, Homo Sapiens
tttcgagcggccgcccgggcaggtacaacgatctgggcatgggacagaatttaataaacagaagcatcttgaagctgctgataagggacattcaccagcacaaaagcctaaaactagcagtggaacaaaaccatcagttaaacctacaagcgctacaaagagtgattcaaatctaggaggacattctattcgttgtaaatcaaagaatcttgaagatgacactttgtcagaatgtaaacaggtgtctgataaagctgtttctctccagcgaaagcttcggaaagaacagtcattgcattatggttcggttcttcttataactgaattaccagaggatggttgtactgaagaagatgtgagaaaattatttcaaccatttgggaaagtgaatgatgtcctaattgttccatatagaaaagaggcttacctagaaatggaatttaaagaggcaattactgcaattatgaagtacattgaaacaacacctcttacgataaaaggaaaaagtgtgaaaatatgtgttccaggaaagaaaaaagcacagaacaaagaggtgaagaaaaagactttagagtcaaagaaagtatctgcatctaccttaaaaagagatgcagatgcttcaaaagctgttgaaattgttacttcaacttctgctgccaaaactggacaagccaaggcatctgtagccaaagtaaacaaatctacagggaaatcagcaagttctgtaaaatctgtggtaacggtagctgttaaaggtaataaagcttcaatcaaaacagcaaaatctggtggaaagaagtctctagaagccaaaaagactgggaatgtcaaaaacaaagactctaacaaacctgtgactataccagaaaactctgaaataaagaccagtattgaagtcaaagccactgaaaactgtgctaaagaagctatttctgatgctgctttggaggccacagagaatgaaccacttaacaaggaaacagaagaaatgtgtgtgatgcttgtctctaatttgcctaataaaggatattctgtagaagaagtttatgacttagcaaaaccatttggtggtttaaaggatatcttgattttatcatctcataaaaaggcatatatagaaataaatagaaaagctgctgagtctatggtaaaattttatacctgcttcccagtattgatggatggaaatcaactctcaataagtatggctcctgaaaacatgaatataaaagatgaggaagctatatttataaccttggtaaaagaaaatgacccagaggcaaacatagatacaatttatgatcgatttgtacatcttgataatttaccggaagatggacttcagtgtgtacttgggtggacttcagttggaaaagggatcaccatg

SEQ ID NO: 349119 - DNA, 2475 bp, Homo Sapiens
gctcttaccctcgcgacgtgtatccactgagagtatccgacatgttagatcgctgtagctgtcgctataatgcacaatgtatgctgtcgcgtcgaatatagccatcaaacttgtagtgtgacgtgacgtaccaggaatacccactgggtgatgagaagacagcggacaaaatagaatatgtctgaaaaaaaaggtaacatggagtgaaaaggaggagaaggaatttaatactaaggaaaacagaatggatcttcaaataggaacagtagaaggctgaaaagaatgaaggtaggatggagtgcagaaaaggtggaaaagatggcagcaatgaaagaaaagcctgcagaaaacactttattcaaggcatacccaaataaaggagtgggtcaggctaataagcctgatgaaactagtaaaactagtattctggctgtatcagatgtatctagcagtaaaccaagcatcaaggctgttatagtctcttctcctaaggcaaaagctacagtttcaaaaactgaaaatcagaaaagttttccaaaatctgtgcccagagatcaaataaatgctgaaaagaaactttcagccaaggaatttggtctgcttaaacccacaagtgccaggtcaggcttggcagaaagcagcagtaaattcaaacctactcagagcagtcttaccagaggaggcagtggaaggatctcagccctgcaaggcaagctttctaaactggattacagagatataacaaaacaatctcaggaaacagaggctagaccttccatcatgaaacgggatgacagcaacaataagactttggctgagcaaaacactaagaatcctaaaagcactactggtagaagttccaaatctaaagaggagccattatttccatttaatttggatgaatttgttactgtggatgaggttatagaagaagtgaatccttctcaggccaagcagaatccactaaagggaaaaaggaaagaaactctcaaaaatgttcctttctctgaacttaacttaaagaagaaaaaggggaaaacttccactcctcgtggtgttgagggagaactatcttttgtgacattggatgagattggggaagaggaagatgcagctgcacatctagcacaagctctagtcactgtggatgaagtaattgatgaagaagaactaaatatggaagaaatggtaaaaaattcaaattcactttttacattagatgaattaattgaccaagatgattgcatttcccacagtgaacctaaagatgttactgttctgtcagtggctgaagaacaagatctcctcaaacaggaacgcttggtaactgtggatgaaattggagaagtggaagagctacctttgaatgagtcagcagacataacttttgccactttaaatactaaaggaaatgaaggagatactgtaagggattccattgggcttcatttcttctcaaatgcccgaagacccttctactttagttactgtagatgaaatacaagatgacagcagtgaatttgcatttagtgactttggatgaagtaactgaagaggatgaagactctctggcggattttaacaaccttaaagaagagcttaattttgttactgttgatgaagttggagaggaggaagatggagataatgatttaaaagttgagttagcacaaagcaaaaatgaccatcccacagataaaaaagggaatagaaagaagagagctgtggacacaaaaaagacaaaacttgaatccttgtcccaagtgggtccagtaaatgagaatgttatggaagaagatctaaaaaccatgattgaaagacacttaacagctaaaactccaaccaagagagttagaattgggaaaactctgccatcagaaaaagctgttgtgacagaaccagcaaaaggtgaagaggccttccagatgagtgaagtcgatgaggaatctggattaaaggattcagaaccagagcgaaaacgcaagaagactgaagactcttcttcaggcaaatcagtggcgtctgatgtccctgaggaattagactttcttgtacctaaggctggattcttctgtccaatttgttccctcttctactcaggtgaaaaagcaatgacaaatcactgcaagagtacacgtcataagcaaaatactgagaaattcatggccaagcaaagaaaggaaaaggagcagaatgaggctgaagaaagaagctctaggtgattgggggaaaggaaagaattcactagaaatttgtttagggtccagttgatttgtgtatttttgttatcatttaatttgtaattttcgtttcagaagcaaatattcgtgttgtacaaatttctgattgccctaaatgtagagagactgatggggaaagtatgatgggtttgatttttatatcaaatcatcaggcatggagaaatatcttttagaagtgttaaaataaatgttcctactgtatatttaaaatacc

SEQ ID NO: 349120 - DNA, 1987 bp, Homo Sapiens
  misc_feature (141)..(192): n is a, c, g, or t
  misc_feature (1348)..(1360): n is a, c, g, or t
gaaaagcaagtcccccagccccaccccaggagccagagaggcttgcactcaggagaagaaccacccccaagtctccgttctactgccgtgaactcatgtgttgccatgtacagaggccacagcagcatgaagggttgtggnnnnnnnnnnnnnnnnnnnnnnnnnnnnnnnnnnnnnnnnnnnnnnnnnnnnctttatgcagtagatgctttcttcctcctgcagttctggaccatgtggagctacatggagaaattgcacagacagaatcactttgccacactgcagggcccaggagtgggagcccaggccctccctccagggtagagatgcaccgaatggaaattgcactaaggacctcttcctttgctgtatggacagaagagttcatggttgcattcagggattgcaaggaccatatagacatgtcacaggtggaaaaagggccacaagccgttttgcacaaatgcctgcccacctgcccctcttccatccaggagtgtgctactgaggggctggctggaccaacctgctggctcaggcatgtgactggcctaactgcatgcccagggcactgccagggttcaatgggccagccgtctcctactccaccttggatttttctctccatcacatcatttctgaccatttgctcccttccattcttgaaacacctcatgccccacaggagccccagtggtgactggatctgcaagggttatctcccgccctctggggtttgagtggaggtatggagccagagaggctatcctagctaccttcctcctagggggagctggtccccttcctatgtggtagagagactggtgtaagagtgtggggtgtggcaggcgccggaaatcctcaaagctttcagaagcatccagaatgcctaccatcagctcctgaatcagggattttcagcactacctctgagccatggggttggctgcccagccaggcttccaggccctgaggacatgtggtcaggttcagcaggctcctgggtaaagagggtgggagggggcttctccttttggaagcagatagccatgcaggtagaattgtcatctcccaagtggccacatacagcaacccactccaggccatggggaccaccactcagggttcggggctggcaggagggtagtttctccagtctccccagtctgttggtgtctttataggaaactataaagcagagcagtggtgtctttagaggaaactcattcaagtcagggcactgattttcctctcagtttattatttggggggatagggtcaggtgggtatagtagtactttaccagggtgcttttaagttactttaaaaaaagcctacaaaatannnnnnnnnnnnnatttgctcgagttcacattaatgatggtcacaaggctgccttgttgggcaggcgtattgcccccagttcctcttctgctggcctgtatgacctccacagccaggccctgggcccaagccccttgtcccttctccactgcccctctttccagacagtaaaggccatggtcagtgtgtttttctcttgtaaacaaaccccagcttgtttaacagaaatgctaataacctactgggaaagatggaggtctaaattacctccagggtttttctgggggtttatcaccagtgtggggtcccttctgataccaccaggttcactccaggcagagtggggcggaaggctgctgaggatatgggtcagtaacagcagccctcacctcaaagggctggccagcttctcagcctacattcatatgcaagcttcaatctctggaccatctggtgttcacaggtgtcagagggttaggggtcaggggctagtacaggatacgatacaaaggataggcaaggctccagataacaaagggcacaactagaaagcaagtcccctgggacaaaggcaagccatcaccatcagcaacacgctaaccataatccacatcgactgagcacacgaccgcacgcaagg

SEQ ID NO: 349121 - DNA, 786 bp, Homo Sapiens
catcggcgtggcggcgctggagccgggaagggggcgcgggggagagatggtcgcaagatggcggcgctgaaggaggataggagctacgggctgtcgtgcgggcgggttagcgacggcagcaaggtgtcggtgttccacgtgaagctcaccgacagtgccctgagggccttcgagagctaccgcgccagacaggattctgtttcactgaggccatctatccgatttcaaggaagccaagggcacatctccatcccccagcctgactgccccgcagaggcgcggacgttctccttctacctctccaacatcggccgcgacaacccccagggcagcttcgactgcatccagcagtatgtctccagtcatggggaagttcacctggactgcctgggcagcatacaggacaagatcacggtgtgtgccaccgacgactcctaccagaaggcgcggcagagcatggcccaggcggaggaggagacgcggagccgaagtgccattgtcatcaaggctggaggccgctacctgggcaagaaggttcagtttcggaaaaccagccccaggtgcaacagacgcggtgccctcccggaagcgggcaaccccatcaacttggcgagtgccatcaggaagagtggtgccagtgccgtgagtgggggcagcggggtgtcccagaggccttccgtgaccgagtgctgcactcctggcctacggcctaccgcaaggtgagctgctgctgcgactgcaaaaggacggctgagcaggcggacaggacgcgctggatggcctctc

SEQ ID NO: 349122 - DNA, 733 bp, Homo Sapiens
  misc_feature (467)..(467): n is a, c, g, or t
  misc_feature (621)..(634): n is a, c, g, or t
tgcccggcattatcttaatcataacaatgaccatcaagtttatcaccagaaagtgaaacactcccgccttgtggaacatttgtgtatgacatggcactaattccaactgtaccaccaccatcactaatgccaaaagcagaactgagacactcctagaaaagagcttccctcccaacagagaaaaaaacagtgggcaggaatcctgctgtgaggagctacaagcatcccaccgcctgctgccatcacggcccacggccaaaccctggggtcccctgaagtccaccagaagcatccttggcatttcccttcacacaaagtcaagagcagccactgtcccaggcccactgaaaaagcctctcgtctcctctctaccagtaaataaaaattccataattatgccgtaaaaagccccaactttgactcagaatataactgttgcagttctatgctcaactaaccaccttttnccctgaatggaaatgcagggattaccaatggcaaaaagagacagaggggaaaaaaagactctttttttcctctcaggttctaaaaaggccagatgtctcctcccttagtctctaagccacccaagaaaaattaaagtgatatcacaaacagagnnnnnnnnnnnnnngtatgttgtcttgaaaaacaaaggtgcctggtgacagcagcacagacatcagaggtggtcatgatggggacctatcatggcacacattatggagggatt

SEQ ID NO: 349123 - DNA, 505 bp, Homo Sapiens
tcccaggcctcagctccgggcgacgtggagtgaggcggtcctggcgggccgagatgccgtcctgcgctgcgagggacccatccccgacgtcaccttcgagctgctgcgcgagggcgagacgaaggccgtgaagacggtccgcacccccggggccgcggcgaacctcgagctgatcttcgtggggccccagcacgccggcaactacaggtgccgctaccgctcctgggtgccccacaccttcgaatcggagctcagcgaccctgtggagctcctggtggcagaaagctgatgcagccgcgggcccagggtgctgttggtgtcctcagaagtgccggggattctggactggctccctcccctcctgttgcagcacaaggccggggtctctggggggctggagaagcctccctcattcctcccaggaattaataaatgtgaagagaggctctgtttaaaatgtctttggactcccagggctgagtgggctgggatctcgtgtcctcaa

SEQ ID NO: 349124 - DNA, 330 bp, Homo Sapiens
  misc_feature (214)..(214): n is a, c, g, or t
tgagccaccgcacccagccttaatattccttcttaataactagtacagttacctcatttcataataagaattatagtatatcccatcttattcctttctcagtcaactcaaaagttaaatgcaactttcaatggagtaaaacagccagtgtggatttttgtgctagttatctttcttacttcccatgttcttatttaggtataaagcttactgntgtatatatgtctttcagactatgaccatatatgtattttcacatttttagactataaatattaactcattttaaagtaaatattttatgtaaaatcaaatacatgtttacaatgg

SEQ ID NO: 349125 - DNA, 2022 bp, Homo Sapiens
  misc_feature (227)..(305): n is a, c, g, or t
ttcggcacgagggttaagaattgcttttgatcttgtcaaaaaactgaatagaccccagtttcgggaaggtgtgtgagcagtgccatgactctgccccttacctaatcccacatctctctaatgataagacattggctcgcctctgaccagagccccagcaccagagagcggaagatgcagaattgtcaaatgacctgctgggggaggttgtaggagtttagcagatnnnnnnnnnnnnnnnnnnnnnnnnnnnnnnnnnnnnnnnnnnnnnnnnnnnnnnnnnnnnnnnnnnnnnnnnnnnnnnnccatctaagtctgtgtgatgaaggtgggataaggctcctctgttagtgctggaagctcctgtaattgccgcatggatcccactgtgccctcttgttctgtgcaagtctgtcctgtctgggcactaaccttggtcccatgcatgtttatgttctgggtggggctttgcctctccactgggaaactgacttttgctgggttgaacagagtcccttatgctttttgtcctctccctgcgcctgggagaggtgggagtaggagcccaaacacacaggtacagaaagatctggaagaaggcctggcagtgaatccaaggactctgggcccccaacaatagatggtagcgtaagtctggagcagcggtgtttcaccaccaaatgcctttccaggctgcccttccaacactcaggagagcatccagatccctgggcagaggctctacattcttggctttagaggtggtggcagcggcagcaggtcagagccacttctggcggtttccctcccctttttagtgcccatagtttttggatcctcccttgagttttaccagcacaagccattctttgcccctgttcacataactgagctcaagctcttgccaaacaccaacaagcaagatggttgcaacctggcaacattgaatccaccacccttgggctccctctggaagccccagcaccggggggcttttgggcacagggtcagtggtagccatcttagacactgacatttggctttgtcgtcaatttcatcaccctccttgaggttactgtgcagtttcaaccagcattttatcctagtgaggtcattatcaggagttgccatatcatctctccagtacctaacatttctcatccacttcaaaagctgttctgactgccagctggctgatctaagctcctgaggaatgtctcctctcaaaggaatttttccctccaaaggccccctgaagtcctagttggcattggcctggcacatgctttatgttaggcctcccgttgggatggctgagaatcatgaaagacagatcctccgctagcctctgtgggtcaagtttctggacaccaagtctctgggaactagtgtttgattttaaatggcatgtggcccttccttgtttcagtgacttagaaaagtaaaagccatttaaaaaagttagcaagattttttatcgacttcccaactgggcttccagccttgttgaatgaaatcatctatctctgattgggcgcaacgaactgcatttctttggacttctgaatccatgtttgtgctttctctggcccgtgaacacctcggcgattctgttagggatgggatgagtgggaggaagccctttgagaagggggagccggccctgtcatgcgcaggttttccactcatctgaggaagagccagggctctgaatttagcctaacactcatcttggctgtgggcttgggaagaaatggccattatttacagattgtatttggtacatattgtgtgatacttgaaaagataaaagggactgccagcccctaactgaaatctgaagctttttatcgcttatttttcctcgccctgtctcctcccttccacctttctccttgcattgtgatgatctagtaggcacgtctgtcaacaggacacatgcctcctctgactataacctcttaatagttgtgtataatgaaaactgtaaacttttttaaataaacgtgtatataccttggc

SEQ ID NO: 349126 - DNA, 599 bp, Homo Sapiens
  misc_feature (238)..(302): n is a, c, g, or t
taatgaccagttaagaattgcttttgatcttgtcaaaaaactgaatagaccccagtttcgggaaggtgtgtgagcagtgccatgactctgccccttacctaatcccacatctctctaatgataagacattggctcgcctctgaccagagccccagcaccagagagcggaagatgcagaattgtcaaatgacctgctgggggaggttgtaggagtttagcagatttgagtgtggctgcnnnnnnnnnnnnnnnnnnnnnnnnnnnnnnnnnnnnnnnnnnnnnnnnnnnnnnnnnnnnnnnnnccatctaagtctgtgtgatgaaggtgggataaggctcctctgttagtgctggaagctcctgtaattgccgcatggatcccactgtgccctcttgttctgtgcaagtctgtcctgtctgggcactaaccttggtcccatgcatgtttatgttctgggtggggctttgcctctccactgggaaactgacttttgctgggttgaacagagtcccttatgctttttgtcctctccctgcgcctgggagaggtgggagtaggagcccaaacacacaggtacagaaagatctggaagaaggcc

SEQ ID NO: 349127 - DNA, 781 bp, Homo Sapiens
agcggattgtatctgagtcttctgaatcccacttagaactgtgttgagctctcacccatcacgatgagcaacaaattcctgggcacctggaaacttgtctctagtgagaactttgacgattacatgaaagctctgggtgtggggttagccaccagaaaactgggaaatttggccaaacccactgtgatcatcagcaagaaaggagatattataactatacgaactgaaagtacctttaaaaatacagagatctccttcaagctaggccaggaatttgaagaaaccacagctgacaatagaaagaccaagagcatcgtaaccctgcagagaggatcactgaatcaagtgcagagatgggatggcaaagagacaaccataaagagaaagctagtgaatgggaaaatggtagcggaatgtaaaatgaagggcgtggtgtgcaccagaatctatgagaaggtctgaaaaatcatttcctcattgaagtggctttttatcatttaatgatggaaatcaattgcttccattgacaaaactgaatacactgcaaatatttgtttttgcttttgtcttaatataccagatatgcaaaggcctaaactgagaattaatctaaaagtcagtgttatttaaacattttcaatgtgcatgcatgtcattattacatcaaagcatatatattggccagacacaaacagttgatgatgtcattccaattaactacaaaattctaatctatgttgaactttgaatacttgaaactgactacttacaacggatacta

SEQ ID NO: 349128 - DNA, 2307 bp, Homo Sapiens
  misc_feature (547)..(559): n is a, c, g, or t
ggacgtcaactcccatgatgatcatgcaggaaagcagcatgattgcacttcttgtagtgcataccatcactaaaacatagttactgtctttctgtggtcttaagaaaaattcagaaacagcataccaatgtacatataagataaataagcttatgtggtacagtaagtgttctgttctgagaaataccttgattcgtatcctaatgtctgatgttattggtagttctcaaacttccccaattctgctttcatctaaattcatcttatctatctattgttaaataatctatcagtccatttttatctatcatctatatatctgtctttatcaatcattcgtctgtaatctatctgtgccgtttggcataagagacagaagggcatagcagtggaaactcaaaggagttacctccatgtgaatggacagtggtgatggtgatctgtgaggtggtgatgtatagaaagaaaaactagaagagagcatgccctaactcagggaccttgtccagcaggcactctggccttgttatactgtgcttgaatatgnnnnnnnnnnnnntcaaaatagtgctgacattctttgtcttctgggtctgagaaaacttagagtagatatgatgactctgccatttcagtcttttgtatttccacatttagagctcagttttaattatgtagaattatttctccagcctgtgttaaactagaccatggattggcaaactttttttgtaaattgccaaatacacattttcagttctgaaagccttgtggtctttgttgcagctaatctactctgctgttgtgttatgaaagcagccataggtaatttataattgaatgagtgcgctgtgcctttcttccaataaaactttacaaaagcatcctgtgggctggagtttaccctttgggaaaccagagcattggctaaactggaacctgaaaaaataatcacatcaactcagccacatggtaataatatttagagtattatttcaacattttcattttcataaaaatttttttagctcttttgccaaattccatctgtgagtgatacaaatgactaccacgtgccattaacatcacctaaacagtgcaaaacaagcatagtagaagtaattggaatgatataaaccccttgctgtaatagttatagttgataaattatgtttcaaaattgaacctatttcttccaaatttcatctataaagttccaaggagttccaaaatcttgcctgccttcttttcccagttagcagtattgtctctgagcagccatggtggtatccatcctccttggacaatgaatttagcctattttgacttcatttgagcagttgtaattgttttcaccacatcagagtaagattactacatgccagagctattctttaactcagcttgtaaaaacatgatagcatcaacaatatacatagcaaatgaatgccatctttaatccaattaaatggtttttacaaatttgctcttgtttgttgatgctatctgcattgcagtaattaaaggtgaggtaaaaagaatgaataaactgccaagttaaaattaaatttgggcaatttctcttttgcagtaatgtatgtatatttactcaaaacatatgccaaatttagtgttgaacaggctcattcaaatcaattgtggaaagcacgtaaatgaacaattcataaaagaaaagcattgcaaatggccaagagcatagaaaatgtgctcaatctttaccagtcattataaggaaataatgaaatttgtgtatatatgaaatacttaaaatatatataaaataaaacaattatttgccttttttcacctatcagattaacagattatatgtgttaacaaggtggggagaatttacaactcctgatatgttaaaatctttcaggaaggtagtagaaaatatatgtaagatggaaattagcacttttgaccaacaattttagttttagatatttacctataaggatataataggaggtgttcaaagatgcatgtaactcaatgtagtattaattataattgtaaaatagtaaataacatttttgtcaaatcataatgttaggaaaattagtgatggcacatttaaccaattgaattatattcagttctgaataccgtgatgcatgttcaaattaattgatacaaaaatccaacaactttagcagtttgtttaccagttattgagtaccaactgtgttcaacattgttatttcactcatatgaaatgataaatgtatgtgcgtgttatgatacggtcaataaaaccacttttataggaagaatactcac

SEQ ID NO: 349129 - DNA, 954 bp, Homo Sapiens
  misc_feature (52)..(115): n is a, c, g, or t
  misc_feature (367)..(367): n is a, c, g, or t
  misc_feature (539)..(585): n is a, c, g, or t
attaaaattttgaggctatacagccactgtgccctgtggaataaagccatannnnnnnnnnnnnnnnnnnnnnnnnnnnnnnnnnnnnnnnnnnnnnnnnnnnnnnnnnnnnnnngtgtgcgtgagtatatgtgtgcatgtttagcagatatttgtataaaatataaacactctgttgtcatattggctatatgcgaaattgttaattttaaaataacctcaggccacagacttgtagtaatcatttgaaggcctcacctagtgtccccttggtgacgtatgcagcagctcaaattaaacctttgtgcattgggttatgaataatcttttcttccaaagatggcaaaagcctcggtttgatttgatnactaaagaataaatttctctgactttcccagtgaatctaaatgtattcagttgacaaaatggacacataagggctttttctaaataccgtacataattacacattttcacacttagagggtaatcctatgatacactgtcaatctctattttaaaagactatcaccagaaannnnnnnnnnnnnnnnnnnnnnnnnnnnnnnnnnnnnnnnnnnnnnncataggcttgggaattccctcaaatccagaaaattccaggttaaggcttgaagttgaatcattcccaggtctagctctaaggttaacaagagtacaaggcaaacaatttctttggggacaagcagcattatttcaattagaccttctcctgcagggcaaaaatcattcttccccacactatgaatggactccaagtatcataataagcaggtaaactcacaagaaccaaagctgacatatggataaaagcagcaagatcacagtacaccaaagtatcatatatatagaagaaataattcaatgtcttagatttgtctataaaaatttgtgatctatataggacttcattcacatggacactaacgatcc

SEQ ID NO: 349130 - DNA, 750 bp, Homo Sapiens
  misc_feature (80)..(90): n is a, c, g, or t
cttacataatataggttaatgaatcattacatttataataacaaaggccacaatttaattaattggtaagatataatgcnnnnnnnnnnngagaaatgtttgccttatgtatattccctttatttcctttaccttttgtttttccttggacctaaacagagaaaataatgcttatgtatctgaagaaaaggtcagatctattggaaatgacagcccgatacttgagcctcctctttaaaaggtatccagccctgatattttgtgtaaataaaatgtttttaaaacctgttagttaaaacacttaggtgatgggcactgctgcttataaattcatcttttggttgaatcctcactatgctatttggtacctaaaaatattctccaaacccttgctgccagttcctctttgataaatatatagttaattcgaaataaaatccattgcaattcatttatgagttatcttacatatcacaaagaccaattagaattagtcattattcttgatgaagagtctgtttttaatcataaaaatcatgacagttactcagacccaggcatttcaacagagctaacaccaccttcagataggcacaccatgcataactcttgggaagttgagctttgctaaataaaagatatttctgctgatcaaagatgatcaagctttctgtgtattggaacagaaagtaacaaagaggaatgagccaggagaacaaactaattcctttaaataaataaataaaaaaa

SEQ ID NO: 349131 - DNA, 1477 bp, Homo Sapiens
  misc_feature (126)..(154): n is a, c, g, or t
  misc_feature (1347)..(1410): n is a, c, g, or t
  misc_feature (1414)..(1432): n is a, c, g, or t
agcgagctgcttcccacacaagtaccatgagctcccgacactctgccagcccagtggttttcaccagtgcccggagttcacctaaagaagagcttcatccagctgccccctcacagctcgcaccannnnnnnnnnnnnnnnnnnnnnnnnnnnntggtcctaggagtttttaccctcgccaggcgctactagcaagtacctgattggatggaaagaacccgaaggaaccataaactccgtgggatttatggacacgagaaagcgtcatcagagcgatggcaatgaaatagcccacaccaggctgcgtgcctcaaccagagacctccgggcatctcctaagccaacctccaagtccaccattgaagaagatctaaagaaactaattgatcttgaaagcccaactcctgaatcacagaagagttttaagttccacgcactctcctctcctcagtctcctttccccagcacccccacctcacggcgggccttgcacagaacactgtcggacgagagcatttacaatagccagagggagcactttttcacctccagggcgtcacttctggaccaagccctgcccaacgacgtcctcttcagtagcacgtacccttctctccccaagtcgctcccgttgaggaggccttcttacaccttaggaatgaaatcgctgcatggagagttctcagcctcggacagctccctcactgacatccaggagacccgcagccagcctatgcccgaccctggcctgatgcccctgcctgacactgctgcagacttggattggtccaacctggtagatgctgccaaagcctatgaggtccagagagcctcatttttttgctgctagtgatgaaaaccatcgcccctggagtgctgcatccaacagtgatcagctggaggaccaggctctggcccagatgaagccttacagcagcagtaaagactcctctcccactctggcttctaaagtggaccagctggaaggtatgctgaagatgcttcgggaagatttgaagaaggaaaaagaagacaaagctcaccttcaggcggaggtgcagcacctgcgagaggacaacctgaggctacaggaggagtcccagaacgcctcggacaagctgaagaagttcacagaatgggtcttcaacaccatagacatgagctagggaaggctgaggaggacaggagaagggcccagacactccctccagtgagtgtcctgcagcccttattccctccatagaaagcatcctcagagcaccttccctggcttcctactctgccccctttcggggagtgcacaacacaatagttgcagatcaacaatcatcacctgccttttgtagnnnnnnnnnnnnnnnnnnnnnnnnnnnnnnnnnnnnnnnnnnnnnnnnnnnnnnnnnnnnnnnntggnnnnnnnnnnnnnnnnnnnctcgagactagttctctccctcgtgccgaattcgccacccaggcc

SEQ ID NO: 349132 - DNA, 1131 bp, Homo Sapiens
  misc_feature (144)..(189): n is a, c, g, or t
tgcgtgtactgaggttgcaccaaccccaaagcacgcacgcagctaacaaagttggcaaatatgaattttcatcatgagatttttccaaagccagaagaaagaaggaaatgaggtacgtcctcaaagaaaaggcctcccccagcnnnnnnnnnnnnnnnnnnnnnnnnnnnnnnnnnnnnnnnnnnnnnngatcctctcaccaacttctgccttgttcaagacgttgcagcacccacttcagctgtgaatggggcatgcctgagagagtccgggctcctacagagaagtggggcttcctcagggacagatgggagcaggggctgcttcgtgtgcatgaggacaaaaccaggctgtgtgcgtgtgcgtgtgcaggggcgacggcctcggttcattcctggggaaaagggagagaagagacgcacaaaacagatcatcgccgcacaagcagggggcgagggcgggcgggctcagcctggcctgccgtgctcagttgatctggcgacaggcctcgaaggtccacttggtggcccctccgtagatctcgatgtgggattcagcccaggcgatgacattgccggacagagccttggtgctgcaggtggccaggttgtacacctccccgggggtcagcttgcggtcccagatgttgaagtgggccagctcacccacaaatgcctgggtggcatcaaacccaccacccagagtgtcctgctcctggcccagcaccagcacgccctggggcttgatggggtgatagggcgccaagttctcgccactgccaccctgcgtgccatcctggtaggcctcccagaccccgtcccgggtggtccaggtgacacagatgtggtgccacttgccatcattgatgacaaaaggcaacttggccaccttgtcattgatgaggatctccatggggttgttgccccactcaatgaggaccagctcgttggcctggccgggcacagcgtaggagaagggcgtgcccacacctggcgtggcgctggacttgagccacatgcagacagtgaaggcgtacatctctggcaggctcttcttcaccttggcatacatatagttggtccgcagtgggaatgcccggccgtaatggcaactctgcgttgataccactcc

SEQ ID NO: 349133 - DNA, 791 bp, Homo Sapiens
  misc_feature (153)..(153): n is a, c, g, or t
  misc_feature (749)..(749): n is a, c, g, or t
cctacctgcaatggcagaaattccttagtgctttcagatcacaagttctcaatgtgagttatcactcctaagttcctaccacaggatgagaaagagctttgttagtctgtgtcaggcattttgctttaggaactgatgtggatattaattccnttcagtttggatttcccccaaaggaggtaaaggtatttcaaagtgttaacacccaaattttctttgagttatacaggattaaaatggaatatctatgtctttaaaagaaaacgagacatattcttattacagttatcacgggtgctattaatactctggccttctggtagaatctgtcatctagcatcatagatttgcaggggccctttaatgaaaactctccattttcttaaaggttgtaaatattatgtagcactatacttatagatgtggaaataagaggcttaggcagaatagaatcaaggaaggttgtagatggccatgagcactgaacaaatgaggaaagaataaaatgggaccaggagttatcttctcaacactaccctgaaactgccgcccaaacttcctttttgacaaagattaacaggaccaatgcaatttaagctctgagtcttcagaccaaagactttgtgggcctaggaacacaaagagaaatttacagagggccaggtgattttgacttctgggtaaaccttagataatttgagttccatattcaatggctttctctgtgttattaaaaattctaacaccanctgattcttaaaatccataacaccaaacaagtggcttaaaat

SEQ ID NO: 349134 - DNA, 712 bp, Homo Sapiens
  misc_feature (199)..(208): n is a, c, g, or t
tacatgatatttttaggcaaaacataatgtctggagcaccaagtgaaataactgtggagaatggaatgttggacaatttgtgtggcatgcttagcttaatttgtttctatggcacaagcaaagctcattaattccatttattattttaagccacttgtttggtgttatggattttaacatttttaccagcagaaatcannnnnnnnnnaaatctctcaatcttcaaataattcttagattgcttgccagcaaagatgtctcttgatcttgacactggaattcaatgtaaaaatcttgaatgatattttgtactgatatgaatttctactgtcccataacactgtgtagtgacttcactgtatattaacttcttttctacagatgtttgacttatgagatgaattaattgaaaaagtcaaagcctatcaggagctatcttatatgatgttggtagcctgtgaaaaaataaatgtcttttttcttatacaaactgataacaagacttgctttcacaattacctatttacatttttgtgcatataatgcctgtatattatactcatatttgaaagtgatcagaaagtgttatttaacagaaactacatacattttttatgtctctctggaccctttgattctaagtaaatttacagtaagttagcagtaatagactattcttttcaactatgaataaaaatgtacactgaagtac

SEQ ID NO: 349135 - DNA, 706 bp, Homo Sapiens
  misc_feature (273)..(273): n is a, c, g, or t
  misc_feature (290)..(290): n is a, c, g, or t
gttactgaacctctgccagagaacagagaggcccggggcgacacggtcgttagtgaggcggaattgacccccgaagctgtgacagctgcagaaactgcagggccattgggtgccgaagaaggaaccgaagcatctgctgctgaagagaccacagaaatggtgtcagcagtctcccagttaaccgactccccagacaccacagaggaggccactccggtgcaggaggtggaaggtggcgtacctgacatagaagagcaagagaggcggactcangaggtcctccaggcagnggcagaaaaagtgaaagaggaatcccagctgcctggcaccggtgggccagaagatgtgcttcagcctgtgcagagagcagaggcagaaagaccagaagagcaggctgaagcgtcgggtctgaagaaagagacggatgtagtgttgaaagtagatgctcaggaggcaaaaactgagccttttacacaagggaaggtggtggggcagaccaccccagaaagctttgaaaaagctcctcaagtcacagagagcatagagtccagtgagcttgtaaccacttgtcaagccgaaaccttagctggggtaaaatcacaggagatggtgatggaacaggctatcccccctgactcggtggaaacccctacagacagtgagactgatgaaagcacccccgtagccgactttgacgcaccaggca

SEQ ID NO: 349136 - DNA, 801 bp, Homo Sapiens
  misc_feature (86)..(101): n is a, c, g, or t
  misc_feature (129)..(129): n is a, c, g, or t
  misc_feature (134)..(134): n is a, c, g, or t
  misc_feature (246)..(268): n is a, c, g, or t
  misc_feature (296)..(328): n is a, c, g, or t
ggtccttggccctttcccggccctcttgttccctctctaacttctgattgttcttttatttttaattattatttccccgtcccttnnnnnnnnnnnnnnnntaaggcaaaaggaaagcactctaagacnctggnctatcctttaaaggtagcaggtgtaatgatgtgttttgacctttgcaggcgagtaaccaggcaatggagtggagtgtctcctggagagagtgaggagagtgtgtgatagctnnnnnnnnnnnnnnnnnnnnnnntggcaagcactgagataaatacctggcnnnnnnnnnnnnnnnnnnnnnnnnnnnnnnnnntccaccaaaccatgataaacacaaaatgcagcttcctgatgcttagagttggcacatgctgctgtgtttatttattgtggattcccatcaggaaagaggaaaaaatacacatgttctttcatataggcaaaatttaaccacataaatttgcactgcaagaaaattgaagtttacgtgaacaaattcatgagcatattttctctttctccccaccgttaatttgggagttgccgttttgggggattttgttttgctttgctttattcatcggagagagttgaagccagctcttggccactctccatttctaatgttcttgtgttgccccttcttcgtactgtttgtgaactttggttaccttcacattccccttacgagggtgtaacatctatttgttcctcttaccaaagcaaaaggattggcttcatacaaaatagacaattctctgatttcaggaaatgtgcatggtctac

SEQ ID NO: 349137 - DNA, 476 bp, Homo Sapiens
tcaagtgaatcttgatgaaatatttgaagagaatgtaacattatttttattttgtattggttcagatgcatatagtcgactcagaatgatctttggtaaagtatgtgaagcacatctgatatgtcaggtctctcatttttgcactgatactaacaccacaatagattacagtttcataagatgtatatgattatatatgaaattcatcactgcaataattagatttagttaacattcttcatttcccacatttgctttaactcctctttcagattcatagtcttctatgtttacttttatgtttatgttttatgctatttctaggagtaggacagctatattaaaaatgacactgcattatttttatcatacagcagaatgtctgatctgttggcagaaatacatagatgtatatggcagaatgtatgtataatgtagtaatgactctatccgaggacattttatagccataactt

SEQ ID NO: 349138 - DNA, 1808 bp, Homo Sapiens
  misc_feature (389)..(398): n is a, c, g, or t
aaatattaagttattcattctaaaaggggaaatcagtaaaagcaaggaatttatgaaatttttgctgtaatttcagtatctgttatacaggggaagaatgatcaggaaaaatataagctgacaacttacccttttgctttttaacaacaaaataatattgaaaatatattagaataactcacagatccagaagttggtggaaatggaagaatgttttagaaaataccatccatatgtttatctaagaaagtctcagaatttagtgacactaatacagttcataaatactgtaatacagtggagagagttggaatgttattttggttttatttcatcagcacaattattaaaaacaacaaaattaatgagacgttttgttataatcagannnnnnnnnnaccatattgcaagttataaaaatggtcaacttatactaagtacctaacaactgacttttttattcacttgttgtgacaagtttttaattaccaaattaagaccttttcagtatctatgagtaaaagaaatagatgattatatcagaccaggagcagagaatttataatatgtgctttatagcaaaatgtattaaattgtggttaaaatttatagctcatatgtagctgctgccaataagaaggctcagaattgttctgtggattaatttttacatcctgttttctgtcacttttaccaatcttcttggcctcatgtacaataatgtaaagccaatttgatgaaatggttcaggttgtagcagtctataaattgtcggtacattcagctcttctaggtgagcaatactgctgctatttttctagaaatagcaatcatttaaaaatgccaaatagctaactgctaccaactctttcttgtatcttgtctctttagagaaggaaatttttgtgtgccagtaatcatcaaagaggtgttttataagagtgttgatgttcagaagttcatgaaagtattttatccgtataatttgctagtgagctaaaacaatataatttatgtaaatctttatatgtacaaaatatatagtctgttgtacttgagtaatttggtctatggaattttaaatgccttcatttagcagtaatattcacatttttattttagacagttaagttcatgtgtttgattttgtcatgtcagcataaatgagaaaaagaagtggatcatgcagctaatgagtaaccaacattttgtaaagttttaaagttttagcaaacaacattattccatctaatttaaaggttaaaaaagaagagacaactctagccaaagtagaaatttatattctacacgtccaaactgtctcctagcagcttttggactatatatcacttgatgttaaagtatcttttatttgtaataaatattcaaatttctatttagaagctctaatgtatacctagattaaatcaaatcacagttttatgcttttaaaatatatgtatttcaaactgtatattttaatttctgagtgcatgttatatagtatttaatacttcagatgtcttggcaaattcaatataagtatttattcccacaagcgatatatgggatatctcttaaaaattatgaatatgtaccatttccttcaaagtcatcctagcctatgctgtatcaaaagtattgtatattttatggagatttagtgatatacatgtaaatgttttttaagttattttattgaagttcaatctttacataaaattaaaatctttttttaaaaaaagtgtcagtgccagaactgtaaatgaaaataatcaaataaaagttaaaataattcattactcatt

SEQ ID NO: 349139 - DNA, 972 bp, Homo Sapiens
  misc_feature (154)..(215): n is a, c, g, or t
agtaataacaatcaagtaactattgaagatctatttgacctaacagcatagaaacagaagaattacacactggccagctgtagcgtagggcctgatcttaatgttttagagctggagaggcctggagtcactcaagaggcatccaaatggaatnnnnnnnnnnnnnnnnnnnnnnnnnnnnnnnnnnnnnnnnnnnnnnnnnnnnnnnnnnnnnntctcaaaattcccagcccagcatttttcacgctgcagtttcctatatagaacagaagcaatagctgttcttgaatcctatcccttcctgtttcctaacccaagtcacttcatatgtccttccgcagaggccctgctaaccttaagccctttccctggtaccacagaactttgtacaacttgctggggggaaacagcccatggtcatacgccatttatagaatgcaggcttatagaacatggtcaataggaatgattaaggaaataggaattaccctaataattggaacactggctcaattatatctttgtggccatttgttagttgtagccactgttcttcatacctaaggggaagctacagtgtaagctccaagggggcaggaaccatgtctgtctagcccctaagtctctacagtgtccagtaggtacttaactattagttgtatttttaaacatgaccaccagttccatatttcatgattccaagcaggttccatcatggctttatctacaaataaccagcaatgtcatcctttagccaaatatttttgaagcatccagctctaccttgtgtctccaataatctaatgaactctacacagagtctgaccaccaggcccataggcaaagagttcaagttccatttgacttgaactactctgtgagcaatgaccctcacccctcaagtgtacgaaggcttcataagggcgcacattatagaaatggaagatagatagtctctccagtgtctttata

SEQ ID NO: 349140 - DNA, 1974 bp, Homo Sapiens
  misc_feature (1850)..(1850): n is a, c, g, or t
gacgtgggccccgagtgcaatcgcgggaagccagggtttccagctaggacacagcaggtcgtgatccgggtcgggacactgcctggcagaggctgcgagcatggggccctggggctggaaattgcgctggaccgtcgccttgctcctcgccgcggcggggactgcagtgggcgacagatgcgaaagaaacgagttccagtgccaagacgggaaatgcatctcctacaagtgggtctgcgatggcagcgctgagtgccaggatggctctgatgagtcccaggagacgtgcttgtctgtcacctgcaaatccggggacttcagctgtgggggccgtgtcaaccgctgcattcctcagttctggaggtgcgatggccaagtggactgcgacaacggctcagacgagcaaggctgtccccccaagacgtgctcccaggacgagtttcgctgccacgatgggaagtgcatctctcggcagttcgtctgtgactcagaccgggactgcttggacggctcagacgaggcctcctgcccggtgctcacctgtggtcccgccagcttccagtgcaacagctccacctgcatcccccagctgtgggcctgcgacaacgaccccgactgcgaagatggctcggatgagtggccgcagcgctgtaggggtctttacgtgttccaaggggacagtagcccctgctcggccttcgagttccactgcctaagtggcgagtgcatccactccagctggcgctgtgatggtggccccgactgcaaggacaaatctgacgaggaaaactgcgctgtggccacctgtcgccctgacgaattccagtgctctgatggaaactgcatccatggcagccggcagtgtgaccgggaatatgactgcaagacatgagcgatgaagttggctgcgttaatgtgacactctgcgagggacccaacaagttcaagtgtcacagcggcgaatgcatcaccctggacaaagtctgcaacatggctagagactgccgggactggtcagatgaacccatcaaagagtgcgggaccaaacgaattgcttggacaacaagcggcggctgttcccacgtctgcaatgaccttaagatcggctacgagtgcctgtgccccgacggcttccagctggtggcccagcgaagatgccaacatatcgatgagtgtcaggatccccgacacctggaaccagcttctgggtgacctggagggtggctacaagggcccgcagggaggaacgctccagactaggaccccaaaaaaaaggtctgcagggattgagagaaccctcggggaacctgctgcgacgcccacgcgcacgcccgtcaacgtacagacccacggcacagaacggaccgctgcgaggccgcggaatgcgcgcgcgccggaaggcaagcgagagaagcgcacgagagagcggcagcggaaccggagggaagcggaaagatcacaaagccccgtggcctgttgtacggccggcagcaggtatgagagatgagggcatctgagattccaaccaccagacccgtcgccgctacggtacacacgtcctgagtggggaggaagacactatatctgtagtgtgagcagtcgtagcgacgtccccactcaacgcttgctcccattaacatcaaagccacctccctaacttccgactcacctgtgcgacgctataactcacaacacatacgtcaccaaacaacctaacctacataaacggatacgcgccacacgcagacggctaacacccccttgagataaatcaagtaacaacatacagcactcattacgcagccggcaacacagactaagacgacacaccgctcgtcgatacaaataanatgtattaccagtaaccacatgccgagtgggagcgctagacacatgctaagcttcaatgtatcaagacctccccacgacacccactgcctcccaaacatccctctactcctaactacagtccct

SEQ ID NO: 349141 - DNA, 1265 bp, Homo Sapiens
  misc_feature (29)..(29): n is a, c, g, or t
  misc_feature (62)..(62): n is a, c, g, or t
  misc_feature (1023)..(1023): n is a, c, g, or t
  misc_feature (1028)..(1028): n is a, c, g, or t
gcactgcctgaacttcgtggtaaaggagncccacttcaaccaggtgatcatgatgaaggagntcgagcgcctctcctctccactgatagtggagattgtgcggcggaagcagcagccgccccctcgcactcccttggaccagccagtggacattggcacatctctgatccaggacatgaaggcatacctggagggagcgggcgcggaatctgtgacatcactctgttgcttgacgggcacccacggccagcccacaaggctatcctggccgcccgctccagctactttgaagccatgttccggtccttcatgcccgaagatgggcaggtgaacatctccatcggggagatggtgcccagcaggcaggccttcgagtccatgctgcgctacatctactacggcgaggtcaacatgccgcccgaggactcgctctacttgtttgcggccccctactactacggcttctacaacaaccggctgcaggcgtactgcaagcagaacctggagatgaacgtgacggtgcagaacgtgctgcaggtagccccccagccccgtgcacatggctgcagctcccactgagtgggtgaaaggggcagcgcctcaaggtccctgccattgcagatcctggaggcagctgacaaaacgcaggcactggacatgaagcggcactgcctgcacatcattgtgcaccagttcaccaaggtctccaagttgcccaccctgcggtcgctgagccagcagctgctgctggacatcatagactccctggcctcccacatctcagacaagcagtgcgcagagctgggcgccgacatctgaggccctgtggcgcctgcccattgtgaagaatcgccgtgcctgcctgccctgcctactgagaagactaccggctatgcgcatgcctatggcagtgggtgcacctgccaggccaagggtcagggtgcccagagcctccaaagagagctgacggggatgtggggccccaaactcattaattcactaaagacacaggtcccacagggnagcgngatgatgaagcagaccccctcctgtcatcaccctctcctgggtgtagtggtggatgcgaagccacgggctcagtgatgggctcaccacccagaaagtggggaagagactttgggcctccccacccaggggggcttggccttggcttctggtggccctggggccgtgttgtgggactccagggcactgggggcctgttcacccaggcctccctcaaacatggcgggaaggagggttta

SEQ ID NO: 349142 - DNA, 1470 bp, Homo Sapiens
  misc_feature (251)..(251): n is a, c, g, or t
  misc_feature (888)..(888): n is a, c, g, or t
  misc_feature (931)..(931): n is a, c, g, or t
  misc_feature (960)..(960): n is a, c, g, or t
  misc_feature (1068)..(1068): n is a, c, g, or t
  misc_feature (1444)..(1444): n is a, c, g, or t
ttcaaccaggtgatcatgatgaaggagttcgagcgcctctcctctccactgatagtggagattgtgcggcggaagcagcagccgccccctcgcactcccttggaccagccagtggacattggacatgaaggcatacctggagggagcgggcgcggaattctgtgacatcactctgttgcttgacgggcacccacggccagcccacaaggctatcctggccgcccgctccagctactttgaagccatgttcncggtccttcatgcccgaagatgggcaggtgaacatctccatcggggagatggtgcccagcaggcaggccttcgagtccatgctgcgctacatctactacggcgagggcaacatgccgcccgaggactcgctctacttggttgcggccccctactactacggcttctacaacaaccggctgcaggcgtactgcaagcagaacctggagatgaacgtgacggtgcagaacgtgctgcagatcctggaggcagctgacaaaacgcaggcactggacatgaagcggcactgcctgcacatcattgtgcaccagttcaccaaggtctccaagttgcccaccctgcggtcgctgagccagcagctgctgctggacatcatagactccctggcctcccacatctcagacaagcagtgcgcagagctgggcgccgacatctgaggccctgtggcgcctgcccattgtgaagaatcgccgtgcctgcctgccctgcctactgagaagactaccggctatgcgcatgcctatggcagtgggtgcacctgccaggccaagggtcagggtgcccagagcctccaaagagagctgaggggatgtggggccccaaactcattaattcactgaagacacaggtcccacaggngagcggatgatgaagcagaccccctcctgtcatcaccctctcnctggtgtagtgtggatgcgaggccacggnctcagtgatgggctcaccacccagaaagtggggaagagactttgggcctcccaccccagtggggcttggcctggcttctgtgggcctgggccgtggttgtggactcangggcactggggcctgtcaccaaggctcctccaaaatggcgggaagaaggcttaacagaacttgcgctgcaccagcgaaatctgccctgggctgctcctgtccccaccaaccctcactgaaaatccatggaaaggggctcctcctcccacctggaaacttgtgaatgggggacccattgaatgtatggggtctcaccctaaacttaaggtggaaattttggagatgaaaaggcccctgaaaggtcaacctcccaaggtccggtcctgcctggggccaaagccctgggttttccacagggggcttgaaagggattcccaaactccaccctggtggtgccattggccaggggccccggccccggggaaaaaaacccccnccaaaagtcccccccggtgttctcct

SEQ ID NO: 349143 - DNA, 2008 bp, Homo Sapiens
gagcgaggcctgggtggcgaattcggcacgagggccccctactactacggcttctacaacaaccggctgcaggcgtactgcaagcagaacctggagatgaacgtgacggtgcagaacgtgctgcagatcctggaggcagctgacaaaacgcaggcactggacatgaagcggcactgcctgcacatcattgtgcaccagttcaccaaggtctccaagttgcccaccctgcggtcgctgagccagcagctgctgctggacatcatagactccctggcctcccacatctcagacaagcagtgcgcagagctgggcgccgacatctgaggccctgtggcgcctgcccattgtgaagaatcgccgtgcctgcctgccctgcctactgagaagactaccggctatgcgcatgcctatggcagtgggtgcacctgccaggccaagggtcagggtgcccagagcctccaaagagagctgaggggatgtggggccccaaactcattaattcactgaagacacaggtcccacagggagcggatgatgaagcagaccccctcctgtcatcaccctctcctggtgtagtgtggatgcgaggccacggctcagtgatgggctcaccacccagaagtggggagagactttgggcctcccacccagtggggcttggcctggcttctgtggcctgggcgtgttgtggactcaggcactggggcctgtcaccaaggctcctccaacatgcgggaggaggcttagcagacttgcgctgcaccagcgaatctgcctgggctgctcctgtcccacccaccctcactgagatccatgtaaggggctcctcttcccacctggaacttgtgagtggggacccatgatgtatgggtctcacctgacttgaggtgaattttggagtgaagggccctgaggtcagctcccaggtcggtcgtgctgggccaggcctggttttcacaggggctgaaggatcccagtccacctgtgtgcatgtcagggctcggccgggaagaagccagcaaagtcccccgtgtcccttgctgagtattctgtcacagacaagcctccattaaagccacagcagtgctacccaccacacacaccttgctggcccggccaccactgctggcttcagccccttgagcagcccatggcttagcagacccccagatgtaggtcagtggccttacctgtctctatccatgctgtcaactcctgcctccacctggggtcacccagtcacattgggaagggctgtgaaggcctccaggctggccccttccaggggaatcctggaggcctggggtgggctcctgccccttctgccctgccttgcccctgcactatgctcttggctcctgtggaaggagggctgccctcttgccctagtgagggccccatgttggatccactctagtgctgggagccagcgctcccttactgggaacaggattccaggacccctttcttgttgtggctgccatgaagccacagctccttggggaagtgacctgctctcctttgggtgtatgcaggtgtgtggggggccctgagtggcaagttgcttagctaacaggagatccataggcagcctgcaggctaggaagtggcctagtgcaagatgagctgggaacaagggaggagagagcaggagctggggcagaggctgagccgggaggcccttgaggtgaggacacagcaggcccaggaccatggctggggaggatatgtcagcacctggaagtggagtgcaggctgcagcgcccagccatgtgggccaggtgcattcactcagagtggggccacacacccatctacccagtttccacaagatgtggctcctgccacacccacagggcagcctcctccaaatccctcctggaggggcctacccagaagcctccttgaaccagtctgcaaccctgctctatgctgacccttgtcactgaaccctgatctagacttatatgaataaatgaaattacatgccaagggccctaaaaagcaa

SEQ ID NO: 349144 - DNA, 419 bp, Homo Sapiens
  misc_feature (73)..(73): n is a, c, g, or t
gcctaggaaattgcccctattgcaaaaaatgaacttgggaaaaaagggaggaaaagaaccaggaagctggggncaaaaggctgaagccgggaaggcccttgaaggtgagggacacagcaggccccaggacccatggctggggaggatatgtcagcaccctggaagtggagtgcaggctgcagcgcccagccatgtgggcccaggtgcattcactcagagtggggccaaaaacccatctacccagtttccacaagattgctcctgccacacccacagggcagcctcctccaaatccctcctggaggggcctacccagaagcctccttgaaccagtctgcaaccctgctctatgctgacccttgtcactgaaccctgatctagacttatatgaataaatgaaattacatgccaagggccct

SEQ ID NO: 349145 - DNA, 823 bp, Homo Sapiens
  misc_feature (105)..(105): n is a, c, g, or t
  misc_feature (137)..(137): n is a, c, g, or t
  misc_feature (157)..(157): n is a, c, g, or t
  misc_feature (189)..(189): n is a, c, g, or t
tcccggcaggcccaggaagatgggcagggctgtgccgacgcggcgatccccttggggacctcggtagcgtcttggtcacgacggtgctcaacctcgagcggctgnacgaggatctcttcagagaaaggcattactgngtaccggccaagaggctgtntggtggtcagatcgtgggccaggccctggtgnctgcagccaagtctgtgagtgaagacgtccacgtgcactccatgcactgctactttgttcgggcagatgccatcatgtgttctgcgtagatccccagctgagaagagtttgtggacctttacagtatgtgatttgtattaagaaaaccatggggtttcccccttcattttgtaaatatgaaagttatccctgtaatggtaaatacactttttcatactgtcccgtgtctcttactcctcatccctgaggagtattgattggcccccctcttctcggcccccagtcactgctataaagtatttgaatacttaccttgggctcagccaggttcttatctttatgctagttgggagtaaatatgtgctttgtttctttaatttgtttgtaagtaccagccttttgatattgtaatccttccagcctagtgaaatacctggctgttttcttttgtgtgggtgggggcattacttgaactctgaatctcttcatcctgtgatggaagaattcaatgagtctttgccagtaaagtatctagtgcagggcttggcataatctagttttccataaatattattagtttttgatgattaacttatgggaataattaaaatttgcatgatacagagaaaaaaaa

SEQ ID NO: 349146 - DNA, 1174 bp, Homo Sapiens
gcaaagataacatcggctaggtcgaggccgggttgcgaattcggcacgagggcggagcgggtgtgcaggcctgcagcattgaactagatgtcgtccccgcaggccccagaagatgggcagggctgtggcgaccgcggcgattccccctggggacctccgtagcgtcttggtcacgaccgtgctcaacctcgagccgctggacgaggatctcttcagaggaaggcattactgggtaccgggcccaagaggccttgttttggtggtcagatcgtgggccaggccctggtggctgcagccaagtctgtgagtgaagacgtccacgtgcactccctgcactgctactttgttcgggcaggggacccgaagctgccagtactgtaccaagtggagcggacacgaacagggtcgagcttctcggtgcgctctgtgaaggccgtgcaacatgggaagcccatcttcatctgccaggcctccttccagcaagcccagcccagccccatgcagcaccagttctccatgcccaatgttgccaacaccagaagagctgcttgactgtgagaccctcatttgaccagtatttaagggaccctaacctccaaaagaggtacccattggcgctcaaccgaattgctgctcaggaggtccccattgagatcaagccagtaaacccatcccccctgagccagctgcagagaatggagcccaaacagatgttctgggtgcgagcccggggctatattggcgagggcgacatgaagatgcactgctgcgtggccgcctatatctccgactatgccttcttgggcactgcactgctgcctcaccagtggcagcacaaggtgcacttcatggtctcactggaccattccatgtggttccacgcccccttccgagctgaccactggatgctctatgaatgcgagagcccctgggccggtggctctcgggggctggtccatgggcggctgtggcgtcaggatggagtcctagctgtgacctgtgcccaggagggcgtgatccgagtgaagccccaggtctcagagagcaagctgtagccagaggtaccagcttcgcctggggcttcaagaacctcccatctatccccattcctgagacaggagttacagtcccttttggccctcacatccaataaagagactgataccaaaaaaaa

SEQ ID NO: 349147 - DNA, 1140 bp, Homo Sapiens
  misc_feature (1042)..(1042): n is a, c, g, or t
  misc_feature (1118)..(1118): n is a, c, g, or t
taggtagcgaggcctgggtggcgaattcggcacgaggcggaagagtcaggttctgtgtatgtctccgcgtcttccgcggagcgggtgtgcagggcctgcagcattgaactagatgtcgtccccgcaggccccagaagatgggcagggctgtggcgaccgcggcgatccccctggggacctccgtagcgtcttggtcacgaccgtgctcaacctcgagccgctggacgaggatctcttcagaggaaggcattactgggtaccggccaagaggctgtttggtggtcagatcgtgggccaggccctggtggctgcagccaagtctgtgagtgaagacgtccacgtgcactccctgcactgctactttgttcgggcaggggacccgaagctgccagtactgtaccaagtggagcggacacgaacagggtcgagcttctcggtgcgctctgtgaaggccgtgcaacatgggaagcccatcttcatctgccaggcctccttccagcaggcccagcccagccccatgcagcaccagttctccatgcccactgtgccaccaccagaagagctgcttgactgtgagaccctcattgaccagtatttaagggaccctaacctccaaaagaggtacccattggcgctcaaccgaattgctgctcaggaggtccccattgagatcaagccagtaaacccatcccccctgagccagctgcagagaatggagcccaaacagatgttctgggtgcgagcccggggctatattggtaagagcgagggcgacatgaagatgcactgctgcgtggccgcctatatctccgactatgccttcttgggcactgcactgctgcctcaccagtggcagcacaaggtgcacttcatggtctcactggaccattccatgtggttccacgccccctttccgagctgaccactggatgctctatgaatgcgagagcccctgggccggctttgggatcttcatcttccaaatgaaaaagggtgaggcccgggaacctgctctgctctaaatttctagaatggggctggnaaatgtgattcaccttctcccagggacccagttctagatccaaaaacaggtttcagattctttggtaataaccatngggcaaatcatatcctttccat

SEQ ID NO: 349148 - DNA, 456 bp, Homo Sapiens
  misc_feature (34)..(34): n is a, c, g, or t
  misc_feature (42)..(42): n is a, c, g, or t
  misc_feature (48)..(48): n is a, c, g, or t
  misc_feature (379)..(379): n is a, c, g, or t
  misc_feature (393)..(393): n is a, c, g, or t
ttggtaacgcaggctgtgtatgtttccgcgtctnccgcggangattgnttccagggcctgcagcattgaactagatgtcgtccccgcagccccagaagatgggcagggctgtggcgaccgcggcgatccccctggggacctccgtagcgtcttggtcacgaccgtgctcaacctcgagccgctggacgaggatctcttcaggtagccggcagctcctgcccagcatcccctcctttagggcagaaacttgatcttgactgccgccgcccggggcccctggctccgggactagtatggctctgcgtgggatgcaccctctgccacgattaggagagaactcgcccccaacagagctgttctctctgcttttggtttcctncctttcctttccgnggttgcgaaggtcttgcaaaagttgaagcaaatataagttggtgaacttgagagaaccttgtt

SEQ ID NO: 349149 - DNA, 494 bp, Homo Sapiens
  misc_feature (22)..(22): n is a, c, g, or t
  misc_feature (61)..(61): n is a, c, g, or t
  misc_feature (67)..(67): n is a, c, g, or t
  misc_feature (89)..(89): n is a, c, g, or t
  misc_feature (154)..(154): n is a, c, g, or t
  misc_feature (331)..(331): n is a, c, g, or t
  misc_feature (397)..(397): n is a, c, g, or t
ggctaaaatggtcctgaactgnaaaccccaggaacccaggctgaaggggacctgttgcaancgaagncgaacatgaaaaatgcaactgnctcgtggccgcctatatctccgaactatgccttcttgggcactgcactgctgcctcaccagtggncagacaaggtgcacttcatggtctcactggaccatttccatgtggttcccacgcccccttcccgagctgacccactggatgctctatgaatgcgagagcccctgggccggtggctctcgggggctggtccatgggcggctgtggcgtcaggatggagtcctagctgtgaacctggtnccaggagggcgtgatccgagtgaagccccaggtctcagagagcaagctgtagccagaggtaaccantatgcctggggcttcaagaacctcccatctatccccattcctgagacaggagttacagtcccttttggccctcacatccaataaagagactgatacc

SEQ ID NO: 349150 - DNA, 1349 bp, Homo Sapiens
acgtctagaatcggagagaaatggattcacatgtatcagttgagacgcgtgtgcttatcagtgaaagcaaatgtaagtacattaatatttcattcattctctattagaacacagcagagaattacattgttagttgtattatttacagtgtaaactcggaagacttgagcaaagcatcagttagtttatcaacagacctaggaagctccctgtcccctcctttcagggttcctttccttggaaatgaaatatatcttaaatcagacttttacataacttaaagcaccagcttgacaatttaaagttttattttcagcttttataaaatactcctgctttgaaaggcaaagttgaatgtaaaaatgtgaatgtaattaaacaagtcactggcctgcaaactacatattgcaatagtctttatgttttactactatattcacttcttggaatgaatttgcttgtaggtttgaaacaaaatatttgccttttgtcttgaaaaattcccttaaaaaattaattatttttggaactgtacaactacattttcattcgatgttaaatatgcaacttggtccttggatatcatgttacaaagtccaacctgttggataacttgttatagaaaacaataaaaaaccttaaactatcataaaatattactgatgttaacagtcatgtatgtataacacatcactgtatctagattttcctgttattggatgtttaaattaccaatgtacaatcaggttttaaaatgtaatacttaaatttccattcactatgtaaaattaaaagctctaaaagaccctttgagttctgtatttcagaaacattagaacactattaaggcattatttaaacagaccccaaggaaagtaactagtatgcctgaattacagagcaagtagtattttaaggcagtcaaaaggttcattttttcactttaaggctcttgaatacttaagtttattctatgtagacattattctgtgtaatttaaatattcatcaaatggtcagttattgaaatcaaagcctttatataaagcaaatggacagtttagaactagattataataccccactccccactggtttttataaaagatgattcttatatctcatccctttggaaaatttcattatcagaagctggcaataaaaggaaaaacatataactgaaatacattacagaagttatgcccagtcacgccataccagatatagagagtccatattcagagtaacagtgcaacaaaaacactttgagtactattcattaattgtatattttaaatctaatttggctacgtatggattatatatagtttacgttacaaataaagcccc

SEQ ID NO: 349151 - DNA, 911 bp, Homo Sapiens
  misc_feature (700)..(734): n is a, c, g, or t
  misc_feature (861)..(861): n is a, c, g, or t
agcggagtctgggctctgtgagactgaggtggcggtcagccggagtgagtgttggggtcctggggcacctgccttacatggcttgtttatgaacattaaagggaagaagttgaagcttgaggagcgaggatggcagtcaacaaaggcctcaccttgctggatggagacctccctgagcaggagaatgtgctgcagcgggtcctgcagctgccggtggtgagtggcacctgcgaatgctttccagaagacctacaccagcactaaggaagcccaccccctggtggcctctgtgtgcaatgcctatgagaagggcgtgcagagcgccagtagcttggctgcctggagcatggagccggtggtccgcaggctgtccacccagttcacagctgccaatgagctggcctgccgaggcttggaccacctgcaggaaaagatccccgccctccagtaaccccccgcaaaagattgctttcggagctgaaagacaccatctccaccccgcctccgcagtgccaaagaacagcatcagcgcctcccatcgccaagcaccttaaaaaaaacggtccccgggggcccccttttgcgccgggttggacaaccttgccctgggggggtgcggcagaatacatcctcccccaattttccctcggcaaacgctaggaaactgggcgggaaaggagggttcaatgaacaggagcannnnnnnnnnnnnnnnnnnnnnnnnnnnnnnnnnnaagcggagcgtcccgaccgaaccccgagcctgctattccacccaaattaacgcgccgagatgcccacgcccaccctacccttcccacccgacccgaggacgcccccctcccactaacccccgtcctncgaaaacctcctctaccgggcccgccacccaatgccacgcgccaataaat

SEQ ID NO: 349152 - DNA, 1036 bp, Homo Sapiens
  misc_feature (42)..(78): n is a, c, g, or t
atgaacctataggcgaatggagcttcaccgcggtggcggcgnnnnnnnnnnnnnnnnnnnnnnnnnnnnnnnnnnnnnatcaggccaaatcggccgagctcgaattcgtcgagagcggacagagggtaactcagatcaggcttagaaatcacttgacttaactcagcagcactttttcttttctttgtgtctgtattattttagcagccttctctaaatactggaggcattggatttcatgtcgccaaaaggaatttaaaaatgacaaaagtgtaatctgttagaaatagttaatttgtagaattttactctataaggaggtttagtttcaatttgttttgaaatgaaggaattaagttgtgtttttaaccaaatgaattggcatctttatatttaggagaagtaacattggtgattatttatttcaagaatcatgactggaaaaagcttggaagtttagtagaggagtatatgttgtacatgcaaagacaagatctgcatgaatctatgtatttctgggtgtctggtgaaggccactttaggtgactggccagagaaggaggtgccctagtgatccttgagtcacagccatactgctaggaccatgactaccataccaagaaaaggcagcagccacctgcctggcagtttgcacacctgtaaactgaagctgcaggaggaccggcgacagcaagaaaaatctgtcattgctcaacccatatttgtttttgaaaagggagaacaaacttttaagagacctgcagaagacaccctgtatgaagcagcagaaccagaatgtaatggttttccaagaaagcgtgtacggccttcatcttttacttttcatattacagattctcagtcccagggagtgaggaaaaacaaagtttttatgacatcagctcttgtgcaaaagtaaggttgatataaagaagtgctgaacaaggttcctgggaaacatttctaaaaaatgttattaagacctggctaattttgcagctacctccaagcttcgaaagttgtggcaaaaggtaag

SEQ ID NO: 349153 - DNA, 2285 bp, Homo Sapiens
  misc_feature (1165)..(1190): n is a, c, g, or t
  misc_feature (1823)..(1855): n is a, c, g, or t
  misc_feature (1865)..(2105): n is a, c, g, or t
cggtccggaattcccgggatgcggcggcaagctgtgcgacctcttctgcggccggcctgggcaggtgtcttcctcgagaggcagggaggggatcccggacactagctttatcgtcatctgggaaattgttaaaaatgcaaattcacaagtttgagagccatggttccaagaaactgcataagcatacgaaataagttgcagcctcccgacttataccctggtacttctagtctaaaacaggatttgactctactaatccagccttatacaggatgctgtgatctttgctcctttgtgaatgactgttgctggtagctggttatgctcatgatgatgactggattgaccccacagacatgcttaactatgatgctgcttcaagaacaatgagaaaatctcacgcaaaatatggtatttcaggggaaaaggatgtcagtcctgacttgtcatgtgctgatgaaatatcagaatgttatcacaaacttgattctttaacttataagattgatgagtgtgaaaagaaaaagagggaagactatgaaagtcaaagcaatcctgtttttaggagatacttagataagattttaattgaagctggaaagcttggacttctagcttatgcacagcatcaggctgaagtcgccaagatggagccattaaaacaatgtgtgtgccaaaaagatgcactggactggaagtatctgggaatggtttagaagttcatggacctataaggatgacccatgccaaaaatactatgagctcttactagtcaaccctatttggttggtcccaccaacaaaggcacttgcagttacattcaccacatttgtaacggagccattgaagcatattggaaaaggaactggggaatttattaaagcactcatgaaggaaattccagcgctgcttcatcttccagtgctgataattatggcattagccatcctgagtttctgctatggtgctggaaaatcagttcatgtgctgagacatataggcggtcctgagagcgaacctccccaggcacttcgaccacgggatagaagacggcaggaggaaattgattatagacctgatggtggagcaggtgatgccgatttccattataggggccaaatgggccccactgagcaaggcccttatgccaaaacgtatgagggtnnnnnnnnnnnnnnnnnnnnnnnnnntgttgacttgagatttcagactggcaacaagagccctgaagtgctccgggcatttgatgtaccagacgcagaggcacgagagcatcccacggtggtacccagtcataaatcacctgttttggatacaaagcccaaggagacaggtggaatcctgggggaaggcacaccgaaagaaagcagtactgaaagcagccagtcggccaagcctgtctctggccaagacacatcagggaatacagaaggttcacccgcagcggaaaaggcccagctcaagtctgaagccgcaggcagcccagaccaaggcagcacatacagccccgcaagaggtgtggctggaacacgtgggacaggaatccggtcagcagccccctgtggctagaggaacaccagcacaaacgacagcctcaagtctccttcgagctttatatccatttggggatgaagtctactttgacagctagcaaggcgacatgcaactgttgttgaatgatgacagcaattcaggaaagacttaaatatgaaagcaaattgaacacatcgggtgtttgttatcagaaaagagatgagatgagataagacttgtttattgactagccaatatgtcattaaaattaaggtttatattgtgaagcnnnnnnnnnnnnnnnnnnnnnnnnnnnnnnnnngctctgtcannnnnnnnnnnnnnnnnnnnnnnnnnnnnnnnnnnnnnnnnnnnnnnnnnnnnnnnnnnnnnnnnnnnnnnnnnnnnnnnnnnnnnnnnnnnnnnnnnnnnnnnnnnnnnnnnnnnnnnnnnnnnnnnnnnnnnnnnnnnnnnnnnnnnnnnnnnnnnnnnnnnnnnnnnnnnnnnnnnnnnnnnnnnnnnnnnnnnnnnnnnnnnnnnnnnnnnnnnnnnnnnnnnnnnnnnnnnnnnnnatgagccattgtgcccagcctatatagtgtgaagctttcaggaaaatcagaacaggggtagacagctgttaaaaagcaatgtttaacctgggaatactgttgaatgattcacaggctgtaagcacctattggtatacccaaaataatacacaaagcttgcaacttagtgtacaaataccg

SEQ ID NO: 349154 - DNA, 2914 bp, Homo Sapiens
  misc_feature (1777)..(1786): n is a, c, g, or t
cagtctagcagtgttgcgtcctggttgtttgctgacgtctcttggtggtgagatggacaattacgattgcgggtgatctccagttctctacggactcctggtgtgtcacgctgagtgaacttgggcacgccaggctgctggctgaagtgctgaagcaatgagatgttggatcaagattagcttctatgcttccaccatgatagacactgtgagaagatacaggaggagctgacacgtctccagattgaaaatgaggcagccaaggatgaggtgaaagaagttctccaggccctggaggagctggctgtcaattatgaccagaaatcacaggaagtggaggataagacccgggccaatgagcagctgacagacgagctggcccagaaaacgactacattgacaaccacacagagagagctgagccagctacaagagcttagcaaccaccagaagaaaagggcaactgagatcctgaatttgctgttgaaagatctgggggagataggtggaattattggcaccaatgatgtgaaaactttggcagatgtgaatggagtcattgaggaggagtttaccatggcccgcctgtacatcagcaagatgaagtcagaggtcaagtccctggtgaaccgcagcaaacagctcgagagcgcccagatggactccaacaggaagatgaatgccagcgagcgggagctggcagcctgccagctgctcatctcccagcacgaagccaagatcaagtctctgacagactacatgcagaacatggaacagaagaggaggcagctagaagagtcccaggactcgctcagcgaagagctggcaaagctccgagcccaggaaaaaatgcacgaagtcagcttccaggataaggagaaggaacatctgacgcggttgcaggatgctgaagaaatgaagaaggcgctggagcagcagatggagagccaccgggaagctcaccagaagcagctgtccagactccgagacgaaattgaggagaagcagaaaatcattgatgagattcgggatttgaatcagaaactgcaactggaacaggagaagcttagttctgatttatacaagctgaaaatagaggaccaagagagagaaatgaagctggaaaagctcttattgctcaacgataaaagggaacaagccagagaagacctcaaagggctggaggagacagtgtctagagaattgcagacactgcacaaccttcggaaactctttgtccaggatctgaccacccgagttaaaaaaagtgtggagttggacaacgatgatggagggggcagtgctgcccagaagcagaaaatttccttcttggagaataacctggagcagctcaccaaagttcacaagcagctggtccgggacaacgcagacctgcgctgtgaactgcccaagctggagaagcggctgcgtgccacggcggagcgcgtcaaggctctggagagcgcgctgaaggaggccaaggagaacgccatgcgggaccgtaagcgctaccagcaggaggtggatcgtatcaaggaggccgtgcgggccaagaacatggccagaagggcccattcagcccagatcgccaagcccatccgccccggacactacccggcctcatctccaacggccgtccatgccattcgagggggaggaggcagctcttcaaattccactcactaccagaaataaatacaaaatatgactccacgtagcatgtcaaggactacattaatcaccaattcctttatttttccccccctacagtttccannnnnnnnnnatacttgcttactccagccatctgcagtacaccagtttcaggtcttttgagctgtgtagagtttctgtgtgtacagatgtgtgctcggacttttctctttttgagaaatctgaaggagatggttgcagaagatccacttactactgagaaccattaccaccgactcggcctccggggtgttgggtggtttctgggtggttcctggagcctcctctgggcagtgcactgtcccatctgtacgccctaatgtgccattccctagaggggaacaaccaagtgccgtggaggcagatgatcatggtctgcctcaactgtctggtttcctgtaaaataaacacattgttttatatttttagggaacaaaaagtgctgctatagggttcaaagttttccttctgaacacttttccgaaacaaattaccccaaagacacattttgaatatcctggtcacatctttggatctgtaaaatataccttttagtatggcacctgttaaaatgcaaagcaaatttctttggggcagaaaaacaatctgacagtagcagtgtagaatttgttcattcaaatacatctgtgtaaatgcaaaaagtcataaaattcacctccgagctgcttgcttttgaacctgcagcaactagttttaaccggcccggtttgaacatcgttctttcagaagtgctgaaaatgctgcaaagttggataagtggaaatgtggctgcccctctcctcactacttcctctctgatcgttctgaagcttgcattgggaatggctgctttctctaccattttcagcttgagtgggtattgctgaagaaatccaacatcattccagcagttgaaaaaggaagccttcgggagaaagtgcttgtcaaaattttgttctttgtgctagagtatgagtaagttgccatgaataagttattattttaacccataattggcgactgtttatatgaattctttcttttgcaccaaataggtttcatcttcttaggcacaatttagtatcacatagatggatattttacattcagttatgcttatcaaatacatgaattaaagcttgatcacccttactttccagtgtgttaataagagatcaatttcaagtgtgtttcgtgctgg

SEQ ID NO: 349155 - DNA, 294 bp, Homo Sapiens
ctaaacgaagatgattaccccaaagacacattttgaatatcctggtcaaatctttggatctgtaaaatataccttttagtatggcacctgttaaaatgcaaagcaaatacctcaggaagattagcatccccagttcgtttgcttccaatttcaaatcatattctgtggattacattgctgggatatggggtacttgccttgctgttagcagtctggaaatgctagttttctgatttctgccttaagaagattgaagccatttcatagaaaattatcaaaatataaggaaagtgt

SEQ ID NO: 349156 - DNA, 2148 bp, Homo Sapiens
  misc_feature (65)..(77): n is a, c, g, or t
  misc_feature (263)..(272): n is a, c, g, or t
  misc_feature (426)..(494): n is a, c, g, or t
  misc_feature (1986)..(2003): n is a, c, g, or t
aataacaacaaaaggggggtgttccgggtcataaaatatatcgcgggggaggcgccaggaatatnnnnnnnnnnnnnaaaagataaaatcaggtagtttatcgggggaggggatgattaaaacatgtaaaggaatgttttggggaggctccggattttttctggtcaaaataaggcttggggccaaattttttctgaaatatcgggcggaatgggggggcgaggatcatccaataatccctggggtggccaccaggtgggtgnnnnnnnnnnagggcgtgccttcccattggggcccatctcagcctggggtagcgatctgcctccacttgttctgacacttggagagtgacacagtggacaggaggtgtgtcagccaatgaaaggcaggacctcaggctcctccagctcagtttcctctggcagnnnnnnnnnnnnnnnnnnnnnnnnnnnnnnnnnnnnnnnnnnnnnnnnnnnnnnnnnnnnnnnnnnnnnattgaagcctactcaccccaaatcactgctctttcccctgcagtccactgctgaaaagcagttgacaggcaccgacgaggggaatcaggggcaggtgggggaggggatggagcctgaccaggtctagaagtaaacaggagtccagccagtgactatccctgccagttcctgcaggtaaattaggcttcacatagccagacgtttgctccttcatcggctggatgggaacaaagaacccttttaaccaatgagggaactgaggctgaagaagagctcagaccttgctcggtaattacagcagcccctggtgaaggccacaccctcacccttgactggggatggctgtagggaactggcagctcaaaaggggacaggtggttttgcccctgggataatgggatcactgggccttactgggaaaacctcttgggcccggggcaggccaagagcctgcccctgggcctgggcagcaaggtctctgccaaggacagaggccagtgatggaccagcttggaaaccaggaggcctgggcagcatctctcctggcctgcagacctggcgttgcctgtctcacctgggcctgggcagcaggacttgagaaaagaacccagcagacagctggtgatcggggagagctcagaaaatctcggatcaaacatcctcaccagttctgctccaaccaacacccaggagggtcaagggtaccggagcctcctccaatccctggggacgtggctcttcctcccctaaaatcctccagaggggacagtatctcatgctggcaaaacacggccacacagaggccaaaagcacagagaggcagcaacataattccgagtcggacactgagaatacaacctctatttttttctttagtccaaaacatgtagattggttttgttgagtgttttcttctttttgtttgttttcaacatacttactgcgtataaagtcatgcaaagaaaacagtgcagacagtagatcctagtggatgtgccaaggtattccactcagagtcaatcccagggaaagagggaaagaggaaaagaaagagagaatgcgaacccgaggctgcaggatgaggcatgaagagtagaaattcccagtgctttgctgtggtcatcagacgccaaggggagagaggcaatgaagacacacgctcacgggccccccagaggtgggtggggggtgctgggggcggcacacagatatggtgagatgaaatcctgggaagttcggtagagaagaccccagtttgcgagggaagcaaagaaaagtccaggtatttccatcctgacagcctccctcctcctctctgccctgacttgctgttcctgagtcagtgctggcatctgatgcttccacagtcccaaaaggaacgcctgtgtcagctcaccttgggaccgaaatggcagagaggcccttctccccggagctgagtccgccttggccccaataaccacaggtgacaaggtccacctcagagatgacnnnnnnnnnnnnnnnnnnctagaacagaaaaaaactacccctcacccctcttcctacaccccttccaacctgacccttctcacaataatctgagaagtctagttattacataaatatccattaacgcgaaatccatttacgaaatacacagaaatttggctcc

SEQ ID NO: 349157 - DNA, 863 bp, Homo Sapiens
  misc_feature (452)..(493): n is a, c, g, or t
  misc_feature (696)..(720): n is a, c, g, or t
cccgactagcccgaagccccaactagcccgaggtcacacagcaaggtctggaaaggagcagtgatttgggggtgagtaggcttcaattcccagctctgaccagacttgctgtgtgaccttgggcaagttcctttccctctttggagcttggtttccctgccagaggaaactgagctggaggagcctgaggtcctgcctttcattggctgacacacctcctgtccactgtgtcactctccaagtgccagagaagtggaggcagatcgctaccccaggctgagatggcccccactgtgaaggccacgcctgtgggtgggcagccacctggtgccaccacagggcaccagggatgatcctgatgcggcaggcaggggagactcacagaaaaatctgcccagagcctaccctcaccagacaaactctgtgctcctccaaaacatcctttagatgcnnnnnnnnnnnnnnnnnnnnnnnnnnnnnnnnnnnnnnnnnnccaaacccaagtcaaaaccttggctccagcatgaaaacacgtttacaggaaagtgttctcctgggtttgtgcccaccatggtgcgaatcctgacccaaggcctcctgtctcccttcaaagggagacccttttgggggatgagcttgccaaactccccctgctggtttctttgttactatttgtttggggtttgttttagttcnnnnnnnnnnnnnnnnnnnnnnnnnaaaaatatgtggctgtgaacttgaatgaacactgctcaaactttctgctattgaggggggcgtgggatgggaagaaggggcgtttgttttattcttggtgttttcagtgcaataaatagctacaaacttctgtgcaaaaaaaa

SEQ ID NO: 349158 - DNA, 3269 bp, Homo Sapiens
agcgggtcgtagccccaggccgccgagggagcggcggggccggcgccatggccgagcgaggccgcctcggcctccccggcgcgcccggcgcgctcaacacgcccgtgcccatgaacctgttcgccacctgggaggtggacggctccagccccagctgcgtgcccaggttgtgcagcctgactctgaagaagctggtggtcttcaaggagctggagaaggagctgatctccgtggtgatcgctgtcaagatgcagggctccaaacgaatcctgcggtcccatgagattgtgctgccccccagtggacaagtggagacagacctggccctgaccttctccttgcagtatcctcacttcttgaagagggaaggcaacaagcttcagatcatgctgcagcgcagaaagcgctacaagaacagaaccatcctgggctacaagacgctggccgcgggctccatcagcatggctgaggtgatgcaacacccgtctgaaggtggccaggtgctgagcctctgcagcagcatcaaggaggcccccgtcaaggcggccgaagatctggatcgcctccctgtccagccagcccattgaccacgaagacagcaccatgcaggccggccccaaggccaagtccacggataactactccgaggaggagtatgagagcttctcctccgagcaggaggccagtgacgacgccgtgcaggggcaggacttggacgaggacgactttgacgtggggaagccgaagaagcagcggagatcgattgtaagaacgacgtccatgaccaggcaacagaacttcaagcagaaagtggtagcgctgctgcggaggttcaaagtgtccgacgaggtcctggactcggagcaggaccctgcggagcacaatccccgaggcagaggaggacctggacctcctgtatgacaccctggacatggagcaccccagcgacagggccccgacatggagggatgacgacagcgtcctcagcacccccaagccgaagctgcggccatactttgaaggcctgtcgcactcgagctcgcagacggagattgggagcatccacagcgcccgcagccacaaggagcccccaagcccggctgacgtgcccgagaagacgcggtccctgggaggcaggcagccgagcgacagtgtctctgacacggtggccctcggtgtgccaggcccgagggagcaccctggacagcctgaggacagccccgaggctgaggcctccaccctggatgtgttcacggagaggctgccgcccagcgggaggatcaccaagacagagtcccttgtcatcccctccaccaggtccgaggggaagcaggctggccgacggggccggagcacatccttgaaggagcggcaggcagcacggccccagaatgagcgggccaacagcctggacaacgagcgctgcccggacgcccggagccagctacaggtgcagctgcagatccccaggaagactgtgtatgaccagctcaaccacatcctcatctccgatgaccagcttcccgaaaacatcatccttgtcaacacctcggactggcaggggcagttcctctccgacgtcctgcagaggcacacgctccccgtggtgtgcacgtgctctcctgcggacgtccaggcggccttcagcaccatcgtctcacggatacagagatactgcaactgcaattcccagcccccgacccccgtgaagatcgccgtggcgggagcgcagcattacctcagtgccatcctgcggctctttgtggagcagctgtcccacaagacacccgactggctcggctacatgcgcttcctggtcatcccactgggctcccaccccgtggccaggtacctaggctccgtggactaccgctacaacaacttcttccaggacctggcctggagagacctgttcaacaagctggaggcccagagtgcggtacaggacacgccagacattgtgtcacgcatcacgcagtacatcgcaggggccaactgtgcccaccagctccccatcgcagaggccatgctgacctacaagcagaagagccctgacgaagagtcctcccaaaagttcattccctttgtcggggttgtgaaggttggaattgtggagccatcctcggccacatcaggcgactcggacgacgcggccccctcgggctctggcacgctctcctccaccccgccgtccgcatctcctgcggccaaggaggcctcacccaccccgccctcctccccgtcggtgagcggaggcctgtcctcccccagccagggtgtcggcgccgagctgatggggctgcaggtggactactggacggcagcacagcctgcggacaggaagagggacgccgagaagaaggacctgcctgtcaccaaaaacacgctcaagtgcactttccggtccctccaggtcagcaggctgcccagcagcggcgaggctgcagccacgcccaccatgtccatgaccgtggtcaccaaggagaagaacaagaaggtgatgtttctgcccaagaaagcgaaggacaaggacgtggagtctaagagccagtgcattgagggcatcagccggctcatctgcactgccaggcagcagcagaacatgctgcgggtcctcatcgacggcgtggagtgcagcgacgtcaagttcttccagctggccgcgcagtggtcctcgcacgtgaagcacttccccatctgcatcttcggacactccaaggccaccttctagccccacccaccagggggcccacctcctgccccatgctgtgaggggcccagctgcatttctgttaacatttcagtttactacagagacagacgcttaaaacacaaagagaaacagtcttaagtatgaatgtgctcacaacgtggaaactaacgggggagctcctgccaggagccgaataactgctctgcttattaacccgaacgttcggcccggggctgggaagccagaaggacgatgctgagccatggatcgcggaaggcgtcctctggcctcaggagccacccagagcctcacaggctgagttcttgcctctgtgtcctgtccttcctggaagtcaggactctgcttcctcagggagcccggggaaggcggagctcagtggccacaggccgagggccatggggccgctcagtcccgttggggttgtcctgagttgagcctgggggggccgtcctgcccgcctaagagatgcccccagcaccgcacactcgtggttcccaataaactcctgcctgcggcggaggttttatagcagcaa

SEQ ID NO: 349159 - DNA, 824 bp, Homo Sapiens
  misc_feature (301)..(313): n is a, c, g, or t
gcacgagctttaaaatagatgtatttatattgcacttcatactctattctttatagttcgagccatagcttgtttcctattaatgcttttcctgtctagtttgtgtttacttaactgcctataaaaatcgtaagagtaatttttttcagtggaggacctgatggagctggagtggttgtatacagcatttgacaggaactataccttggaaaatcagattgtgattctcaggtctgtgttgcttttggtttgaagagttttgggaacgttttaattattaattacccttctctaaactttnnnnnnnnnnnnngcttttctcattaaaacataccatttgtgcaggtccttaagctatacagattctaaaaattgttagtattgagacattaacttctaagatttctcttttttggcctccaacctatatagaattgagtgttaactctgcatggattttgtttgttttaattgaactgacttctctaactctcatagctgtgagttccaaatggcaagaaaatgcatcttttctatatatgtatcacgataggctatagcatgtttatgactctggtttctttctcttcaggtggttttataccattactgttaatgttattttaacttggcatgtataacattgccatatagagtagagtagaaagttgcaaattttgatagtttacagagttaaacactaaacatatccaaagtccatttagagttttgggtgttgtattttgccatttttgtgatgtgtggccttttattctgtaatctcttctaaataaaacattgaacatccagcaaacataaaacct

SEQ ID NO: 349160 - DNA, 744 bp, Homo Sapiens
  misc_feature (697)..(697): n is a, c, g, or t
agccgctccattagttgatgtagtagtactggtagtgatctcatccacctttttcatatcaagttgttttactatttcttcagcttccacagcctgtcctggagaatcggatcctgacgttccatgtttatttactggggaaaaaaagtggaagacaggtgaaaatatggtccccaacaaagtagtccttggaggactgccagaggaaggattatcttctaattttccattttgttttacatgttgatttgtcatttcataactaccagcttctccatttacttgacttttccgtcttactcgagatatctgtttgttaggtttttctcctgctcttggtgttgacgtgatcaaattgttatctatatcacgttcaattctactccgttttgaaggattttctctctcttccttaggtgtgcttcctttaataaattttttaattgaagacaacaagccggtttcattcttcgatggtttttctcctcctgaaggcaggctatcatcaacctctgaatatttcctctttgctctggcagtgcgttgtgtttggatttgatttgactgctgagaagctttccgtgttctcagcctcatcttttatgggtgccacatgtaaaactaactgtgacgacagagaagtgtcctcaggctccggcgatggtcccgactgcgcaatgtgtggtgtctttcccgncttaccccgcagccagcaacagaaccagctccttcagccagtcgcca

SEQ ID NO: 349161 - DNA, 982 bp, Homo Sapiens
gcgactggctgaaggagctggttctgttgctgctgcgggttttacatgtggcacccataaaagatgaggctgagaacacggaaagcttctcagcagtcaaatcaaatccaaacacaacgcactgccagagcaaagaggaaatattcagaggttgatgatagcctgccttcaggaggagaaaaaccatcgaagaatgaaaccggcttgttgtcttcaactaaaaaatttattaaaggaagcacacctaaggaagagagagaaacatccttcaaaacggagtagaattgaacgtgatatagataacaatttgatcacgtcaacaccaagagcaggagaaaaacctaacaaacagatatctcgagtaagacggaaaagtcaagtaaatggagaagctggtagttatgaaatgacaaatcaacatgtaaaacaaaatggaaaattagaagataatccttcctctggcagtcctccaaggactactttgttggggaccatattttcacctgtcttcaactttttttcaccagcaaataaaaatggaacgtcaggatcagattctccaggacaggctgtggaagctgaagaaatagtaaaacaacttgatatggaacaggtggatgagatcactaccagtactactacatcaactaatggagcagcttactcaaatcaagcagttcaagtgagaccatcactaaacaactggttttacaagaaggcagaagaaacagttaatcgtgatatccccaccccctttacagcacccaggtaactcccagatagggggtatttcatcagcccaacgccgaaggcccacctatgaaagaagaactggggaagtatttggacccctatttatttcatccaaacctgttcccgccccctggacggaagaaccacctaaatagggaaacccggcttctttccggtggaaaaacaagaaagccccccccgggaattcttccctaagtttttagaaatt

SEQ ID NO: 349162 - DNA, 522 bp, Homo Sapiens
attggctaaaaacaaatcaattttcttcttggcataaagtgtttcattattataggggtgttcattttaaatagtttaaaaacaattgcagcacattctaagcataagagaaagttattgacaacaggtaccttcctaatctcccaagacgtacttactcatttgtgaagtattaaagtaagaggtaactcaagcagaatgctggctatgaatgtagatattgaagctattcataaacactggaaatagaattttaagcttttagccttcagtggaatgcacatattggacatgtgcatgtgaacacctttttcagtagcactcacggatttccattcgattgtatagaatgaatacaagtgttttagtggaatttgctacttaatttttaatcttgcgatgtccgtgattattacatgcttactagtgttgtggacattgaagacaaggtcattcgtaggtgtcagattacaatggagaaccaaaattcgttttccccccacccacattccaaacaacaat

SEQ ID NO: 349163 - DNA, 443 bp, Homo Sapiens
  misc_feature (396)..(396): n is a, c, g, or t
caggaaataaaatatgtgtgtgtacacacacacggttttgtaaaaggattggaattcatccaaaccttaagattaggaaactgattggctgtaagtgttgcctcaagtaatgtgtcccccgccccataacatgtcttttctgtgccaagtatcctctcctagtgtcagtgtctcaaattatatttatgaagggttatcacataatatgctttgtatttaactacctgcttcccaggcgtccatgacatgaaatgggtgaagcatcagccatgactttcgggtcagttcccaaaatacccaaatgatagggaggtaaagattgcaaaattcctcttaaaaggccatttttacagcttgctaaaatacagtggcaccttatggttgttaatatttttncttttaaagatggagaatgtttttattcttccccttttctcctttgt

SEQ ID NO: 349164 - DNA, 477 bp, Homo Sapiens
acccgcccatcggcccgagtcgtccacagcgcctcctctggagcatcccactgggcattattcaccttctctggcactgagagctcgagagcatggttcagggactctttggagagtggctgcctgtcagtcagtgagctggttttcaatttttcttgggtggtcctcacaatcatgtcctgccggctctcctgtggggtctctctgctgtccagcatgctggggtccccgtgtgggcagccgtatccagctccagaattgcgtggcatctgcctcgggcttccactgaagacagctcagtcacccactgagagaggctagccttgagtgagcagtgggggtgggcatggggcaggggaggcggcaactagagtgacccaaagaggctcatttcctctctatttttagaagctcaaaaaaaattgctcctcagtgaagtttctcagaattaaaactttccttttctttgtggttttg

SEQ ID NO: 349165 - DNA, 1198 bp, Homo Sapiens
cggcggaaggtctgtatgacttccagtcttaatggcaccgagtcagtagacaactgagccaagtgaacattgtgttttcacatttctctgaaagagaatgcctttcagaagtgtcatgaagggcgctggggagggcaaatatgaggatgccagggtaagtctgctccctgtctggctgtgttgggccagagtggaagaaagcataagactctgttacccagccctttatgaaaatgttttcgaatgctttcccaacaatcacgaccacaagagtcaacagtctgtttggatgactgaaaacacacaggtttacgatctgtaaagatagtaggtaagtgatttaatcttgttgtataggtaggccagagggcactcgcagccttctgattgatttaatagattgttgaagattaagagttgacttaacatctctttaggaaaactgagaaaaggctcattactaaggtgtgttttattaccaccgtctgtaagaaaatacaacataggcatgggaatcaaactacttaaagcctcttccagctcactttatgaggccatcgttaccctgaggccaaaaccagacagagatattctaaaagaaaagtctacagaaaaatgttcctcatgaacatagatataaaacttctaaacagacgtttagcctatcaagtccaacaaaaacatgaaaagaaagacacacatggccaagtacattgtccttcccaggaaggtaagtaaggttggtttaacatccaaaaatgcaatgaatgtaactcaacatatttctaaactaaaaagaaaaaccacacaacaatctctaaagtggcagaaaaagcatttgacaaaatccagcatgtatacttgattaacactctcacagcctaatagaataaaacttcctcaagctgataaaggacatctacaaaaaccctacaattaacatgacacttaataatgaaggtctgaatgcatttcttctaagatcaagaacaagccaagagtatgttctcactactactaatcaatgttattctggagattctagccagggcagtaaggcaagaaaaagcaacaagtatagtaataatactgtcttgatgggcagatgacatgtttgtctatgaagaaaattcaatagaatctttaaagaaactcttgaaactaacaggtgagtttagcaaagctataccctatcaat

SEQ ID NO: 349166 - DNA, 975 bp, Homo Sapiens
  misc_feature (371)..(381): n is a, c, g, or t
aggtgactctagaggacccccagacctaaccacacggcaaatgtggtgatgccgaagatgtttactacaaaagcatgccaaacctaggctccagaaaccacgtccatcagctgcatacttactaccagctaggtcgcggcagcagtgatggatttatagttcctccaaacaaagatgggacccctcccgagggaagttcaaaaggaccggctcatttggtcactagtctatagaagatgacacagaaattggaaccaacaaaactgctaacaccttgttgactgttctgagttgatataagcagtggtaataatgtgtgtactcctaaatctttatgctgtcctctaaagacaaacacaaactctcagacnnnnnnnnnnnaaatgggatttttaggtcagcccaggggagaaagataactgctaaaattcccctgtaccccatcctttcttgtcctttccccttcagatggagacttcattatgttaatgaacaagatatgaagaaaatggcactcattgtggccttgttgaattatgttgtgtatgttttaacacctctgatgctgtgttacctaaaattacaaggacctgctttttaaaaggcccagaacaattgtcctgaaattagtaacaatgcctgcatcctagattggagtgctgcacaaacaaacataagagcaaagcaaaactgtatcacatagggtttttggtcactcacaacctgaattcaccacagctggaatagctgtggaaaacaaaataaaacaacaaaattaataatgaaatggaggggaattctagaattatatgctaaatgcatattttatgatttgctgtattaactgatgataaaactaatggcagaaaaagaagttgagcaatttctatgtaatgtacagatactagcattgcacatatagtctgctttctgttcctccagaatttgagtcctgttaatgtagtagaaaaaaaa

SEQ ID NO: 349167 - DNA, 960 bp, Homo Sapiens
gaaatgctcctccctggttatctatgaggctgaagtcctcacctctttcaggtctttgctgaattagaaccttctccataaggcaaggctgatgctgagcaccccactgaaaattttcctctctcccaagaccctcttctcagtccctctacttggctcatttcaggtgtctagcacgtaacgccctttaatacattttgcaagtatttctccacgagtgtgagaaagtggttttctttggtgggggttgatttttcatggcacataaagggcagcagggtttctttgggtcctgtctggaggcctgaaggtcacgctgggcttctggggagcgggtccccttcctgcagcctccctctccacttgcgtgtttctcactcctctctctccctgggaagtgttgcttgataaagatgcagcttttaattaatgtaactgttcaagattacagccggtcatcagctttctaaccagtgcctcacagctctgctggaagagccttgctccggtgatggttgatttgccattctctgtcccagcccagagaagctcccctcactgtcaacgtgccatctgtcaggtgcatgttataaagctgtcatcatgatcagctcattcacgcaccagctttagctttgaggaactgccggccatggcgttgaagacctgctgaagcctccagccagacatctgatgttcaggtctcagggggtccttgctgcttgtgtagcctgacaggtgtggccacggcaggcacaccatggtttggagtttggaaagaagagaccctgtgttattgtagagtgaccactggattgggcttctggaaatccaattctaatcagacttgggttatgcatttactatttcaataaaacatttatggatggactctggtaatcaacagccatatttttgagtacccactgcaggtgaggaaataaatgtactaggtgcgac

SEQ ID NO: 349168 - DNA, 448 bp, Homo Sapiens
aaacgtgccccatcctgtccaaggtgccaatggttaaataaaaagcctgttccatccatggatcaagcctccattccaacgccaccccagcctttaagcctttgaaggaaactgcccggcccatggccgttgaaagaccctgcctgaaaccctcccagcccagacatcctgatgttccaggtcctcagggggtcccttgcctgccttgtgtagccctgaacaggtgtggccacggcaggcacacccatggtttggagtttggaaagaagagaccctgtgttattgtagagtgaccactggattgggcttctggaaatccaattctaatcagacttgggttatgcatttactatttcaataaaacatttatggatggactctggtaatcaacagccatatttttgagtacccactgcaggtgaggaaataaatgtactaggtgcgatat

SEQ ID NO: 349169 - DNA, 881 bp, Homo Sapiens
ttagaatctatggagtggtggaagttacggatagaagggaaaaggcaaaaactatttaccctgcctttgcaggctggggtttttgaaccgaggaaggctgggacgcctgtttccagatggttgtcatggtcacgctgggcgaagagctggaggggagttgtcccctcagctgagcggctgcggtgaaatgccccagtgttcctgggttggctttacggcaaactaaatgcaggggacgctggagtccgactcacctacaccggcttcctcccagccgctggtgtgcggcacacacaacatctgcattaggcagaggtgcaagtgggctgattgaacttttccttcaaaacctgcttgtctgtcctggacctttgatgaaatgggatcccggtcacgcaggctgagacagtggggaccgccgaggccagagtgggctatgcttgagcagggatgagaagggccgcggcagcacgcagccttgacccacgcctgcgtcttgtggtgcaaggccagagggctctctctagaacctgaccgtgcactccatctcctgggagccacttttggcaagagtgagtgtggggggaaaaagtgtgcacaagagatacggaaccctgagctagggtttcctgtcaccaaagagtgagctgcatttccagttctgcgttaaagtatcgtttgttctggtgcctgcctgtggtggtgatttggagactcaaatttcctttgccaggtctcttttgtctttctttgggattggtagtatagaagatgctgggaattgtcttcctcgctcagcctcggctttcccgcactgtaagatgaggcagttgcagaggaggcctcggacgtcctgtgaccctcggcccacactccccctt

SEQ ID NO: 349170 - DNA, 1081 bp, Homo Sapiens
  misc_feature (46)..(46): n is a, c, g, or t
  misc_feature (82)..(82): n is a, c, g, or t
  misc_feature (261)..(261): n is a, c, g, or t
aactatagtgagggtgtatgagggtgtgtttgtggggttgtactgntaggttagagcggggtgaccgatcgggggtttagtngcgtggtggtgttcggtgtattgggggtggcgtgggggtgtatgcgtgttcgtgtgagagatagttttggatgtgcgttccggagcgtgagggggtgtatgaaactgtgatggtcgtctgtgtggggcttgttcggttgagggggtgttcgcaaggtgtgttagatgagaatcgttgtnatgatgttgtttttttctgtctgtggtgtccattaggtgctccccgtgtgtgggctggttgagggttgcgagctatttgcggaattcgtttctgtttacgcttgtggttggttatgtggttataaggagcttttgccccagcgggacatggcccctgggaatctgcggggccaaggtgtgggcctgggcgggttccccttccttcccttccagggtctccggtcctgcccccttctccaagacccagagattctctccatccggtgcctccgggagcccagggtctggggagtgtctggctatggcggggcggctgctttttaggggagggaatccagcatttgggaaaccagatctgttctccttctttcccttccctcgagcccttgaggtggtgcctggatctgggagcgggatgcggggcacagggagccgcagttgcagaccccgcaggagctatctcggtgcctgcgctccctgtagctttggcttggggatggctgtcgctaccactgttcaggtcagcagcagccagccccaggcttttctccacgacccccttgccgggctctggccttgctctggccgctccacagcctggggatccccccaagagaccttgcccctgtcggagaccccaagccccgaggacgtcccggtagatccgaggatccagcctcttctttgtgcgccctccgtctgtcctggctggagtcgcagctggggctgatgaagtgggcacctgagagttcccggggcctctcttagtccccaaggtcctatgggggccttcgtaagaaatcccgggaattccggaccg

SEQ ID NO: 349171 - DNA, 233 bp, Homo Sapiens
cctctccgatccttggacacctcctctgtctgccatttattagccatgtgaacttggccacatcacttcacctccctgagcctcagtttcctcatctgtcaaatgggggtttataaacacctacctcgcagggttgttgtgaggatttaatgcgataatgtatgtaaagcgccttgcacactgcctggcacacagtaggcgctcaataaatctaagcttccctttaaaaaaaa

SEQ ID NO: 349172 - DNA, 2938 bp, Homo Sapiens
tatacggctgcgagaagacgacagaagggctattttcagatgaaatcgatattagaagctatattagctgaaacaactccttttactgcgtagaacctatatcgagagtgtgtgtatatgtattataggaggagctctcaattttatgtattctttctgcctttaattttcttgtttgtttgagcttagggatgagatacttatgcaagatatttttgaagtaaattaaacatttttcacatctctggaaatttagagttctagacctctggttaatttatatctaatatgaagaagacacctctaatctggatgttaagaatgaagttctgctacattataatgtacagaagagcaaaagggaggaacactatggttaaccctctcttgattaagggctacttaatgcacagtgcattatgtacacaggtcaaccatggtaacaatagttcttagctttgaaactccatgcaaaccatgcctttttttaaggagcaaaaatctgagaaaaaaagtgagagacctctgcctacaaaacctcaaaccagtcacttttgtcaattgctaatacccagttacttatgatttaaaaacaaccaacagaaaacatcccactgactgtatggcactctgtagtcaaaaaaggaaacttccttattgggacttttctttcttagtccagttgtgttgacacatatgaacacagacaaagtgctatgcggaggaaagcaagtgttggtcagtagtttcatgttttagggagtggttcctgtggagatcagaaagtgacatttgctttcggtactgtaatacgtgcaccaaactgcctcaatcctaggtaacgagggcaacagggagcacctgtctggattgtttttaaacctccatactcaagctgtctcttcggcagggaggtgaatactcttgaaaggccaacagcaagtgtttgtgggacacaacacagataattttttcttaagtcggccaagatgtacttctctgtgtgcacacccatgcacactcatgcacacagatacataggtctgtatggctgtatttgctgttgattcagactttcacaccattaatggggaaaagcgtggccacaaaaacagatgctaggaagcttggcttcctcttcttgttgaccctttttttgaaccaacatcttttttattatattcagagtatgtttttaagtgtatcttaatatatacattttttaggacatcttaaatctaaacaaaaaataaaatgaacatctcttgaaacctgttaaaacaaccagttaaagccacagatggctttcagggcagtagcagcagaggccagtggactctgaggactcctgaggggcggggcgtgtagcagccaggtgcatgccgggaccatggcccccatacttggctgcttcctgtgacagtgaaatacatccttcaaggtggcagctgttagggctgaatcttctggagaaaaaggtgccatctcaggagaatagcttttactctggtaggaatgcttccgagacaccacaaggcagcctgaacactcagttgcagggtcgggcttgcggtgggtgacccagagccaccaaagtcacatccacaactaatgagggaaatctgtaaagccagttagatagaagaattttatttttctgtgggttttgtgttgtcttttttatgttaaaaagaaatccagtttgtgtttttctatagaaaaagtaaaagatcaggttatactttaggttaggggttctatttattcctgttagtaaataaaattaacaaatttctttgtttaacaaaagattaatctttaaaccactaaaatacatagactgattgattattcaacacattggaattgatgtcggtcatagtttcctgaagcatttagttacaacctgaaggaataaaatgatttgtggaaatgcttaaaatagacctaactgaatacagtctcatcttgccgcgcctggcttacctatctgtggaaagataggcttcccaggctggcctctgcctgtctggtgcctggaggtgtaggagggaagatgagttatttaactggtaagcgatttgaaacactatttttatattaaagtaaatggcatggagtatagtgcaaattcatttttaagatagaacacaaaaacttgaaagaagttttatgcgtgtgacagtgtatggggctgcagttggtctccctggaggggacttccacacctcctgcctttaggccatgggtggaaagtgctcagtgaagtacacctgtgtggcccagttctgaaagctttatacagttgaattttaagtggggttgataacaccttggactgttagtgttaaaaatctagtgggttgacctttaaatgcaacagtttttaaaatatattgctgcattttatagaatagtaaaggtacgattatacttgagattttccctccatttttatttcttcgtgaacatagagtttggggccgaaaatgtttttaaagtatgtgtttgagttaaatataaagttggttcacttcaaagctaaaaaattgttaaacttgcagcttggtattgcagagaagattttataagaattttgctttagagaatgccactttggctgaactacaagtgtaggccaccattataatttataaatacagcatacttcaaaactgtttgttatctcttgttaccatgtatgtataaatggaccttttataaccttgttctctgcttgacagactcaagagaaactacccaggtattacacaagccaaaatgggagcaaggccttctctccagactatcgtaacctggtgccttaccaagttgtgcttttctgttttcaagtgtaaatgatgttgagcagaatgttgtacttgaaaatgctataagtgagatggtatgaaataaattctgacttatgaatataaaa

SEQ ID NO: 349173 - DNA, 778 bp, Homo Sapiens
ctctgcaactttgaggaactctgagattcttgtcatcctagttaggaacttcttatagatgtcaagaccttctttgcattggttctttttcatatcaaaatatttttccaacaaattaataattccttcattgtatgctgcaaacagtctaatggcatctttgaacaggagcatgaaggcagcatttattaccccatttgtaagttcattgctattaacattaaaatcaagaagtgcatccatttgattctgaataattggtacagtttttaggagtttttctgtgttcattgttctcataactccatcagcccctctcttcacttttgtgaaatcaaatgcaacttgtctgtatgaaactgctttctcatttaaatatctactataccgcctaataaatgtagacatgtcatatccttgcaatccacttttatccaaaaaattgcttaagttaaacaacgtgtttcttgaagccaaatactgaataaaacgctcatttccatacaccatcaaatgatgagttgtaatgagagatttgaagaccaccacccaactactattagtagttctttcaaataaactgtctgccaactgtgggatgttcacattcatctcatttgtgcactgaattaagtagtccaggtgctttttcttgggccccatgatctcgtgggtcgtggccttgcatactgtcttggatacggcagagccggtgacactgtgctgggcggcagtgattcggtccgtcaggctctggccggacatctctgcagctcct

SEQ ID NO: 349174 - DNA, 661 bp, Homo Sapiens
gcaatacattgaggaatattctattggtatcattggagttgaacacaaggtaggagacaagggtgctgagtgctacattctactagggtgtctgtgacgaccgctagccctacgctacgcgactaggggtggattcaaagagaaaatacattttcagaaaagaaaaaaacctaaagtttgcaacacacattattaatgacatttgagaaacaacgttgcttagggatttatccagagtgctcagaaaaagaaaaaatcgccccgcgcccccgggggccttccagcagcctggccgtcaccccgtctttcctgactagggagcccggactgggcttcgccaatcccacaccagctccaaacatcagcctcctcaggctgcagcccgacattctggagggctgttgaccctttcgagttctggaaaaatccctaaatcttatgttccaattaattaaaaatctatttgatttccatatcaggtgtccctgacagcagtcttccgtatcacttgctgccatatgaaaataatctttgaaaagttcataaagttcttcaaaaactggggccccccgtttctggaatcttcctgttgctctcttctcctttccagtttggcgtagaatgggttcttgagctgggttttttgttattgacttttttt

SEQ ID NO: 349175 - DNA, 782 bp, Homo Sapiens
  misc_feature (574)..(574): n is a, c, g, or t
  misc_feature (622)..(622): n is a, c, g, or t
gagcggggtgtgagaagggagaggtgatatccagcctcagttggacagtgctctccaagatgtcaatgataagtatctcttattggaagaaacagaaaagcaggctgtccggaaggctttgattgaagaacgtggccgattctgtaccttcatctctatgctgcggccagtgattgaagaagaaatctcaatgctaggggaaataacccaccttcagaccatctcggaagatctaaaaagcctgaccatggaccctcacaaactgccctcctcaagtgaacaggtgattctggacttgaaaggttctgattacagctggtcgtatcagacgccaccctcttcccccagcaccaccatgtccagaaagtccagtgtctgcagcagcctgaacagtgtcaacagcagtgactcccggtccagcggctcccactcgcattcccccagctcacattaccgctaccgcagctccaacctggcccagcaggctcctgtgaggctgtccagcgtgtcctcccatgactcaggattcatatcccaggatgccttccagtccaagtcaccatcccccatgccngcagaggcccccaagcaggactgggctaagcctgggccctatgaccangctctggtgaacaccctgcaggcgccgcaaagagaagcgagaaccggagcccaacgggggaggacccactaccgcagcggccaactgcagcagctgaagaggctcagagaccacggagcatgactgtatcggctgccacaggcctggtgaggagattggg

SEQ ID NO: 349176 - DNA, 1683 bp, Homo Sapiens
ggagtaacaattgatgagcaatattcagagtgaagtaaatctggaaatggtagactgtgttgggattggggggagggccatgggaggggtacatcgtcaacatagccgatcctgttacatttaagagtagcctcgtaggttgaatttcttctggtagcttcatggtaaatgcatccgaataagccatactggattgcagtgtttgtttctgtagggtgtttaaggacttgacttcctttctcccatgattcctctggactgcacacagcacccacaaccagccccatgcatgctgctgcctctgggcagtcgtagaatctcccacttcagtttctcgttgattgtactcacctttatggaatccaaatacatccaaaagggtaaggcagttttaaaaatgtgaaaacatttaaaaatgataatagcagggaattcttagattatagtaaatgccttttacttaactgtgcccagcaggctgggtgcgttaaaaagcccaagtattttgaaaaaactcgaacagatttgacaagggtagccagcttggagtctagcaacttgccaatgtgtttaccaatctgggggcttgtttttcttttcttctttcaaataaatggcagttaactggctttacagtaaacattgaagagaggaggatttgtttattgtcactgggaatctgaccactatactgtcctttttttgtattctgggtaaatgttttttggaaaagatttgtcttttctaagtggaagttaaatttgttatactgcccatcccctaaagccaacagagatttgtagatttaaagggatcacatttgaagacaatagtgtttaagaaagcaagcaagtcccttagcagtcaggtcataacagggcacatttctgaccgaaccctctcaaggcagaggaggagtttggtgggtttcatacaccctgcagattcctgttggctctaaccctcaattacctaatcttatgctttaacacataactgcattggatgtgagagtaacgtaccgtatggtcattgttctatatattaacattgaacactgctgcgattgctcaaggacattttatgttacggctttaaagcaaaggcatgattattagaaactatttaagcttttttctttgaaaaacaagctccttttacagaatataaacaacagtagtgcctgtggtttagcccaccaatcttgatgactaaaagtagctgatgcattgtgcatatgatgcttgagatggtttttgcaaaagcagaaatcgctgcaaggtaatcacaatagataaaagtggtattttaaacctttgaaataaatggatgtaactgtaccttggtacagcttttcacttgtttagtttttaaacgttagtataatctgaataaataaaatgttgccaaattcaatgtagaaagaatgtgacaacacaccttgggtagttctgcttgtgtttttgcatattgtaaaagcagtgtcacagctaaaaagaaagaaatcgtttctaacagtaaattattgtgctttagttgctagtttgtactgagagttgacctctccctgtgcagttttttgttctaaacttgtataaataacaattgtgtaatgtgtctccctcctacattgtaacaattgcttcagcctacgttataaataaagaaccactagattaaaaa

SEQ ID NO: 349177 - DNA, 2019 bp, Homo Sapiens
  misc_feature (1933)..(1933): n is a, c, g, or t
  misc_feature (1949)..(1949): n is a, c, g, or t
  misc_feature (1985)..(1985): n is a, c, g, or t
  misc_feature (1990)..(1990): n is a, c, g, or t
ggcctgggtggcgaattcggcacgaggagataccaataataatgtggcatattgggatgtattgaaggcatgtaaagttgaagatctgggcaaagtggattttgaagatgaaattaagaaaagatttaaaatggtgtatgtgccaaattggttctcagtagacttaaaaacagggatgttaactattactttggatgaaagtgattgttttgctgcctgggtttctgcaaaagatgctggtttcagcagccctgatgggtcagatccaaaattgaatttaggaggacttttactccaagcactcctggaatattggcctagaacacatgtgaatccaatggatgaagaggaaaatgaagtaaaccatgtaaatggggagcaggagaaccgagtgcagaagggaaatggatattttcaagtgcccccacatacacccgtgatctttggtgaagctggaggtcgcacactgttcaggctgctctgccgagattccgggggtgagactgagtctatgcttcttaatgaaacagtgccacaatgggtaattgacatcactgtggataaaaatatgcccaaattcaacaaaattcctttctacctccaacctcatgcatcttcaggagcaaaaaccttaaaaaaagatagactctctgctagtgacatgctccaagtccgaaaagttatggaacatgtttatgaaaaaattatcaacttggataatgagtctcaaaccactagctcttctaataatgaaaaaccaggagaacaggaaaaagaagaagatattgctgtgttggcagaggagaaaattgaacttttgtgccaggaccaggttttggaaccaaatatggacccttcgaacagtgaaacacttcatatggaagagcggtggagacctcaccctccattaccgtcagaagcccacgtgaaggctgggctaatgcccctggatattcatttacgaccttcctctatggccccaagagtagtcctaggaagcccactgatccccaacgggagcaagacttctaacggctgattggtatggaccgagattatctttcaattgaagtgactaatcgagatgtaatatagaaaccagtctccatgtgtagattaagctgtccccagggaagcagagtgcaagagcagaagagccccaagcagactatgtctttcaagatgtacagaagactgacaacaggccagtgcagactttgcttcctccttttgtttcaaaggaccttatctacccattaacacttgttagagacacctcagtcgggccacaactgtctctgtttcaactttaagcccacacactctgtagcttttctaaaacagtacattccattcatgcagtagatatgaaggctttttccaagtttgtcatataaagtaatcaaattgttttcaccgtttaagacagttatttttaatgggaatttgctgttgcacaatttgagaaccagcccatttcataataaaagattaatgttgggcttgttgttaatattgcatctcagatgtgttcttgtaggaagatctgttgaaattccaggtgctggatcatagcacttggactgttgggccggagtttgtgcagcccatgcctagcgatgctgcacctcccatgatgtcctggctttgtggcaaccccagggaggtgcagcagtttcactccttcctccactgtgtccagttttatttacacaaagcgagctgagaccacaggttcttgctctggatgagcagcatgacaccatcaaaatttaagaccatgatgaaatttcagtttcattcaaatgttacctaaaatttatggtgtcagaataaaagggagatcatagtgagttaatttgatattcatatcctggaagtatacatatttggttttccaaaggttttatatgcaaggtttttggttgtaccnggtatccagatcttcnttttcactggtctaaacaatctaacactttcatagnatcantgggatcttggtatagagggtaacttaat

SEQ ID NO: 349178 - DNA, 324 bp, Homo Sapiens
aaaaaaaacatatatactgctgtatcatgccaggatttatcagcattcccaagggagcttgcacggtactgaccgagtgctgagactactggtattcccagctgccatgtggcagcagcaggagctactagaatattctcagcacaggaatgaggcttccttggtttccatgtctgtaagggttactgatcacttaccttcttctctttcagacttgaatctgtagacatttctttattgatatggcaaattgcttgcagatatttttaaatgacagcaattttctaatatttggtttaataaaatgtgaataatgtccctttt

SEQ ID NO: 349179 - DNA, 1146 bp, Homo Sapiens
  misc_feature (46)..(84): n is a, c, g, or t
  misc_feature (443)..(443): n is a, c, g, or t
gtcacatgataaaagtttctgtgtagctgaaggttgtagaaggctnnnnnnnnnnnnnnnnnnnnnnnnnnnnnnnnnnnnnnnttttaaagagtcctaatgtgtatgtactctttatgtctttcttgctcttacaaagaggtgtcagaaaaatagaaagctcttggtgtcggtttgggaggaaaagacagtgacatttggtaaaaagttatccacacaataatctccattcgggaaatgctcagtatcgtctccagccagccctgcttatccagggttacactgggattcctggggatcgtaaccagtaaatgagagggagagggagagagagtgtcctaagtccaatctgttatccttgatctgattcaggcatccatagtgtgtgagttaacttcacctgccacctcgtaaaaaatttcagaggtgtgatcccgctttantgggacctggtaacaatcacaaagccagtggctgtttgagaaggacctcagacattttcagcagagttgttttagcaggaaacgtgccactgaatggcccctaaatgtgtcgacagtgtgataagagactcaactaattctttaggcaacatggcagatgtgactcagatcctccaagaccaaagcggaaaggtcagggggctgggactcttctcttccatagaagcctgtttcctgttaggaggcataatggaagatgaccccacaaaggcagaggcatctttcggaacaacactggtggcagctttcagaacaaggaacccctggtgggaggacgcccaagctacagcgttgggatctgggatctgttccactgccggcagatttcaaggggaacttgctgaaaggcagccagtggtgaagatttctcccctcccaggatggactacatgccggcatgtttcttataaagctgtggcttgcttgtttcagaggaagggagtttgcagtcgcgggacgtggtagagcaaggcattcttgggttttcaagttgcttcttgcaagaagccacatatgcatgccataagggttaagttggtggatctttaagagccaagtgtggttgagatcttggatttgcgtttacttcttgatgaatacatatccttcaaaccctctgcctggcgctacttctgtgtgcttc

SEQ ID NO: 349180 - DNA, 1973 bp, Homo Sapiens
  misc_feature (595)..(595): n is a, c, g, or t
  misc_feature (866)..(866): n is a, c, g, or t
tatatggtaacgtctcccaaactcctctcctggatcaaaaatgaatcacttctgaagtccctgcagccctttgccaagtggcattacattgagcgtgaccttgcaatgttcaacattaacattgatgatgactacgtcccgtgtctccaggggatcacacgagctagcttctgcaatgtttatctagaatggattcaacactgtgcacggaaaagacaagagccttcaacgaccctggacagtgacgaggactctcccttggtgactctgtccttcgccctgtgcaccctggggaggagagctctgggaacagccgctcacaatatggccatcagcctggattctttcctgtatggcctccatgtcctcttcaaaggtgacttcagaataacagcacgtgacgagtgggtatttgctgacatggacctactgcataaagttgtagctccagctatcaggatgtccctgaaacttcaccaggaccagttcacttgccctgacgagtatgaagacccagcagtcctctacgaggccatccagtccttcgagaagaaggtggtcatctgccacgagggcgacccggcctggcggggcnaggtggctgttccaacaaggaagagctgctcaccctgcggcacgtggtggacgagggtgccgacgagtacaaggtcatcatgctccacagaagcttcctgagcttcaaggtgatcaaggttaacaaagaatgcgtccgaggactttgggccgggcagcagcaggagcttatatttcttcgcaaccgcaatccggagcgcggcagtattccagaacaataagcaggtcctgcggaacttgattaactcctcctgcgatcagcccctggggtnaccccatgtatgtctccccactaaccacatcctacctagggacacacaggcagctgaagaacatctggggtggacccattcactttggacagaattaggacctggttctggaccaagtgggtaaggatgcggaagaaattgcaatgcccgccagcacagtggcggcaacattgaagacgtggacggaggaggggccccgacgacaggtggcaacaatgccccgagtggtggcagccaggagagcagcgcagaacagcccagaaaaggcggtgctcagcacgggggtgtcatcctgtgaagggacacagagaacaggcaggaggaaaggcaggagccagtccgtgcaggcacactcagcgctaagccaaaggccgcccatgctgagctcatctggccccatcttagagagccgccaaacattcctccagacgtccacctcagtgcacgagctggcccagaggctctcgggcagccggctctccttgcacgcctcggccacgtccctgcactctcagcccccgcccgtcaccaccaccggccacctgagtgtccgtgagcgggccgaggcgctcatcaggtccagcctgggctcctccaccagctccaccctgagcttcctcttcggcaagaggagcttttccagcgcgctcgtcatttccggactctctgctgcggaggggggcaataccagtgacacccagtcatccagcagcgtcaacatcgtgatgggcccctcagccagggctgccagccaggccactcggcacctctccgagccatgtgagccccctgatgccaccgagcaggggcagcttcatgaccgatgtctggctgaggctgtggcggacactctcggggttgtctgcaggagagcaagccaggaggacatgggcctggacgacacggcctcgcagcaaagtgtgtcagacgagcagtgacgggcgtgcggccgggcggggaggctggctcccccacacctcccacctgcattgctctccctcgtgctccccaaatcaccacaaccaaccaataccgcgatccatgagggactcctcctgtggaaaaggagagctgttccagaacacagaactgatctcaggtttttgg

SEQ ID NO: 349181 - DNA, 515 bp, Homo Sapiens
acatcaatcggcacctttatactatgtactggtaccatggaaaaagaaaggagacagcttcacgtctgataccatcagctgggcagatgcattaaggttaaatctaagtgtcaagaaaaccctatttctttataatatttatgcagctgttaagcgtaacatggtggcagcttcacaacaagaaccgtgatcatgcatgcagtcatgtctccagtattctgtgaaaagccaggatacgttaggatgtgagtttagaaactgagtccattcggtgcatggaaatccaccgcggagtcacacaatgctcctcactgtagtccaagcgattggtgggccgccagcaccctgcgggcttcacagggacgcgtgctcgttctccaagccccgcaacccttactgtgcacacaacatcgcacacacctttgtttttgaaattaaaatgtttatagttattgctgcgtccagtgttttgagttatactgaagcttctcatttctacaagtatatcttttatg

SEQ ID NO: 349182 - DNA, 662 bp, Homo Sapiens
ttgttattggcttcatcaacccaggaatgtggggtggcatgggctaactacactacgttgtttgcatggctacaactcctgtcaacctgagatacatgaagaacttaacaagctttcctcgtatccctaacttcttggtctttcctacaaaatcctctgctagtctgacagtctgctacctgcaccaaacagaatctagttcaggctagcagaactgctggtcctccttatttacttgttcatgagagcacttctggaactgacaagattctaaatcaagtgagtttcccctggtaccagcgctaagactattggtttcatagcctgtctcatccaggttgaactgtctagcagtagagctacaggtgaggcataggaatggtcttcatcaagaaaactataaaattgccctatatctgcccatgcttcagtgattctcatgaataacacttctctcttcatttgcatgcatatctttggttaatttccagaatgctaaaataattgttttgacactttcattcacctttatagttgctttttgaggagattgttcaacttttcatcctgttggatggaaatgctacatactgttaacaaattaaagtctaattaaaccgattaaaatctaattaaacttaaagtctaatgaactaaccgct

SEQ ID NO: 349183 - DNA, 698 bp, Homo Sapiens
  misc_feature (629)..(629): n is a, c, g, or t
  misc_feature (642)..(642): n is a, c, g, or t
ttgctgtctggtgctcctctctcagtggccatcatgtctttgacatctgcttaccagcataaattagcagagaagctcactatcctgaatgatcgcggtcagggggttctcatccgtatgtataacatcaagaagacttgttcagaccccaaatctaagccacctttcttactggaaaagtccatggaaccatctctcaagtatatcaacaagaaatttcccaacatagatgtccgaaacagcacgcaacatttaggaccagtacatcgtgaaaaagccgagataattagattcctcaccaactactaccagtcatttgtggatgtcatggaatttcgggatcatgtatatgaacttctcaacaccattgatgcctgccagtgccattttgatatcaatctcaactttgatttcactcggagttacctggacttgattgtaacttacacctcagtcattttacttctgtcacggattgaagatcggcgggatactcattggcatgtacaattgtgcccatgaaatgctgcatgggcatggtgaccccagttttgcccgtctgggtcagatggtcttgggaatatgaacacctctgaaagaaactgacagaaaaatttggggctcacacnaaggctgtgaatngaaccctcctctctttgcatttcctcctttgtccgaaaaaaaccaaggggggtgaa

SEQ ID NO: 349184 - DNA, 506 bp, Homo Sapiens
  misc_feature (16)..(16): n is a, c, g, or t
  misc_feature (30)..(30): n is a, c, g, or t
  misc_feature (39)..(39): n is a, c, g, or t
  misc_feature (50)..(50): n is a, c, g, or t
  misc_feature (102)..(102): n is a, c, g, or t
atgcaaaagaaccttnaggcccacccctangaccccctnaaaaaataagnggaaaattttaaccaattatgccccataagagggccccatgacaatttaggnagtcattgggatcacccccccaaagccaaatgtaaatttccttgggatttcctcctggacatgcaaagaacttcaggccatcctatgatccctcacaaataagaggaagattttaacaattatgctctaagatggaacatgacaatttaggagtcactgggatcaccccccccacctttccaacgttactctgctttaactacaaatatgtcgaatggttttctaatttttctttaacttaacctctaaagttcgagagctgtcatctttgtcaagtctgattgttgagtatgtgaatggatgtttttggctcaatgttagagccaaaatttataaataataattatttatacataatgatattgcaaataaactttaagaaagagctttaaacataaaaaaaa

SEQ ID NO: 349185 - DNA, 1435 bp, Homo Sapiens
gcctgtttaaagctttccatgggctctgcccaaggccgttggctgcagcgttcaccatctgagtgccagttgctggactagttgaggtgaagtgcattgtttcctctctgagcagctgtgcgtggagctgagtgatgtgccctgggacaggcttcactggagctggtggaagtataaccagaggcacaaggaaattgagccaaaagggtgtcattggacacttttcatttgcccctgtgatactaacaacactttcacccaaatggcttaatgtaatattggaaatagatcttaaactgccaaatctcacactattgcataatccatatgctctttagatctagtcagtgtctctgggttttggtagcagatacagcgttccctttacaggaatacccaaggtgttctttcagcttccagacaggtcctttgatttcctttataaagggaaaattctggcaaatcgtgcctttactattagaaattgttcccagttgatgtcttttggggagctggtggcatgaaatgcaaatgacctatacattaaagtgatgtctcagtgaataccatacatgcagtagaacattcagaagagaggagcagcaatcctgaggggctgggggagtgacagtggcaggacggatgggcgggtttgacagattgtggtgggaagaagaatgatcatgtttaaagctaacatcagccagtgttttggggctagccacacatcattccagagaccaaaaccttactcatgaactagacctttatcgatatcagtgaacccccatgtttaaaatattagaatgtttagagataaaatagagataatagagataaaagaagaggagggcttctatcaatgctgtaaacagtctgataagcgactgtggttattcccctaaagtttacttcagcactaacactagtgcttccgctggagtttgcagttttccagctttatacaggattttcctttgactggaagagtcaaggatatagagactcaacagtgacatttattgtcaacatcaaggggaataggatactcatcaaactgggattattcttatcaaaacatggtcttctttgaataagaaaaatacatagttggttattatggacttaaaactgtgttaaatggatattctgataaaatatttgctgctctgtagagtgtggaaaatctgagaatattagctttactcatcttgagctttgaggatgttctctgtacgccgatggtttcatattaactaaaaaagctgggtattgtaaaatctcatttataaaaactcagatgagaagaaaattttctttgatggtgagactgttgtcttagttcaggaaattatttaataatcctttgttacctgtgaatgaaggaactttgtaattctgatttatcgtaaaacatgagcctttccagagtcag

SEQ ID NO: 349186 - DNA, 973 bp, Homo Sapiens
  misc_feature (44)..(80): n is a, c, g, or t
ggatgataatcactataggcactggagctcaccgggggcggcgnnnnnnnnnnnnnnnnnnnnnnnnnnnnnnnnnnnnnatcaggccaaatcggccgagctcgaattcgtcgagagcgggttttcctggccgaggtgggtcggtagtagcgatggcgggtctgactgacttgcagcggctacaggcccgagtggaagagctggagcgctgggtgtacgggccgggcggggcgcgcggctcacggaaggtggctgacggcctggtcaaggtgcaggtggctttggggaacatttccagcaagagggagagggtgaagattctctacaaaaagattgaagatctgatcaagtacctggatcctgagtacatcgaccgcattgccatacctgatgcctctaagctgcaattcatcctagcagaggagcagtttatcctttcccaggttgcactcctggagcaggtgaatgccttggtgcccatgctggacagtgctcacatcaaagccgttcctgagcatgctgcccgcctgcagcgcttggcccagatccacattcagcagcaggaccagtgtgtggaaatcactgaggagtccaaggctctcctggaggaatacaacaagactacaatgcttctctccaagcaattcgtgcagtgggatgagctactttgccagctagaggccgccacgcaagtgaagccagcagaggagtgatagctgctccccatcccaaagtgggcctgggcagtcaggctccagggccctatgccaacctgcctttgttacaaggcagaggaagctttgtatttattggcttcaaggcccacctctctgtactctgggctctaaagttggaggtcaggttacctgaggtttgcaatttgcaacacccaccctccccccaatcagtgttcttatttcagtgacaataaaccatagagatgactggaaaaaatctctggactctgggctct

SEQ ID NO: 349187 - DNA, 915 bp, Homo Sapiens
  misc_feature (95)..(95): n is a, c, g, or t
  misc_feature (127)..(127): n is a, c, g, or t
  misc_feature (835)..(871): n is a, c, g, or t
caacacctaagggttatgtcacggaatagacactgattgggggaggtggtgttgcaaatgcaaacctcaggtaacctgacctgcaacttagagcncagagtacagagaggtgggccttgaaccatanatacaaacttcctctgccttgtaacaaaggcaggttggcatagggccctgggagcctgactgcccaggcccactttgggatggggagcagctatcactcctctgctggcttcacttgcgtggcggcctctagctggcaaagtagctcatcccactgcacgaattgcttggagagaagcattgtagtcttgttgtattcctccaggagagccttggactcctcagtgatttccacacactggtcctgctgctgaatgtggatctgggccaagcgctgcaggcgggcagcatgctcaggaacggctttgatgtgagcactgtccagcatgggcaccaaggcattcacctgctccaggagtgcaacctgggaaaggataaactgctcctctgctaggatgaattgcagcttagaggcatcaggtatggcaatgcggtcgatgtactcaggatccaggtacttgatcagatcttcaatctttttgtagagaatcttcaccctctccctcttgctggaaatgttccccaaagccacctgcaccttgaccaggccgtcagccaccttccgtgagccgcgcgccccgcccggcccgtacacccagcgctccagctcttccactcgggcctgtagccgctgcaagtcagtcagacccgccatcgctactaacgacccgctctcgacgaattcgagctcggccgatttggcctgatnnnnnnnnnnnnnnnnnnnnnnnnnnnnnnnnnnnnncgccgccccgcgtgagctccgttcgcctatagtgattatcatca

SEQ ID NO: 349188 - DNA, 1452 bp, Homo Sapiens
gggaaattgcaggatttggtgaataggaccccatggaagaaatgttgtttctctggggatggggaatacatcgtggcaggttctgcccggcagcatgccctgtacatctgggagaagagtattggcaacctggtgaagattctccatgggacgagaggagaactcctcttggatgtagcttggcatcctgttcgacccatcatagcatccatttccagtggagtggtatctatctgggcacagaatcaagtagaaaactggagtgcatttgcaccagacttcaaagaattggatgaaaatgtagaatacgaagaaagggaatcagaggtttgatattgaagatgaagataagagtgagcctgagcagacaggggctgatgctgcagaagatgaggaagtggatgtcacccagcgtggaccctattgctgccttctgtagcagtgatgaagagctggaagattcaaaggctctattgtatttacccattgcccctgaggtagaagacccagaagaaaatccttacggccccccaccggatgcagtccaaacctccttgatggatgaaggggctagttcagagaagaagaggcagtcctcagcagatgggtcccagccacctaagaagaaacccaaaacaaccaatatagaacttcaaggagtaccaaatgatgaagtccatccactactgggtgtgaagggggatggcaaatccaagaagaagcaagcaggccggcctaaaggatcaaaaggtaaagagaaagattctccatttaaaccgaaactctacaaaggggacagaggtttacctctggaaggatcagcgaagggtaacagtgcaggcggaactcagccagcccttgacagcaggaggagcaatctcagaactgttatgaagaccttcgaagttcttcattctttctcactttgccatcatgtggcctctggacactgtggtcagtcatttgaaaattgactttaatttaaaacaaaggcctgtgcctcccacccaggaggtgggagggtgaattttatgtttaaatgaagaagtgaattatggaagaagagtatacgaccttcccttccctttcaagcataagtccaaatagactctcaggaatgaagatttgtgaagacatcagataggaattttgactcatttaaactttgatgcttagttatgttgctggagaaaagatacttatgttttgctcatctaacttcattgtaccccagcgtcattttgacatgtcatttcctatctcccatttgccttcggtcctcaatgcatgtctttgagtgacttcttatctgaaattttgctactgggatcctaggaaagcttttgttggatactctcattttaaacttctcctctccccagatacctcctatatttccatattgtgtgcaaaggaaggggcaaaaagaaagtgccttgaagaatttcaatc

SEQ ID NO: 349189 - DNA, 1290 bp, Homo Sapiens
  misc_feature (36)..(36): n is a, c, g, or t
  misc_feature (136)..(144): n is a, c, g, or t
  misc_feature (1057)..(1057): n is a, c, g, or t
tgaagaaaggcttactgaagccccctttttccacancctggttttccctaaatggggatttttcagagaaatttcaaacaccaaaatgtacacatctatccaatctgtttatttttataaagaacaacaaatgtcnnnnnnnnngctaagcaacctttcacagaaaggaagtgactgaaaacacagtaagaaaaaggagcacaggtataggcagggaaaaatgcaatgactgatgaggatagatttccacaggcagtgatacaaaaaattcaccttgatctttgatttgaactatgtggttgctgctttgattctggatggttttactttactccttgcatagattcccccaccccagtaaaaaagtagcttgttgagagacacctgggtttgtttccatctctggaagccagcacaggtaaagcaatataaactattgatgattctttgctggagatggataaaactagctatcttcaaaaaccatgattgatgacaatgaaccaatattggagggaaacatgcaatgagaggaaaacaagggaaaaccctgaattgttacagcccagcttcttgagcaaaacgtggtatgagaggaagagagggccttcgttgttccctttctgaaaatttgaaatctttcaagcactttcttttctgcccatcctttgcacacaatatggaaatataggaggtatctggggagaggagaagtttaaaatgagagtatccaacaaaagctttcctaggataccagtagcaaaatttcagataagaagtcactcaaagacatgcattgaggaccgaaggcaaatgggagataggaaatgacatgtcaaaatgacgctgggtacaatgaagttagatgagcaaaacataagtatcttttctccagcaacataactaagcatcaaagtttaaatgagtcaaaattcctatctgatgtcttcacaaatcttcattcctgagagtctatttggacttatgcttgaaagggaagggaaggtcgtatactcttcttccataattcacttcttcatttaaacataaaattcanccctccacctcctgggtgggaggcacaggcctttgttttaaattaaagtcaattttcaaatgactgaccacagtgtccagaggccacatgatggcaaagtgagaaagaatgaagaacttcgaaggtcttcataacagttctgagattgctcctcctgcttttgatcctttaggccggcctgcttgcttcttcttggatttgccatcccccttcacacccagtagtggatggac

SEQ ID NO: 349190 - DNA, 367 bp, Homo Sapiens
  misc_feature (159)..(187): n is a, c, g, or t
ccaaaggaagacccaagggtcccaggaggtgggcgcccctcccatccttcgaaaaagcttccccaggctcctctgccttctctgtctcatgctccccaggttgcacagcaggcagggagggaggcaaggcaggggagtggggcctgagctgagcactgnnnnnnnnnnnnnnnnnnnnnnnnnnnnntttcatcggtggggacgtggagagggtggggcgggctggggttggagggtcccacccaccaccctgctgtgcttgggaacccccactccccactccccacatcccaacatcctggtgtctgtccccagtggggttggcgtgcatgtgtacatatgtatttgtgacttttctttggaaaaa

SEQ ID NO: 349191 - DNA, 1989 bp, Homo Sapiens
gggcatttaacttgcaccaagcaagaaaatataaatacagttaactgcattaagataatcacgttaaaattgttactatgcagcacagaacttcattcttatagtattcttgggttcaacctttgaatcaattttaccactgattaaataaatgactcaaagacatctgtaagtcatgctgctgtgttttgaaagtctttaactaaattaagattgcagaatgatagtgattattcaattagattttaagtaaggattgtgatattagaggctggaaatccttattttttaaaaaatcagataggcataaatagttaaatcactttcattctccccaaacctgtagttacagaaaaagttttatgctagaggtgggatgccaagttttcactatccatgaagcagcgctgcatgtcactaggtaacacagatccatccagatggtgtttacatttgatttatttgggatcttattgacatcaggtatacttggaagacatttcttttattcttcagcgtatgaatttaaagctattttttgtaaatatttctaatcagcgataatttctacctatgttctcaaccaacttagccagtttgtttttcagagcctgtagtcttattggaaatctattttatcagtgtgctttattgagtgtggattttgcatacattcaaaacattaaccacaaaatacagcaagtgcacctatattcaccattaacttatatcccaagtccattttttcctgtacactacaaacaaaagatatattagagacttttgaaaaatgctgaaatactttgcttcagaattggaatgtttatattatgtagaaatcttcaaaggtagcattattaaatagcaaagaataattagaacccacatatctttttttgtgtggatggggaaaatgttttaaaatccagttatttaatatgagtttgagagagaaaattgttttttaaaaatatatgtgcattgaaatgatggcaatgcttatagtatgatcaagtatgaaaggaactttaaattcttatatttacttttctctcagtaaattgttaaattttcactcagcaaaagattggcatttgttaagtgttctatatttagtactaaaatcacagtcatgaaatcatagtcataaaatggtcttcacacagcagtcatccgtgtcatttatcattttgtaatattaaattatggcaattttatttcaaactaaagtttgaacaccggaaagtcattactcagtgatttgtaatttgggacttggattatttatctagagatgtttgtatattttgtcagtaactaatactgcgctgccatcatggtgactgtcatggttctacagaaatgccctccatgtgtccctctaatgttgcatgtttcagtgggttggaagttttgtatatttattgtattaacacagagtgtcataaaataaaatgctgtttactggatgtttgtttgtataattttgaacactataatagcaattcagagacagacattgttaaaggtttgatgtatatagaaatcccatgtttgattttttaaaatatgtgtataagtctgtcatgtgcttaaacaaaataatatgaaagacctagttaaaaattctaaccaatgtaaaatgaccatttttctgttgcattagacctttacaggtaatggaacatgagcttcacccatattaaatattttggcccctttaaggtcaaaatacagatcatctagaagttagattcaaaatggaaaacctattcatggctcagatttttcattgtgggttaaaaatgggtgtctctgtactagtattgtatttattcaattgaacttgacttgtgatctgatttctaacctttgctaacctatggctgttttatggtactgatgaaagtaccctatttgtggtaaaattggattttttcacttgggttagcttaaagaagaatggtaaaaattatcctaaaattaagg

SEQ ID NO: 349192 - DNA, 2112 bp, Homo Sapiens
ggcagtatccgcgtattggtagcgaggctgggtggcgaattcggcacgagggcgggctctccccgctagtggacaacctggaccccaacttccagagcgaccagcagagcaagcgcacgcccctgcatgcagccgcccagaagggctccgtggagatctgccatgtgctgctgcaggtcagcacgggcccggccccatgcctcattcaccaggcccttaggccccgtcccctgcccagtgccgtccctggtgccagccctcctgccccctcacaggctggagccaacataaatgcagtggacaaacagcagcggacgccactgatggaggccgtggtgaacaaccacctggaggtagcccgttacatggtgcagcgtggtggctgtgtctatagcaaggaggaggacggttccacctgcctccaccacgcagccaaaatcgggaacttggagatggtcagcctgctgctgagcacaggacaggtggacgtcaacgcccaggacagtggggggtggacgcccatcatctgggctgcagagcacaagcacatcgaggtgatccgcatgctactgacgcggggcgccgacgtcaccctcactgacaacgaggagaacatctgcctgcactgggcctccttcacgggcagcgccgccatcgccgaagtccttctgaatgcgcgctgtgacctccatgctgtcaactaccatggggacacccccctgcacatcgcagctcgggagagctaccatgactgcgtgctgttattcctgtcacgtggggccaaccctgagctgcggaacaaagagggggacacagcatgggacctgactcccgagcgctccgacgtgtggtttgcgcttcaactcaaccgcaagctccgacttggggtgggaaatcgggccatccgcacagagaagatcatctgccgggacgtggctcggggctatgagaacgtgcccattccctgtgtcaacggtgtggatggggagccctgccctgaggattacaagtacatctcagagaactgcgagacgtccaccatgaacatcgatcgcaacatcacccacctgcagcactgcacgtgtgtggacgactgctctagctccaactgcctgtgcggccagctcagcatccggtgctggtatgacaaggatgggcgattgctccaggaatttaacaagattgagcctccgctgattttcgagtgtaaccaggcgtgctcatgctggagaaactgcaagaaccgggtcgtacagagtggcatcaaggtgcggctacagctctaccgaacagccaagatgggctggggggtccgcgccctgcagaccatcccacaggggaccttcatctgcgagtatgtcggggagctgatctctgatgctgaggctgatgtgagagaggatgattcttacctcttcgacttagacaacaaggatggagaggtgtactgcatagatgcccgttactatggcaacatcagccgcttcatcaaccacctgtgtgaccccaacatcattcccgtccgggtcttcatgctgcaccaagacctgcgatttccacgcatcgccttcttcagttcccgagacatccggactggggaggagctagggtttgactatggcgaccgcttctgggacatcaaaagcaaatatttcacctgccaatgtggctctgagaagtgcaagcactcagccgaagccattgccctggagcagagccgtctggcccgcctggacccacaccctgagctgctgcccgagctcggctccctgccccctgtcaacacatgagaacggaccacaccctctctccccagcatggatggccacagctcagccgcctcctctgccaccagctgctcgcagcccatgcctgggggtgctgccatcttctctccccaccaccctttcacacattcctgaccagagatcccagccaggccctggaggtctgacagcccctccctcccagagctggttcctccctgggagggcaacttcagggctggccaccccccgtgttccccatcctcagttgaagtttgatgaattgaagtcgggcctctatgccaactggttccttttgttctcaataaatgttgggtttggtaat

SEQ ID NO: 349193 - DNA, 408 bp, Homo Sapiens
cctgagtcactcactgaagccccacgagcttctgccagggacggctggtcccctcctcgttcccgtgtgtctttgcacaaggaagtatccttcggagtcagaagaggaacagattgagatttgttccacacgtggctgccccaatccaccctcgagtcctgctcatcttcccacccaggctgccatctgtcctgcctcagccaaagttctgtcattaaaatacagcactccgagagagtcggtggccagtccccgtgagaaggccgcctgcttgccaggctcatacacttcaggcccagactcttcccagccatcatcactcttggagatgagctctcaggagcatgaaactcatgcggacataagcacttcacagaaccacaggccctcgtgtgcagaagaaaccac

SEQ ID NO: 349194 - DNA, 261 bp, Homo Sapiens
gttaagggaccaagaatcaagtacaaaaaattaaaaaggaactgtaaaatcccttggtcattcataaataaatatctaaattaggaatactaattaattgaattttcactcatgagtatgttctgaatatttaatatttatttctattattttcatatgttaagatattccattaaatctaacttaaaagaattgtatgtataaattggcattaggatacaaatgtaaatgtttttaatgaaattttgcaactttttaata

SEQ ID NO: 349195 - DNA, 890 bp, Homo Sapiens
agcggatgcgccggggcggggccgagagtttggagccccggagtggggtgtcggcgcctcattcgggtggagctgagccggagacaggcagttgtgaaaaacttcaggacaaaaatgtttcatttaaggacttgtgctgctaagttgaggccattgacggcttcccagactgttaagacattttcacaaaacagaccagcagcagctaggacatttcaacagattcggtgctattctgcacctgttgctgctgagccctttctcagtgggactagttcgaactatgtggaggagatgtactgtgcttggctggaaaaccccaaaagtgtacataagtcatgggacattattatacgcaatcacgaatgccggagccccaccgggcactgcctaccagagtccccttcccctgagccgaggctccctggctgctgtggccaatgcatcagtccctggtagaaagcacagcccaacgtggacaagctcgtggaggacaacctggcagtgcagatcgctcatcagggcatatcagataccgagggcccatgtagccacagtggacccctggggaatctggatgccgatctggactcctccggtgcccgttgtacattcatcgtcattccaccagacagaaccatgggttctatggcctggatgacatctgagcctcgcaaagggtctacctacatttgccctcaagcaagaatcaccggcgaggcagccggaaatcagcaggacgtcacctccagcccgcgcgacacccccagccagagccggacggaagggggtcatgggcagccacaattgagggagtgggaccagaggagcaccacacagccggcacgacaagcaggagacgagccccggcacaggtgagcaggccacag

SEQ ID NO: 349196 - DNA, 1141 bp, Homo Sapiens
  misc_feature (901)..(901): n is a, c, g, or t
  misc_feature (958)..(958): n is a, c, g, or t
  misc_feature (977)..(977): n is a, c, g, or t
  misc_feature (1000)..(1001): n is a, c, g, or t
  misc_feature (1019)..(1019): n is a, c, g, or t
  misc_feature (1043)..(1043): n is a, c, g, or t
  misc_feature (1059)..(1059): n is a, c, g, or t
  misc_feature (1089)..(1089): n is a, c, g, or t
  misc_feature (1106)..(1106): n is a, c, g, or t
  misc_feature (1115)..(1115): n is a, c, g, or t
  misc_feature (1131)..(1131): n is a, c, g, or t
ggcctgggtggcgaattcggcacgagggctgagccggagacaggcaaccgtgcgctgtcgccgcgcccgtcccagtgccgggtgtcgcggcgcttggcggcccggggttggagatcgcggcagttgtgaaaaacttcaggacaaaaatgtttcatttaaggacttgtgctgctaagttgaggccattgacggcttcccagactgttaagacattttcacaaaacagaccagcagcagctaggacatttcaacagattcggtgctattctgcacctgttgctgctgagccctttctcagtgggactagttcgaactatgtggaggagatgtactgtgcttggctggaaaaccccaaaagtgtacataagtcatgggacattttttttcgcaacacgaatgccggagccccaccgggcactgcctaccagagtccccttcccctgagccgaggctccctggctgctgtggcccatgcacagtccctggtagaagcacagcccaacgtggacaagctcgtggaggaccacctggcagtgcagtcgctcatcagggcatatcagatacgagggcaccatgtagcacagctggaccccctggggattttggatgctgatctggactcctccgtgcccgctgacattatctcatccacagacaaacttgggttctatggcctggatgagtctgacctcgacaaggtcttccacttgcccaccaccactttcatcgggggacaggaatcagcacttcctctgcgggagatcatccgtcggctggagatggcctactgccagcatattgcggtggagttcatgttcatcaatgacctggagcagtgccagtggatccggcagaagtttgagacccctgggatcatgcagttcacaaaatgagagaaacngaccctgctggccaggctttgtgcgtcccacagggtttgaggagttcttacagccgnaagtggtcctctgagaagncgctttggtctaaaaaggctgcnnagtactgatccctgcccntcagacatcattgacaagtcttantgagaaatggcgtggnaactacctgatcatggggcatgccacaccnaagggcgggctgaacgntgcttggcnaatggtccattcaggnaaaggaacct

SEQ ID NO: 349197 - DNA, 743 bp, Homo Sapiens
cggttcccccgaactgcccgaattcggcacgagggccctcgggcgccgggacgccgtccggagactcctgtggcgtgggtctgaggcgcggtggtccggtgcggtccctgggctggtggagagcgggagggcccgggcgtccacaatcccgagctgacctcgcccttggtcgtccagggttggagcccaggtgagatggagaacttaaggcatacagaacgatggagtatatggcagaatccaccgaccgcagccctggacacatcttgtgctgtgagtgtggtgttccgataagtccaaatcctgccaatatttgtgtggcctgtttgcgaagtaaagtggacatcagccaaggtattccgaaacaagtctcgatttcgttctgcaaacaatgtcaaaggtattttcaaccaccaggaacttggatacagtgtgctttagaatccagggaacttcttgctttgtgcttgaaaaaaatcaaagcccctctgagtaaggtacggcttggagatgcaggctttgtttggactgagcctcattctaagagacttaaagttaaactgactattcagaaagaggtgatgaatggtgctatccttcaacaagtgtttgtggtggattatgttgttcagtcccaaatgtgtggagattgccatagagtagaagctaaggatttctggaaggctgtgattcatgtgaggcaaaagactttgcatctttctactatctggaacaggttcctt

SEQ ID NO: 349198 - DNA, 770 bp, Homo Sapiens
agcgggagtatttcgctagcgagatcttctctgtggcggagacagccagaacttaaggcatacagaacgatggagtatatggcagaatccaccgaccgcagccctggacacatcttgtgctgtgagtgtggtgttccgataagtccaaatcctgccaatatttgtgtggcctgtttgcgaagtaaagtggacatcagccaaggtattccgaaacaagtctcgatttcgttctgcaaacaatgtcaaaggtattttcaaccaccaggaacttggatacagtgtgctttagaatccagggaacttcttgctttgtgcttgaaaaaaatcaaagcccctctgagtaaggtacggcttgtagatgcaggctttgtttggactgagcctcattctaagagacttaaagttaaactgactattcagaaagaggtgatgaatggtgctatccttcaacaagtgtttgtggtggattatgttgtgcagtcccaaatgtgtggagatggccatgagagtgagaagctgaaggatttctggaaaggctgtgattcaagtgaggcaaaagactttgcataaaaaaactttctactatctggaacagttaattctgaaatatggaatgcatcagaatacacttcgtatcaaagagattcctgatggtctggattttcattattcctcaagacaacatgctcagaaagatggtcgaattccttcagtgtacaggttccctgtagatacaaagcatcacaaaagactgatctctcaagaatatc

SEQ ID NO: 349199 - DNA, 685 bp, Homo Sapiens
  misc_feature (257)..(270): n is a, c, g, or t
gagggaaggatggtcctgaagatcacagttcggtgctgaaaaaagcatttctattaaacttcaagacagaatgaatgaccatagctaataatgtaccttaagcttttctagaatctttgtataaaaaaagttgattgttactaaatgtatttaaatctcataaaattttaggaatttaaatgaagaatttccaccaagggtaagaaaaattatatattatatttataaatttgtcattatgattctcccattgtggnnnnnnnnnnnnnntctcggtaccccaattcacaaagccaaaaggaagaaagtaagctgaacgctgagtcatggcaagaaactgctcgcttttgttccctaagctaatagcctacagataaaaggtcagatatctccataggtaggtactctatgttcaccttatgtaaagtgccaatttattgagcgtaagaggattacctaattgactattccccagcctgctccttttctcttgcaacacatggagtcagcaacgggaccatatcctctctctttcccctccagcctgctttccccctttaaatactgaagccctcaaaatcatctttctaaaaaggtatgaaccatagattgttcctgtggatttgtgtttctttcttccgggcatatccttaagcttggcaaaataaaatttctgaattgattg

SEQ ID NO: 349200 - DNA, 849 bp, Homo Sapiens
atgagaagttagcagttgcgtaaagaaggactggggcagatgaggattcaggaagcttgaggtttaggaaggaagatattgagagggaaaggtggaaatgaaggagagtgaagtgatggaatgatcctagtaaagggataatgggagtggaggaagagaagagggggtggaaaactagatacatggctaccaaattaaggaggcacgcgcattccagaggaatcggcattcttcctcactttttatttttctagaaagcacccctgaagccaaatttccattggaagaaaagatgtacccatattgtatgttgtgagaaggggtggtctcagcttgggcaagtagggagactgatacgaaggaagtaggaaagaaaaggtacagaggtaaagagcatggaaaaggaaagggtcagggataaggccaaagagatctcttctctttaaaggccagagaaggcacggtggaggggggagctggactggtgggagatagtgagggacaaagggcaaagggaaaccagaccacaggacaggagagtgagcatggcaatgacgatggagtcctgcagacgaacccagacgagaggcgaacatccaaggctcgcccactacaggtggacaagaactggacttcagtgagccaagagggacatggatgcccgcctggtgcgcgcccccacccagccccagaccgcgcacacccgcgcagcccacccaaagagcggaactgcagagcaccccagcgccacaggacaccacaacaagaacgagaaacaaacacacagcgcaggccatcctccacacggacctgaggccacacacacacgggagggaggccggcagcgga

SEQ ID NO: 349201 - DNA, 1066 bp, Homo Sapiens
  misc_feature (924)..(933): n is a, c, g, or t
gtaggggccgtcacgtgatgtttgggtgcccgccccgcccgcctcgcccgccgtgagcgcccggagcggtccgcgagccaccgaggcccagctcagtgtggaggctgctggccctgccagctgtaagaagatgtcatgacggatccatcggcccgtggaggtggcctggggagccgtggccctttcggggggaccttcgagacaaggctgtcagcccctagccacccaggtcgatccgtgcaacctccaggagctgttccaggagatgtcggccaacgtcttccgaatcaactccagtgtgacctccttggagcggagccttcagtccttagggacaccgagtgacacgcaggagcttcgggacagcctgcacacggcacagcaggagaccaacaagaccattgcagccagcgccagctccgtgaagcagatggccgagctgctgcgcagctcctgcccggagcgtctgcagcaggagcgtcctcagctggaccggctgaaaacccagctctcagatgccattcagtgctatggagtggtgcagaagaaaattgcagaaaagtccagagcgctgcttcccatggcgcataggggcagtaaacagcagagtccccaggccccgtttgccgagctggctgatgatgagaaggcctttaacgggagtgaccacctgtggcacggccaggagcacgcgctgctcccggacatcactaaagaggacctggaggccattccgctgcgggaggaggccatcctggccatggagagccactttcctgatgtgaatccgatcctccaggacttggccccccttggtgccccaccccaggaagaccttgctcgatcgtatttgaacccccgccttgaagctgccttcctcccctgcgggaggcagccccggccgcttcctgtgtggaacccagnnnnnnnnnnacttgctgcggagggactacgacccccagcttgcttgtgggctggcccttgagggtccctgcgaagggaccccctcttgcctgcaacttggcccccctgctaattttcccacggagccctccgccggacccca

SEQ ID NO: 349202 - DNA, 893 bp, Homo Sapiens
  misc_feature (16)..(16): n is a, c, g, or t
cctcgtccccaccggnccaacgccaacaccgcaaaaatgggtattgcgtacggtccggaatccttccagactggccgatggcgtggaggctttcaaccggaccctcgagaggctggtggaagcacgccctacccgggaagcctcaccctcactccaggacggtagtcctgccagtggagtggcccaggggcctgctggaggcgcccaggacagccccaagggcacccactcggggctcgaggtcttctcagggatgatcttgaaggtggaggaggagatatagggctggtcgggggtgctggcagagccaaagggcaggagcagggcctccagtctttcccctgctgagtccagccaggggacgaggtggcagtgactgggtctccagggcaccgggacaactccagtccaggagaccggaaggatgagaggatgtgggctgtctacctgtgatgtcgcgtccttgccattgcctgtagagggtggtgacctgcagggaaaggctgcagagagccgacctgtgggactcagtggaccaggtctactcagggatgatgctgttggaggctccaaccccatgtggcagcagctgcgaagtctgcagcccagcgtccctggaagcaggggaggtggggaagatgcactgaggggccccctgctcactggaactctggaaagggtggctcagccaggctctaaaaaggtcccaagcgtgatctggtgtgactcctgaaagcccctgtccctttggtgggcatgcacacttggagggcagggctcctctgccctacgtggttctggcccaggggaaccacatcccatatgcctggaataatttctatccaattttctgttataaatacataaatatatatatatatatatatgcctat

SEQ ID NO: 349203 - DNA, 1113 bp, Homo Sapiens
  misc_feature (9)..(9): n is a, c, g, or t
  misc_feature (17)..(17): n is a, c, g, or t
  misc_feature (26)..(26): n is a, c, g, or t
  misc_feature (31)..(31): n is a, c, g, or t
  misc_feature (35)..(35): n is a, c, g, or t
  misc_feature (37)..(37): n is a, c, g, or t
  misc_feature (44)..(44): n is a, c, g, or t
  misc_feature (52)..(52): n is a, c, g, or t
  misc_feature (54)..(54): n is a, c, g, or t
  misc_feature (56)..(56): n is a, c, g, or t
  misc_feature (60)..(60): n is a, c, g, or t
  misc_feature (73)..(73): n is a, c, g, or t
  misc_feature (107)..(107): n is a, c, g, or t
  misc_feature (110)..(110): n is a, c, g, or t
  misc_feature (147)..(147): n is a, c, g, or t
  misc_feature (185)..(185): n is a, c, g, or t
  misc_feature (263)..(318): n is a, c, g, or t
aatcttgcngcagtagngaaagcagnggctnacgncnttagtanaagattgncngnaaangttcccagagagnaatctaagataatataatgtccatactttttatntangaatcaaactcaagcataacattggccaaggaaaatnaataccattgctaacttgtgaaatggaagtctgtgatntcggagatgcaaagcattgtagtaaaaacaccaatgtgacctcgaccatctcagcccagatatcattcatatatctgnnnnnnnnnnnnnnnnnnnnnnnnnnnnnnnnnnnnnnnnnnnnnnnnnnnnnnnnccttgtctgtctggtttgctgctgtatcttctcccagggcattatatttatgatgaaagatgctgtggattcaattctttcagtcaagaataaacacagactttgtaggttcctgctgaataaagcaaatcccagaaacccagattttggaagaatcagcaacccccagcataaaataaaccgcctatcaaaatgtcagaggacatggcaaggtaaacttagcattctcaactttagaaccgggtcagcttcagggggactgctttcaaatcagccaaagagcctgtcagatcttcttagaaggaagaggttggtagttccctgctctgttttgaacatgctctagtttattaacctggggacattcccattgctgtcttaagtaagtctcatagccagctcctgtcacgtgactctcatatggattcattttcgggccagctctgaacaaagcatcatgaacatatgtgcttttggtcgtttgcaatgtgatggtggtggaggtaggtattggtttccttggaaggcatgataagaaagattcacaatggccaacagtgtgtatgaacaaaaaactgattggagcatcagctagtactgaaggtccttgctttgtgtcagaggcaaaggaacccaaggcgccaagtcctcagccttgagtgtactgctgacaactaaactcacaggctgcaaagcagacctctgatgaagatgcctgttatttcacatcactgtctttttgtgtatcatagtctgcaccttacaaatattaataaatgttccaataataggtga

SEQ ID NO: 349204 - DNA, 914 bp, Homo Sapiens
  misc_feature (143)..(143): n is a, c, g, or t
  misc_feature (154)..(154): n is a, c, g, or t
  misc_feature (156)..(156): n is a, c, g, or t
  misc_feature (292)..(292): n is a, c, g, or t
  misc_feature (464)..(464): n is a, c, g, or t
  misc_feature (510)..(510): n is a, c, g, or t
  misc_feature (816)..(816): n is a, c, g, or t
  misc_feature (860)..(860): n is a, c, g, or t
  misc_feature (865)..(865): n is a, c, g, or t
  misc_feature (869)..(869): n is a, c, g, or t
  misc_feature (871)..(871): n is a, c, g, or t
  misc_feature (874)..(874): n is a, c, g, or t
  misc_feature (885)..(885): n is a, c, g, or t
  misc_feature (887)..(887): n is a, c, g, or t
  misc_feature (894)..(895): n is a, c, g, or t
  misc_feature (898)..(898): n is a, c, g, or t
ccgggcggggcccgggccagagcgccgccgccgccgctgctgcagcagcagctgctctgcagagtggtggccggggccagggccggggtgccctccctcccaccttctcccgccatgagccagggaagtccgggggactgggngcccctagagncngggtccggacccccagcatcccccaaccccttcgtgcatgagttacatctctctcgcctccagagggttaagttctgcctcctgggggcattgctggcccccatccgagtgcttctggcctttatcgtcctctttntcctctggccctttgcctggcttcaagtggccggttttagtgaggagcagcttcaggagccaattacaggatggaggaagactgtgtgccacaacggggtgctaggcctgagccgcctgctgttttttctgctgggcttcctccggattcgcgttcgtggccagcgagcctnttgccttcaagcccctgttcttgttgctgccccacactccactttntttgaccccattgttctgctgccctgtgacctgcccaaagttgtgtcccgagctgagaacctttccgttcctgttattggagcccttcttcgattcaaccaagccatcctggtatcccggcatgaaccggcttctcgacgcagagtggtggaggaggtccgaaggcgggccacctcaggaggcaagtggccgcagtgctattctttcctgagggcacctgttccaacaagaaggctttgcttaagttcaaaccaggagccttcatcgcaggggtgcctgtgcagcctgtcctcatccgctacccanacagtctggacaccaccagctgggcatggaggggtcctggagtnctcanagtncnctngctcacacccncncaccccnncancattgtggatgtggag

SEQ ID NO: 349205 - DNA, 788 bp, Homo Sapiens
  misc_feature (129)..(172): n is a, c, g, or t
  misc_feature (645)..(645): n is a, c, g, or t
  misc_feature (659)..(659): n is a, c, g, or t
  misc_feature (706)..(706): n is a, c, g, or t
  misc_feature (712)..(712): n is a, c, g, or t
  misc_feature (720)..(720): n is a, c, g, or t
  misc_feature (726)..(726): n is a, c, g, or t
  misc_feature (740)..(740): n is a, c, g, or t
  misc_feature (765)..(765): n is a, c, g, or t
gggtccggaattcccgggatcgctgctgcagcagcagctgctctgcagagtggtggccggggccagggccggggtgccctccctcccaccttctcccgccatgagccagggaagtccgggggactgggnnnnnnnnnnnnnnnnnnnnnnnnnnnnnnnnnnnnnnnnnnnnttcgtgcatgagttacatctctctcgcctccagagggttaagttctgcctcctgggggcattgctggcccccatccgagtgcttctggcctttatcgtcctctttctcctctggccctttgcctggcttcaagcggccggtcttagtgaggagcagcttcaggagccaattacaggatggaggaagactgtgtgccacaacggggtgctaggcctgagccgcctgctgtttttcctgctgggcttcctccggattcgcgctcgtggccagcgagcctctcgcactccaagcccctgtccttgatgctgccccacactccactttctttgaccccattgttctgctgccctgtgacctgcccaaagttgtgtcccctagctgagaacctcttccggtcctgtcattgggagcccttcttcgattcaaccaagccatcctgggtattcccgggatgaacccgggtttttggaggnagagttggttggangaaggttcgaaggcgggggccaacttcaaggaaggcaagttgggccnaaggtngttatttntttttncttgaaggggaaantgttttcaaaaaaggaagggttttntttaaagtttaaaaacagggggg

SEQ ID NO: 349206 - DNA, 2119 bp, Homo Sapiens
  misc_feature (103)..(147): n is a, c, g, or t
  misc_feature (1878)..(1878): n is a, c, g, or t
ctgcagcagcagctgctctgcagagtggtggccggggccagggccggggtgccctccctcccaccttctcccgccatgagccagggaagtccgggggactggnnnnnnnnnnnnnnnnnnnnnnnnnnnnnnnnnnnnnnnnnnnnnttcgtgcatgagttacatctctctcgcctccagagggttaagttctgcctcctgggggcattgctggcccccatccgagtgcttctggcctttatcgtcctctttctcctctggccctttgcctggcttcaagtggccggtcttagtgaggagcagcttcaggagccaattacaggatggaggaagactgtgtgccacaacggggtgctaggcctgagccgcctgctgtttttcctgctgggcttcctccggattcgcgttcgtggccagcgagcctctcgccttcaagcccctgtccttgttgctgccccacactccactttctttgaccccattgttctgctgccctgtgacctgcccaaagttgtgtcccgagctgagaacctttccgttcctgtcattggagcccttcttcgattcaaccaagccatcctggtatcccggcatgacccggcttctcgacgcagagtggtggaggaggtccgaaggcgggccacctcaggaggcaagtggccgcaggtgctattctttcctgagggcacctgttccaacaagaaggctttgcttaagttcaaaccaggagccttcatcgcaggggtgcctgtgcagcctgtcctcatccgctaccccaacagtctggacaccaccagctgggcatggaggggtcctggagtactcaaagtcctctggctcacagcctctcagccctgcagcattgtggatgtggagttccttcctgtgtatcaccccagccctgaggagagcagggaccccaccctctatgccaacaatgttcagagggtcatggcacaggctctgggcattccagccaccgaatgtgagtttgtagggagcttacctgtgattgtggtgggccggctgaaggtggcgttggaaccacagctctgggaactgggaaaagtgcttcggaaggctgggctgtccgctggctatgtggacgctggggcagagccaggccggagtcgaatgatcagccaggaagagtttgccaggcagctacagctctctgatcctcagacggtggctggtgcctttggctacttccagcaggataccaagggtttggtggacttccgagatgtggcccttgcactagcagctctggatgggggcaggagcctggaagagctaactcgtctggcctttgagctctttgctgaagagcaagcagagggtcccaaccgcctgctgtacaaagacggcttcagcaccatcctgcacctgctgctgggttcaccccaccctgctgccacagctttgcatgctgagctgtgccaggcaggatccagccaaggcctctccctctgtcagttccagaacttctccctccatgacccactctatgggaaactcttcagcacctacctgcgccccccacacacctctcgaggcacctcccagacaccaaatgcctcatccccaggcaaccccactgctctggccaatgggactgtgcaagcacccaagcagaagggagactgagtgcctcagcctctcaccccctcctcctcagggcagcgctaggggcctcccctatgcctcagccccatctctgctcctgtttgaaattttgcaatgttgcttggttgctgtttttttacgctgactttaattttcttgcttggtcgacttttttgtaacaaactatttttttatttaaatataaacccaaatcccatactcctttaaacaaaatgaaggccctgcaanaccacccctccgcggctcctcatatcacccctcccgaagctttccacccaatcttaagcccacctcccaggggggcgggcccgttataaaaaattaccccctcgggggggcgcccaaagtttatatcgcgcctacccacatttttctttttacgaacaagaggggggccccctaccatggcgccggcccctcttttttatacctttctggggcctctgtgcccgccctcgctcttttatat

SEQ ID NO: 349207 - DNA, 3754 bp, Homo Sapiens
  misc_feature (3250)..(3293): n is a, c, g, or t
agcgggctctgtgttcctgggcctgctgctggctgtccagagtaggggttgcttagagctgtgtgcatccctgcgggtggtgtgggagtgggcggttgtctaaaggcaggtcccctctactgataaacaaggaccggagatagacctagaggctgacattcttggctcccccagcctacacctcccccacctcgatttcccacagagccctagggacgggtagccagctctgtggcatggtatctggaggcaggccagcaacctgatgtgcatgccacggccgtccctctccccactcagagctgcagtagcctggaggttcagagagccgggctactctgagaagaagacaccaagtggattctgcttcccctgggacagcactgagcgagtgtggagagaggtacagccctcggcctacaagctctttagtcttgaaagcgccacaagcagcagctgctgagccatggctgaaggggaaatcaccaccttcacagccctgaccgagaagtttaatctgcctccagggaattacaagaagcccaaactcctctactgtagcaacgggggccacttcctgaggatccttccggatggcacagtggatgggacaagggacaggagcgaccagcacattcagctgcagctcagtgcggaaagcgtgggggaggtgtatataaagagtaccgagactggccagtacttggccatggacaccgacgggcttttatacggctcacagacaccaaatgaggaatgtttgttcctggaaaggctggaggagaaccattacaacacctatatatccaagaagcatgcagagaagaattggtttgttggcctcaagaagaatgggagctgcaaacgcggtcctcggactcactatggccagaaagcaatcttgtttctccccctgccagtctcttctgattaaagagatctgttctgggtgttgaccactccagagaagtttcgaggggtcctcacctggttgacccaaaaatgttcccttgaccattggctgcgctaacccccagcccacagagcctgaatttgtaagcaacttgcttctaaatgcccagttcacttctttgcagagccttttacccctgcacagtttagaacagagggaccaaattgcttctaggagtcaactggctggccagtctgggtctgggtttggatctccaattgcctcttgcaggctgagtccctcaatgcaaaagtggggctaaatgaagtgtgttaaggggtcggctaagtgggacattagtaactgcacactatttccctctactgagtaaaccctatctgtgattcccccaaacatctggcatggctcccttttgtccttcctgtgccctgcaaatattagcaaagaagcttcatgccaggttaggaaggcagcattccatgaccagaaacagggacaaagaaatccccccttcagaacagaggcatttaaaatggaaaagagagattggattttggtgggtaacttagaaggatggcatctccatgtagaataaatgaagaaagggaggcccagccgcaggaaggcagaataaatccttgggagtcattaccacgccttgaccttcccaaggttactcagcagcagagagccctgggtgacttcaggtggagagcactagaagtggtttcctgataacaagcaaggatatcagagctgggaaattcatgtggatctggggactgagtgtgggagtgcagagaaagaaagggaaactggctgaggggataccataaaaagaggatgatttcagaaggagaaggaaaaagaaagtaatgccacacattgtgcttggcccctggtaagcagaggctttggggtcctagcccagtgcttctccaacactgaagtgcttgcagatcatctggggacctggtttgaatggagattctgattcagtgggttgggggcagagtttctgcagttccatcaggtcccccccaggtgcaggtgctgacaatactgctgccttacccgccatacattaaggagcagggtcctggtcctaaagagttattcaaatgaaggtggttcgacgccccgaacctcacctgacctcaactaacccttaaaaatgcacacctcatgagtctacctgagcattcaggcagcactgacaatagttatgcctgtactaaggagcatgattttaagaggctttggcccaatgcctataaaatgcccatttcgaagatatacaaaaacatacttcaaaaatgttaaacccttaccaacagcttttcccaggagaccatttgtattaccattacttgtataaatacacttcctgcttaaacttgacccaggtggctagcaaattagaaacaccattcatctctaacatatgatactgatgccatgtaaaggcctttaataagtcattgaaatttactgtgagactgtatgttttaattgcatttaaaaatatatagcttgaaagcagttaaactgattagtattcaggcactgagaatgatagtaataggatacaatgtataagctactcacttatctgatacttatttacctataaaatgagatttttgttttccactgtgctattacaaattttcttttgaaagtaggaactcttaagcaatggtaattgtgaataaaaattgatgagagtgttagctcctgtttcatatgaaattgaagtaattgttaactaaaaacaattccttagtaactgaactgtcatatttagaatggaaggaaaatgacagtttgtgaaagttcaaagcaatagtgcaattgaagaattgacctaagtaagctgacattatggttaataatagtattttagatttgtgcagcaaaataatttcataacttttttgtttttgttacttggataagatcaatctgttttattttagtaaatctttgcaggcaagttagagaaaatgcagtgtggcttaacgtctctttagtatgaagatttggccagaaaaagatacccagagaggaaatctaagataattataatggtccatactttttattgtatgaatcaaactcaagcataacattggccaaggaaaattaaataccattgctaacttgtgaaatggaagtctgtgatttcggagatgcaaagcattgtagtaaaaacaccaatgtgacctcgaccatctcagcccagatatcattcatatatctgttcaatgactattaaggtgcctactgtgtgctaggcactgtactggatactgnnnnnnnnnnnnnnnnnnnnnnnnnnnnnnnnnnnnnnnnnnnnattatatttatgatgaaagatgctgtggattcaatttctttcagtcaagaataaacacagactttgtaggttccctgctgaataaagccaatcccagaaaaccccgattttggaagaatcagcaaccccagcataaaataaacccctatcaaaatgtctgaggacatgggcagggtaaacttagccttttttcaacttttaaaaccggggttaaccttcaggggggactggcttttcaaatccgtcccaaagagcccctggtcagaatcttccttaaaaaagcaaaaaggttgggtaattttcccctgactctgttttttttaaacaatgcccccaaattttatttcaaccttggggaaaatttccccatttggctgggcgcttaagatgaaagtgcctccaatagccacaagacctcccctggtcagcagttggacccccctcccgttagatggggactt

SEQ ID NO: 349208 - DNA, 694 bp, Homo Sapiens
  misc_feature (131)..(174): n is a, c, g, or t
  misc_feature (567)..(567): n is a, c, g, or t
ggcggagatgcaaagcattgtagtaaaaacaccaatgtgacctcgaccatctcagcccagatatcattcatatatctgttcaatgactattaaggtgcctactgtgtgctaggcactgtactggatactgnnnnnnnnnnnnnnnnnnnnnnnnnnnnnnnnnnnnnnnnnnnnattatatttatgatgaaagatgctgtggattcaattctttcagtcaagaataaacacagactttgtaggttcctgctgaataaagcaaatcccagaaacccagattttggaagaatcagcaaccccagcataaaataaacccctatcaaaatgtcagaggacatggcaaggtaaacttagcattttcaactttagaaccgggtcagcttcagggggactgctttcaaatcagccaaagagcctgtcagatcttcttagaaggaagaggttggtaggtccctgctctgttttgaacatgctctagtttattaacctggggacattcccattgctgtcttaagtaagtctcatagccagctcctgtcacgtgactctcatatggattcattttcnggtcagctctgaacaagcatcatgaacatatgtgcttttggtcgtttgcatgtgatggtgtggagttagggtatgggtttctttggaggcatgataagaagattcacatggccacagtgtgatgaca

SEQ ID NO: 349209 - DNA, 800 bp, Homo Sapiens
agcggagagagccgggctactctgagaagaagacaccaagtggattctgcttcccctgggacagcactgagcgagtgtggagagaggtacagccctcggcctacaagctctttagtcttgaaagcgccacaagcagcagctgctgagccatggctgaaggggaaatcaccaccttcacagccctgaccgagaagtttaatctgcctccagggaattacaagaagcccaaactcctctactgtagcaacgggggccacttcctgaggatccttccggatggcacagtggatgggacaagggacaggagcgaccagcacacagacaccaaatgaggaatgtttgttcctggaaaggctggaggagaaccattacaacacctatatatccaagaagcatgcagagaagaattggtttgttggcctcaagaagaatgggagctgcaaacgcggtcctcggactcactatggccagaaagcaatcttgtttctccccctgccagtctcttctgattaaagagatctgttctgggtgttgaccactccagagaagtttcgaggggtcctcacctggttgacccaaaaatgttcccttgaccattggctgcgctaacccccagcccacagagcctgaatttgtaagcaacttgcttctaaatgcccagttcacttctttggcagagccttttacccctgcacagtttaggaacagaggggaccaaattgcttctagggagtccaactgggctgggccattctggggtctggggttttggattcttcaattggcctctttgcagggtt

SEQ ID NO: 349210 - DNA, 460 bp, Homo Sapiens
  misc_feature (22)..(22): n is a, c, g, or t
  misc_feature (337)..(414): n is a, c, g, or t
aaccccaaccctgctggccaanaactttgcaagctgaactgtgcccaggcgggaaaccagccaaggcctctcccctctgtcagttcccagaacttctcccctcccatgaccccactctatgggaaactcttcagcacctacctgcgccccccacacacctctcgaggcacctcccagacaccaaatgcctcatcccccaggcaaccccactgctctggccaatgggaactggcaagcacccaagcagaagggagactgagtgcctcagcctctcaccccctcctcctcagggcagcgctaggggcctcccctatgcctcagccccatctctgctccnnnnnnnnnnnnnnnnnnnnnnnnnnnnnnnnnnnnnnnnnnnnnnnnnnnnnnnnnnnnnnnnnnnnnnnnnnnnnnaaaaaactattttatatataaatataaatctatatctatatctatt

SEQ ID NO: 349211 - DNA, 1835 bp, Homo Sapiens
ccgtgtccactgagctgcctgctccttctcgataatagccggctccgctttagatgctttttacccctgcggttgggcaaaaaaaattgcctttaaattcctgggtgtttggccgtttgagacccctcccttcgcatcaagcctctcggacaaaagggctaggaaaaggtgatatgtctcctgatcatatcatacccattaagtataacccattatttagaaggttctagggaaaaaagtagtattttcttattaaacaatcagcacagcctatatctttgttctctcatgttgatccaagccagagacatcagtaacaaatagcacctgtgttgtttgtgagctgtttcagtcccagtcctgatgtgtgtgcgttgttctctcctggccacttaaataggaccatatgtaaacttgactttgactgcatgagatatccctatctggtctcactcagtcctctgcatcccaacattcccaggacatgcatgatcaccagcatttattttcattatttgaggatatcttataactcacagattgtcagcatccagccatgtcctatctagattaggaaaatgatcagaatattccagctcaacaagtctgggtatattcactattgtgagtcaatacaccatagctctgttgaaattcctggaggcaaaattgaccttggccccaaagatattcctcaatagatttcaaacaccactcccctgtagaactctcccagcctcgttggggaggcttgtccagggtgatagagactgatttcagacaaacctatttattacaaaagtttcatggtgtctgaatgattgttttctctctttgtatatttgtacaaatgtttcagctgtgcttttaaaaaatctggatgttttttatttagtgattgttcgacaattagctgcttcaaaacataatgtgcattgcttatgaatgccttcatatactaatacagatactctgataatattacactctaataaggataatgctgaattttgaaaggacacaaaacatctaatgccaatatatacatgattagccaacatctttgctatcaagaccacttgtttttaaataaagatgcaagtgtcagttgtagattattgggatgaagctaaatccccagaatgcagcagcagctgagcatgttaaaatggggaaggatgatagctacatgtatgccggtcctactcacgcgacacccgtgtgctcaaaaaagttatttgtttttgttacgtgtgatttttctatttctctagcccaaagtgcattacagaagatacacctatagaaccattaccttctgctatgtgtgccaggcctcatctactcctgtacattaatgaattactttagatgcaaacgcagattacaatggagtggggaagtactttcattacccaagcctcagaaaaacacacaagaacaataacacagcaaacagattgagggattgttgtggtttttgactaaggtgtatgttagtttcatcagaaacttaaaacatagactgatcactcagaaattaaagtccgttttactgtgaatatagcaatatagtactggacacagtactggtgaaactgaggagagcattgcttgtaaaatcctgagtttccataaggaaaatgaaaactccttttaaaaataaaatctgaggagtgtacaataagcatatgctttgactttcctttgctgtggaggtttttggtttttcattgatgataaacgactacagacttagtagtggagaaatggtgtcctctagtggaagaaatagtaggctccgctattcagatgcagacacttgcatcagagtg

SEQ ID NO: 349212 - DNA, 220 bp, Homo Sapiens
ggcagatcgatcgagccggtacccttcaaaacataaggtgcatgcttatgaatgccttcatatactaatacagatactctgataatattacactctaataaggataaggctgaatttggaaaggacacaaaacatctaaggccaatatatacatgattagccaacatcttggctatcaagaccactggtttttaaataaagatgcaagtgtcagtggtag

SEQ ID NO: 349213 - DNA, 893 bp, Homo Sapiens
gattgtacaagattatcttccctcaacagaagctgcccgttcccacatttgaaactcataatccatggggtttaaaatgtgccaaccctattttttaaagaactgtcaaagcaaaatgattttccccgctttttaggaatattttattctcgttccaagattatgaaagcggctgggcatacagagtggactaacaaaaattgctttttaaatagacaagcaccctggtaagtttttcctacttatgatgtgctgtttggtcacatttagccactgaagacttaaaatttaaataatggtaaatcatcgctacatcagttaacatcctttcaactgaaaatatgaaagccccctcggtccaacagtgagacggagctgctctaggcatgtgagtttgagtagcaatggtgtggggaaggaaatacttccaatgcatattgaacaagaaaccttactggtaatcaaagattttacctttaatgcttattaaattactctttttggagttgagccaaccaaagcgagcacatggtacgaaattttcaactaaatcagaaagagcttcacttatcagttataattttaaatctcaagccaaaaataaaaggcgtgaccctctctgcgtgcttcccccgatagttcgcggcgacctacttgagggtcccaggctcctgcgcacagcctcggtgctctgcggggttcgggacaccccggggccggctgcaggctgcctcaggaacccccactgtaccctgaggctgaccctttggatcccacagccttctctgtgtcctgtctgtcaagggacccatccgcacacctcctgggtctcaaggcatccacccccagaagcaaagacaagcaaaaggaaagcaaagcgaaagcggccctga

SEQ ID NO: 349214 - DNA, 906 bp, Homo Sapiens
ctggaggagaagaactccctgagcgaggagatagccaacatgaagaagcttcaggatgagttgctgctaaacaaggagcagctcttggccgaaatggagcggatgcagatggagatcgaccagctgcgggggaggccaccatcctcctactccaggtctctccctggcagtgccctggagctccgttactctcaggcacccactttaccttctggtgcccacctggatccctatgtggctggcagtggtcgggcaggcaagaggggccgctggtcaggggtcaaggaggagccctccaaggattgggagcggtctgcacctgcgggctccataccacccccattccctggggaactggacggctccgatgaggaggaggcagaggggatgtttggggccgagcatgctgtcccccagtgggcaggctgacgtgcagacgctggccatcatgcttcaggagcagctggaggccatcaacaaggagatcaagctgatccaagaggagaaggagacaacagaacagagggcagaggagctggagagtcgggtgtccagctctggcttggactcgttgggccgctaccgcagcagctgctccctgcccccctccctcaccacctctacccttgccagcccctcccctcccagctctggccactcaacaccccgcctggcaccccctagccctgcccgtgagggcaccgacaaggctaatcatgtccctaaggaggaagctggagctccacgaggggaggggccggccatcccaggagacaccccaccacccactcccgctctgcccgtcttgagagaatgacccaggccttggcactgcaggcggggtccctggaagatgggggaccccacggggaagtgagggcacccagattctctgcacaaagcccc

SEQ ID NO: 349215 - DNA, 1211 bp, Homo Sapiens
tcccagaagccaggatcacgactcacttgtcttcacataatggatatttacttaatatttattatcaatttccccacctccaaccctgtccctggcacacacttggcatcatttatccaataggggactgggaattttggtgaagtgaatcaaggctattcagggtcaagagagagattaacttgaatgggccaatttgctagataattaatgtcttaaaaaccaaaaccagagagaagcccacagccctgtcctctgtggcttgaaaaagaaacccagcatcagaggaatgagcgatgatgccccctggggcgcccacttctgtttgtcaggagggatggtacggaggggcagctcacctggcgaggtgatggctctgcatttcccacgaacatatatgtgacatgtacataaatataaatacttatgtttataaatgttgaatggttccttctagctgtggctgagtagacgttggtgtttctaacttctttcagtgtgttagagattgattacatgctagctataaaaagtaaaataaatattttaccatgctattaaagcttggaccattatcaaacacacacaaacacacactcattctgctgtttaaaaattcatctgcgttcgttctcccaggagtgctccagggaaccacaggcttcccggcacttgaaggctgaactgagcgtgagtgccctggtccccaggaagcaggcggatgctgcaggaaggtggcagacagcctgcatccaggagggccccaggaagtggggatgctgcaggaaggcggcacaaagcctgcatccgggagggccccaggaagcagggggatgctgcaggaaggtggcagacagactgcatccaggagggcacagtgacctgtcactccgttctgcagaaattggcccagcagttgcgttatgcccaaccaaaagatgctcgttccagctttcaaatgtgatgatttcagcctgtgaggacaatgccatgtccccaccctaagccagcaaaatgcgaaatctctgttctggcccagaatggcacaagggaggagtctttgcagagttccacgccaccccccagcttactgcggccttcacctgctctgtctaggattgccagctgtggttccaagtgaggagcaaacccattttatgagccatgttcctgcggagacctgatgggccaggccttctgtggctttgaaa

SEQ ID NO: 349216 - DNA, 1578 bp, Homo Sapiens
taggacagcacggacttaggttcttcattaggagactgatggggggggtccttcctggtgggtcactcactgccatagctcttgtcatagctgatgaaggcaggagtgagtcttattatgttggcctagagtagaaagcacagagctatgtcgaggctgctgtctcagcctctggaagttctgcttcacctgcttagtaagaggagatgaccactcctgtggactgcatgtcccatctgcccccagaggtggtcggcgctgccccagtcatgtcccttatgacctgtccaagtcctagaggccaaagcaggtcatattcttcagctgcaggaatgtcagctactgcctcccaccccttaacctgatccccttatcatatagtggggaaggggcaggcaggccttctctctgtcaagaacaaagatctctacaacatttcgtcacctgggccagtcacctgctaatatcatctcaccaatatttggagctgttttctgaatcccttaattttcttaaatatttatcttaaagtcaaatgctataaaggagataccctgggaagggcagtggccacaggcagactgggtctcctaggaggtggtggtgttggtgacaagttctacttggactgggactcaacccaccattgcctacctctcttccctgcctggagaccttccttaggattgaagaaacctcttttgtttgtgaaaaagataggtatcgagatcttaatggagagaacagaataaaatgcaaggagccaacccctgggtattctcaaagcatttcaacggtcagtataacaaggtttgattgatttaaaatataacattctgagccctgtgttactgagcaaaaatgagctgatttggtgagtatgttttatatatggtcattagacagggaccataactgacaaaactctcaaacgcctggagtgtttatggcccaccagattattgctcagtcaatataaatttatttacctttattttaatttgcatagtgctttctgattggtcagaccaaggagtggtgtgtactgcaggattctaacaatgcctctgcccttggaggcagcaattcctgtggttattggtgctaaaataagataaaatattatgttaatttgttctgatatgatgtgaataaatgtgttgtttaatcttaacaagaatgctacatcttatcagatctattgtactgtctgttccttctcataattaattaattacaggaaaggcgattcaaaccagatcttgaaactattgtgatgttctgagaggtaaatttaacagggaagtgggaggggggatgaaaagggaaattgccaggttcctgtgactttgaaaggactgaggaagcagagagcatttggggacttcactgaaactgactgcatcttgcaattttctttttcgaattggcagaaatattgtatttccatcgattgaagaaaaacaagtgtctggtaattaattaaatgacttgttcatggaaaaaataaataatctgtcagttgtggaatgtaaactgattaaacaattaaataaagaagattatgttgtgtgtttt

SEQ ID NO: 349217 - DNA, 441 bp, Homo Sapiens
tgttgtttaaaccttaacaagaatgcctacatccttatccagaaactattgtactgtactgttcccttcctcataattaattaattaacaggaaaggcgattcaaacccagatccttgaaactattgtgatgttcctgagaggtaaatttaacagggaagtgggaggggggatgaaaagggaaattgcccaggttcctgtgactttgaaaggactgaggaagcagagagcatttggggacttcactgaaactgactgcatcttgcaattttctttttcgaattggcagaaatattgtatttccatcgattgaagaaaaacaagtgtctggtaattaattaaatgacttgttcatggaaaaaataaataatctgtcagttgtggaatgtaaactgattaaacaattaaataaagaagattatgttgtgtgttttaaaaaaaa

SEQ ID NO: 349218 - DNA, 2370 bp, Homo Sapiens
  misc_feature (22)..(22): n is a, c, g, or t
  misc_feature (61)..(61): n is a, c, g, or t
  misc_feature (71)..(71): n is a, c, g, or t
  misc_feature (75)..(75): n is a, c, g, or t
  misc_feature (88)..(88): n is a, c, g, or t
  misc_feature (102)..(102): n is a, c, g, or t
  misc_feature (132)..(132): n is a, c, g, or t
  misc_feature (142)..(142): n is a, c, g, or t
  misc_feature (147)..(147): n is a, c, g, or t
  misc_feature (180)..(204): n is a, c, g, or t
  misc_feature (207)..(207): n is a, c, g, or t
  misc_feature (212)..(212): n is a, c, g, or t
  misc_feature (286)..(286): n is a, c, g, or t
  misc_feature (438)..(438): n is a, c, g, or t
  misc_feature (444)..(444): n is a, c, g, or t
  misc_feature (451)..(451): n is a, c, g, or t
  misc_feature (462)..(462): n is a, c, g, or t
  misc_feature (464)..(464): n is a, c, g, or t
  misc_feature (477)..(477): n is a, c, g, or t
  misc_feature (495)..(495): n is a, c, g, or t
agtcccggcgggagcggagcgngagccgggcgccgggcccgagccggcgccatggggcggngccgcctgtnagcngcggcgagcagancgcgggcgccgagnagggccaggagggaagagtcggcgcccgangccgagcgancagcngccgggccgggccgagcgccgagcgagcaggannnnnnnnnnnnnnnnnnnnnnnnngangaggnagcgccgccgccaagatggcggacctggaggcggtgctggccgacgtgagctacctgatggccatggagaagancaaggccacgccggccgcgcgcgccagcaagaagatcctgctgcccgagcccagcatccgcagtgtcatgcagaagtacctggaggaccggggtgaggtgacctttgagaagatcttttcccagaagctggggatacctgctcttccgaganttctgncttaacnacctggaggangncaggcccttggtngaattctatgaggagatnaagaagtacgagaagctggagacggaggaggagcgtgtggcccgcagccgggagatcttcgactcatacatcatgaaggagctgctggcctgctcgcatcccttctcgaagagtgccactgagcatgtccaaggccacctgggggaagaagcaggtgcctccggaatctcttccagccatacatcgaagagatttgtcaaaagctccgagggggacgtgttccagaaatccattgagagcgataagttcacacggttttgccagtggaagaatgtggagctcaaccatccacgaggccaggcctgggtggaattctatgaggagatcaagaagtacgagaagctggagacggaggaggagcgtgtggcccgcagccgggagatcttcgactcatacatcatgaaggagctgctggcctgctcgcatcccttctcgaagagtgccactgagcatgtccaaggccacctggggaagaagcaggtgcctccggatctcttccagccatacatcgaagagatttgtcaaaacctccgaggggacgtgttccagaaattcattgagagcgataagttcacacggttttgccagtggaagaatgtggagctcaacatccacctgaccatgaatgacttcagcgtgcatcgcatcattgggcgcgggggctttggcgaggtctatgggtgccggaaggctgacacaggcaagatgtacgccatgaagtgcctggacaaaaagcgcatcaagatgaagcagggggagaccctggccctgaacgagcgcatcatgctctcgctcgtcagcactggggactgcccattcattgtctgcatgtcatacgcgttccacacgccagacaagctcagcttcatcctggacctcatgaacggtggggacctgcactaccacctctcccagcacggggtcttctcagaggctgacatgcgcttctatgcggccgagatcatcctgggcctggagcacatgcacaaccgcttcgtggtctaccgggacctgaagccagccaacatccttctggacgagcatggccacgtgcggatctcggacctgggcctggcctgtgacttctccaagaagaagccccatgccagcgtgggcacccacgggtacatggctccggaggtcctgcagaagggcgtggcctacgacagcagtgccgactggttctctctggggtgcatgctcttcaagttgctgcgggggcacagccccttccggcagcacaagaccaaagacaagcatgagatcgaccgcatgacgctgacgatggccgtggagctgcccgactccttctcccctgaactacgctccctgctggaggggttgctgcagagggatgtcaaccggagattgggctgcctggggccgaggggctcagggaggtgaaagagagcccctttttccgctccctggacctggcagatggtctttcttgcatgaagtacccttcccacgctagatcccccaacagaggggaggtgaactgctatggcagacggccttcgacgattggctccgtttcgactgaggcaggaaccacaaacgggacatcaagttacctgggaccagtcgcatcaggaacacataactgcaagagtatccccactcagcccagtcgtcggcaagccggtgggccgtcacgcgaggcgtgcaagacgcaagctagcatatcggagaacacatttcaaacggtctgaataaacagaaccatgtatatgcgtggctccgcaagaagaggccccggaaccaagcactatgaggccaattatggtacgaacgtacgccatgcgcaacacacatcacgtacagtcattggcactatgcatcaagaatcgagtaagccaattcactatgcat

SEQ ID NO: 349219 - DNA, 1194 bp, Homo Sapiens
  misc_feature (774)..(774): n is a, c, g, or t
  misc_feature (1011)..(1011): n is a, c, g, or t
  misc_feature (1069)..(1069): n is a, c, g, or t
  misc_feature (1071)..(1071): n is a, c, g, or t
  misc_feature (1088)..(1088): n is a, c, g, or t
  misc_feature (1098)..(1098): n is a, c, g, or t
  misc_feature (1100)..(1100): n is a, c, g, or t
  misc_feature (1108)..(1108): n is a, c, g, or t
  misc_feature (1126)..(1126): n is a, c, g, or t
  misc_feature (1140)..(1140): n is a, c, g, or t
  misc_feature (1144)..(1144): n is a, c, g, or t
  misc_feature (1149)..(1149): n is a, c, g, or t
  misc_feature (1153)..(1153): n is a, c, g, or t
  misc_feature (1169)..(1169): n is a, c, g, or t
  misc_feature (1180)..(1180): n is a, c, g, or t
caggagcccccaggaggggcccacgtggagcaggggtcggcgctcaccaagggcccccggggagccaactcccgcctctttcttcattggggaccagaatggggacgctgtgttatctaggaaaccgcttgcgctccaggggatggggagggcctagggcagacagcccagcccagccccccagcacgggatggcgtctatgtcagtgccaatgggagaatggtcatccagctacggcctggacggtccccagaacccgacggccctgccccagcctttctccggcaagagagcttcactaaggagccagccagtggtcccccagcgcccggcaagcccccccacatctccagccacccgcttctacaggacctggccgctacccgggccgcacgcatggacttccactcccaggacacccacctgatcttgaaggagacggagacggccctggcggccctggaggcccgactcctctctaattctgtggatgccgagtgtgaggggggcagcaccccgaggccgccggaggacgccctgtctggggactcggacgtggacacagccagcaccgtcagcctgcgtagtggcaagagcgggcccagccccacaaccccccagcctctgcgggcacagaaggagatgtcgccatccccgccagctgcacaggacccgggaggcaccgccctggtcagtgcccgtgagcagtcctcagagaggcagcatcacccacttggcccgacggacatgggccgtggagagccggtacgcgcntcagccataaggcgtggccacaggccccgagggtccctggattggcccagtgaggagcgtggccctgtcctcgcccacctacccagctcagatgtgatggcctccaaccacgaaacccctgaggccaccggggcaggacggctaggttctcgccggaaaccagcggccccaccgccatccccagctgcccgggaggagcagagccgtagctcagccagctcccagaaggggccgcantttgaacccgctccaacagcctgtccacccctcgccccacacgggcctcccggctgangngggcccggctgggggangcttaaaaantnagctgcgnatggtgagcggggtcctnggcaacctgagccntggncggcnactnctgacagccaaaaatntaacctggaanctggcatcccggaa

SEQ ID NO: 349220 - DNA, 1218 bp, Homo Sapiens
gcttcctgagtgagcggtggagggaacctagaggacagagcccccagcccggcagcaggccccctctccgcccgtcaccacggaggagaaggaggacagccagcccctccagccctggcctggcccagcgggggcagtaagctcctacttgcccccagcttggtgcccacacgggcccagtgcatgagcagccgagcctgctaaccgcagctccgcacttgtccatccccctgcggctacaccatgtccagctcctacgatgaggcctcactggcgccagaggagaccaccgacagcttctgggaggtggggaactacaagcggaccgtgaagcgcatcgatgacggccaccgtctatgcaacgacctgatgaactgcgtgcaggagcgcgccaagatcgagaaggcgtacgggcagcagctcaccgactgggccaagcgttggcgccagctcatcgagaaaggcccacagtatggcagcctggagcgggcctggggtgccataatgacagaggcagacaaggtgagcgagctgcaccaggaggtgaagaacaatctgctgaatgaggacctggagaaggtgaagaactggcagaaggacgcctatcacaagcagatcatgggtggcttcaaggagacgaaggaggctgaagatggcttccgcaaggcccagaagccttgggccaagaagatgaaggagctggaggcagccaagaaggcctaccatttggcttgcaaagaggaaaagctggccatgacacgggagatgaacagcaagacggagcaatcggtcacacctgagcagcaaaagaagctgcaggacaaagtggacaagtgcaagcaggatgtgcagaagacacaggagaagtatgagaaagtgctggaagatgtgggcaagaccacaccccagtacatggagaacatggagcaggtgtttgagcaatgccagcaatttgaggaaaagcggctggtcttcctcaaggaggtgctgctggacatcaaacggcacctcaacctggctgagaacagcagctacatccatgtgtaccgtgagctggagcaggccatccggggggctgatgcccagggaagacctcagatggttccgcagcaccagtggccccggcatgcccatgaactggccccagtttgaggagtggaacccagaccttcctcacaccaccaccaagaaggagaaacagcctaagaaggcagaggg

SEQ ID NO: 349221 - DNA, 1178 bp, Homo Sapiens
  misc_feature (447)..(447): n is a, c, g, or t
  misc_feature (679)..(688): n is a, c, g, or t
  misc_feature (695)..(695): n is a, c, g, or t
  misc_feature (726)..(777): n is a, c, g, or t
  misc_feature (999)..(999): n is a, c, g, or t
  misc_feature (1006)..(1016): n is a, c, g, or t
  misc_feature (1025)..(1026): n is a, c, g, or t
ccgtccggaatttccgggattcctgagtgagcggtggagggaaccctagaggacagagcccccagcccggcagcaggccccctctccgcccgccaccacggaggagaaggaggacagccagcccctccagccctggcctggcccagcgggggcagtaagctcctacttgcccccagcttggtgcccacacgggcccagtgcatgagcagccgagcctgctaaccgcagctccgcacttgtccatccccctgcggctacaccatgtccagctcctacgatgaggcctcactggcgccagaggagaccaccgacagcttctgggaggtggggaactacaagcggaccgtgaagcgcatcgatgacggccaccgtctatgcaacgacctgatgaactgcgtgcaggagcgcgccaagatcgagaaggcgtacgggcagcagctcaccganctgggccaagcgttggcgccagctcatcgagaaaggtgctcccccaggctcacatcgtgcgcgcccccaggccgtcacgagccccctaggtctgggtcctaggagccccggctacttgcatgcaccatgccctccatctaccagacacaggacattttcaggcgctgttccctcctagatcaaaccaggcctacctgttcatctctattttgtacaattttacgttgaattnnnnnnnnnnccatccntccataacctatccacctacccttcctcatnnnnnnnnnnnnnnnnnnnnnnnnnnnnnnnnnnnnnnnnnnnnnnnnnnnntttattccctttgggcgcgccgctcttaaaaaaacctccccaggggggccccacatttacccccaaccctcctttttttggaaaaaagggggccccacaaaaggggggtgcttattaataaaaccgaggccccgggtgcgcgcgtttttacaaactgccgggggacgtgaagaaaaccggcctacattttgggaggacttttttggaagagaaaacacccanactattnnnnnnnnnnnaggcaccanngtggggggaaaaatcctcctcccgaaaagatattttacgagctccttcgagggggaataaatacaaactattctttatggcgcgccaaaagggtgtactccacaaccccacgtaaaaaccgatttgcgccgccgtcagacacaatcctattt

SEQ ID NO: 349222 - DNA, 731 bp, Homo Sapiens
  misc_feature (383)..(460): n is a, c, g, or t
cggtcacacccccgacccgcgccccgaccgccgcacgccccgcacgtctcgtctcccaaagacgggccggaaagaataaatacctaattcttcaatggccagacatcaataaacgtccacaagcatcaaaaccatccaggaaatcatgacttcaccaaatgaactaaataaggcaccagggaccaatcctggagaggcagagacatgtgacctttcagacagagaatttagaatagctgttttgaggaaactcagtgaaaatcaagataacacagagaaggaattcagaattatatcagataaatttaacaaagagatttaaataattaaaaagaatcaaacagaaattctggaagtgaaaaatgcaattgatgtactgaagnnnnnnnnnnnnnnnnnnnnnnnnnnnnnnnnnnnnnnnnnnnnnnnnnnnnnnnnnnnnnnnnnnnnnnnnnnnnnnaatacacagaggagacaaaagataagagttattggccccaatgaggaggtagagagatagaggtagaaagtttattcaaagggataataacagaacttcccaaagctagagaaagatatcaatattcaagtacaggaaggttatagaacacaaagaagggtaaacccaaataataatcaaactcccaaaaattaatgacatttaataatcaaactcccaaaagtcaagagtaaagaaaggatcctgcatgagaaatgcatcatacgtgcct

SEQ ID NO: 349223 - DNA, 1392 bp, Homo Sapiens
  misc_feature (976)..(976): n is a, c, g, or t
  misc_feature (1269)..(1269): n is a, c, g, or t
  misc_feature (1293)..(1301): n is a, c, g, or t
ctgaatatgtattagctatgtttactcttttatatctaattcaaattgaagactctacgtaggtgaacttttttttctaacttcagtgtacaagattattttgggtgggtggggggagcaatagttaccttggtgaaatatttgagatcttttgtggtatttgggggatctgttgtgtgttagagtgtatttcaaccctcctgtattattgtggcagaaaaactgtgctgttaacgtagttggcaacaagatgcctttggaaacttaatagtaggtcaatgtgtttatggaatattctgaactcctaggaaattttgttctatattttaaagcattatttggttttcattagtggaaaacataattagctcaggcttatcaggaactcagatgagtcatattttttcttggatacacctgagacattaaactcaattttttaaaactaacacaccattctttagtgcagtgaaattcaaaagttataaattggcatggagcaagttttttctttgatttctatgaacgtttcagttattggattaaactactttagaccttagcccattcggatctacatacaccagttccattactgtgtttgcatggatgtctgtaatatacacacacatatacatttgaaaatgatagaggaacaaagagttatcattggaacataaactataaaaaaagattccagcactcatgcttgaatttcctcagtgggttgtatgtttgtccatacatacatgtataaaataaacaattgcaaacatgtcagtgaaacctcatatgacgcttttatagtgacatgcatgtttaatgtatgagaaaaatatttaccaatgtattgtcctttgagtcctaaaatataaatactatacatgccagaaactattctaatgtgacttttaatgtgcctattaaaaatgaggttcactgtccattcatgctgtgatgcgatttcaccttatangtaccatgtatatggggtacagaaaataaaccctcatattcctgcttttaagttaccagcccaagttttcaccaaatcacaacttatcatcaccaccaaaattttaaaaaaccagtagttgactactaaaaagtaatcagtggacaggtcattaatgggatcagtaagcacagtagtgtgattatatctgggaaaacatctacagttgtacagctgtatcctcctcaaaatccggtgaagaatgctatttttctaggctgagcttttgttataaacttaatattcagaaggcnagggttatgatcctgatgtgtccnnnnnnnnngcatttgttaattctgaatgtatttttaacagaatgatttttttgacttactagtgtaatttgcattttaaaaataaatggaaaaatactt

SEQ ID NO: 349224 - DNA, 1170 bp, Homo Sapiens
  misc_feature (368)..(376): n is a, c, g, or t
gtatagagagctgctgaatgtctgggtttaagtcaaccaagatgtgtgtattcatttccccctccaattacaaccacctaaagaactccattttctccttcctttccatttatctaaatcttccacatcactcaaggttcatctcatattttcctgttttataactttcttccctaagtaagtcagttttgccaacttgatggcaaactcccctgaactcatcttttgcttggttttgtttttgatcttatcctctactgactctatctgttacttatctttgcaaacatttctataacttttcctaactagatttaaactctttagaagcagtgattttatctgatagaatctagctttcttgattnnnnnnnnntgatcgattggttagtgtcaaagtggacccaatgtggtacctactgattattttacccctttggaatagcctctgactactttaattttaaaagtactggtaattctgtaggtcacttctcaagatccaaccctatgtgtggctaaaaatcattctccttgtaggattcattttgtttcttaaaatattaacacatttgtgcaatttgggattttgaaacaagtgcattaataagcatatccatactaggaaaaaaatgaatgtcacatgaatttaagtacaaacagaggaatacacatgaggaagggaaagttcttggctcatgaaaatctagatgtcattattgagtttttctgtttcttgaaaagattgtctcttgttctgagagttctagtggcagaagctgcacacatttgggggtgtttcttagcagaggaggtgtcttcaggtgatcactttctttgtttcaacttcatagttggcttgagagtccagtcaatatagcagtctcattcagtctttgtccttgcactggggagacattcctgaggaggggtactataggaccagctctgtgggttcttctcaggcacaatcctccgttgagctcagaggctctccttgttctctcccttcccttttccttttcctctcagaaaagctagtctgtcatcatcacacctagcttctctctcgctcgctcaacctctctccttttctcttttaccattaaaatataataataataatggccctttcgacatagcagcatgaagtggctgcctttgagaagc

SEQ ID NO: 349225 - DNA, 923 bp, Homo Sapiens
  misc_feature (656)..(656): n is a, c, g, or t
ctgaagcctaggggagccagtaaagattaaatgtgcttctcaaaggcagccacttcatgctgctatgtcgaaagggccattattattattatattttaatggtaaaagagaaaaggagagaggttgagcgagcgagagagaagctaggtgtgatgatgacagactagcttttctgagaggaaaaggaaaagggaagggagagaaaaaggagagcctctgagctcaacggaggattgtgcctgagaagaacccacagagtggatgctgtggggcaccacctccttgaggaccaaggcactccagctgccaggaatttggctgctaacctcacacagctgagccttccatgaaaattgctctctgccaaagagaacttcctagtccaaggtcatgtctactctccagagatgtgactggagtgatttgcacccggatgcctagactcgccatctgctcaaagactgctcagaaagccctcccatgcattcccctgctgcataccagcccactctgcctgcagctgctgtctgcaggacttcatatctatgccacactgtgtaaaagctgtgcttcaagaaatcacaaaaacattttcctgcacctactacacagcctgagtgcggcataagttgaccttgcttgctaagaaatggggncaagaaatgccttttttgtgtgtgtcatgtcctgtttgtttttcaattaagagaggaaagcattaggcagatggaatgtacatgtgaggatgaggagacagaaaacaagtagccctttccatcaagatagagggttttctggggttgctggctattgaatgtcactcctgatttctctttccaaggcactgtaccaccagcctactgagattgtgtgggagctttcatgggggttgtatttcactgatgaaaataaattttttgcat

SEQ ID NO: 349226 - DNA, 425 bp, Homo Sapiens
acagtaagctgtaatggaactttagatcctatagctgttcttcaccttgttagaaactgcaaaatcctttaaaattgagtgcaaactctcaaacattttaccacataagtcattacagaaagactcctgtgtgtccccagtaaactaaaacgaacaataaaagcactggctggaagaagttacataagaagtagtgatgttttgatgctcccttgtagacagcaactagccaggcaaatggccaggaatacaatgctatttatttgtttcactccaagacttatctgcaagggtgagttaagatgtctttcgcaagctattgactaagggggaagagattttgtttgggaatgaatagagttgttggttttttcctggtatgatagtcaaaaaaataatggaacacagagagcctacaagagatc

SEQ ID NO: 349227 - DNA, 1317 bp, Homo Sapiens
  misc_feature (7)..(7): n is a, c, g, or t
  misc_feature (15)..(15): n is a, c, g, or t
  misc_feature (45)..(45): n is a, c, g, or t
agattcntggcctcnagttcatggcagagaccatcctgtgtggcnctccagtacaggtgtcctctgatggagagaggggcacctgcctgtccttagccagagagggcttccaggtggaagactggagagagaaatggaaagaagggtaataaaaatgggaaaatgaagagaaaaggtagatgacagaagaagggaaatcaattctacttggaatccagagtgttcctgaaagtgcaaattggaatgtccccatagcaaagatgccagtgagtgtgcaacttgatggatgagatgtccccaaggacaaatccctgggcaaccaggctctcctccacccctgccaagatgtgacatcactcagaagggatttcgtagctcttcaaggaattgccctgctagtcttcgatgtagccagttgtagcagatgatcaaggcaaccaagggtccaagaaccggcacaattacaaacagggttatcttccagcagggcaccctcagaaagtggggatcaaaagtccggtggagattctctatctctgctcgaagttttcctctcagtctgtactgcaggcagaggaagacgaggccaacagtgatctgcaggaggagcacaggcagcaccgcgaggagaaccagcactccagggctcacccagtagaaaggatcttctactttcaattccattgctgcctcctcttggtaagaatgatctcggaagaagcaggtgaaacctccttcatctgagaaccttacattccggatcctgagagtcacctttccctcaccaatagcatctttcagcagctctgtccggccccgatattcaggtgcctggtctccatcttggtccttgccatttctgtagagatgaaccaccctagagaagggggggcggtaccaccccacctccatgcctgtagcgttcttcccaggagatatgcgacatggcaattccacttcatccccgaccagagcccggatagggtgtcttggtcctatcactctgaactgccctgcatagctggaagacacttggaggaggaggaggaggaggaaggagcagaggcagctgggcagagagggtctcgataagcttgccatctctactgttcctggggacagagagcccccgcagcaaggtcaggccaagtggaggcccttggggtgcatgtccccttactgctgaaaagcccaagggaagatcttggagggcagtgctgcctgggccctgcctccactccggtaattgctgcagctgtgcccgcagaaacagccccacgtcacccttgccaggcactcacacaaaaggactccgct

SEQ ID NO: 349228 - DNA, 1476 bp, Homo Sapiens
cagcggcgagcaacgcagatggtcgagatcctctactccagctaaaaccttgcaccgagtccggcctccccagtgggccttctcgccacagggggactgcgcagagactcccccgttgcccctttcggggcccggagaaaaccccggttgaagcgcggttcggacccggcccgtattgcaaaacgcaacctgaaataccggcattccttgagggctacgaacttccttcctccggtaaagcagaggaattaaaagcccagtaagggagacagaagcaaccagagaagagcggctattgaggatcacatccagaggaaggagggagctggagagcctggtggaaggggaagactcctcctgggaggtagagggcaaagaagccagctgttagagacacatttacaggtggcagagaagctggaggcactcctatctgccacctgatccattcctccttcactgcccctaagcaggaatccaaccctagctggtctcattgcccattccacagcaactgcccagtgcctcacctctcagatcaaccattgaggcaggaatggagacaagatgaccccaagggcttttcttctccctagttcaatggttttatgatacaaactactgacatacgtttttcaagttattttctccttcttctaggaaatcccttctgagtgatgtcacatcttggcaggggtggaggagagcctggttgcccagggatttgtccttggggacatctcatccatcaagttgcacactcactggcatctttgctatggggacattccaatttgcactttcaggaacactctgaattccaagtagaattgatttcccttcttctgtcatctaccttttctcttcattttcccatttttattacccttctttccatttctctctccagtcttccacctggaagccctctctggctaaggacaggcaggtgcccctctctccatcagaggacacctgtactggagagcaacacaggatggtctctgccatgaactggaggccaggaatctcctcactgaaaattacagtatggtaactttgcaaatggtggttgtttcttccaagactccagccctgattgcgcaaaactgaaaggcatgtgaagggaaggaagaggaagagtgcaaaacattgaagagagagctgagtgagctgaagagtgaggatatgagtagccccaacccaaacctggagatggggagaaacctacagaatactagccagagctcctccttgtcttggcagcctactagggacctggggaagcaaaaacgaaagctgggcaacatgcctgctttagaatgttttccttctacttacacatcttccacaggtctcagaatctttccttcctctcatccttttctcctatcttcatatctatcagagtatccactgtttattcaacaactactacttgatggtcagacacaaacaaacaagctaggtgctaat

SEQ ID NO: 349229 - DNA, 1605 bp, Homo Sapiens
  misc_feature (16)..(16): n is a, c, g, or t
  misc_feature (48)..(48): n is a, c, g, or t
  misc_feature (90)..(90): n is a, c, g, or t
  misc_feature (130)..(130): n is a, c, g, or t
ctgtcttcactagagntggagaacactagggcatagtatttcttactntgaacccttcaataaaagactcaataaagctttattagcaancttagcaaactatctcaacagctttctcctctccagagtnaaacaatctttattccttgaactttttctcagaagtcttattttctaatctacattttcttcctttttatttctgctctacctcttcctgagttctcacatgattctgatacaacatcctagcaggaactgaatccgtaaaagggatactttttctcacctcctaaaccttggcctcattttagtgatcacaataaaggaaaatggtaggtgcatactcatcataacaacaaataaacacaagtaaacaggtgggacacagtttattccctactgttatggtgttacatttgcccttcacgagaagcatttcccgtgtctctttatattgtttgcttatttctactgtttatttccaatgtatgctttgatcttgccctactaattctctccttttctccaaagctttagaaaattccagttttgactttcatgctcaatgagaatgcaatcattttcacaatattgttcaaaaagaaaaagataaacattgtagtgcccgaggctgagacctcctagccagcacttctgtctctcctgaccagcttgggctatcactgaatttatcctgttaggcaaatgtgcacctactacatcaagttcatgttaagtatcatgctcagacagactcatgacaggctagaataaaataattccctcaatcgatacacttcaggaacatttgtaaaattttgttaacttgagagaagaacacttcaataacttttcaccttaagatgacttaaatgttgcattatattaaagcactcaaataaaactgttttcttcataatagaatgacagtcatgacatggctttagtaactatgaatgagccgttgattcattttagcttcatttttgtttatcagtcactgaaacacagaactaaaccaaatatacctgtttttcatatatacaacattataccactttgcagaatatatgccatttcctaaattacaatctacattcttaaaagcatataaaacaaaagatgttttacacattttaaaaataaaacaaaaattctacacatatcttctccagtgcaaagcctttgaaaacaaactcattgagaaaaatggtgctctacatttagctagctgtctattatctacagtcatacagtcatataagatccaacaataagaaagtaaggaaggaacaaattaacaatagtggcaatacaatagttggacaattaggtttggattatatgagctcaaccaaatgttagctgacagctgcaacaaacgaaaccatgatttaaggaacattctaatcagttcaaactttatattattattttatatgaaataaattctctaattacagtgctatctcccataagcaatttgtttaggtcttgttattgttatctcctaactataccccatatgtattctgagaactatgtaggacaagatacattttaagaagattaaacacagcatttctttttctctctctctct

SEQ ID NO: 349230 - DNA, 975 bp, Homo Sapiens
  misc_feature (897)..(933): n is a, c, g, or t
caccagttcaggtcccacacaggcttgtctgtatgtgctgtaggtgtattgtctatctcttatcatgtgaggtgctcgagagagaatggcatgtcgtaaaattgtgccagctctgaggatcttctctgaagggaccttggtaatggtgttagcaggacgaagaggaacgtgaggttcaatgagaggtgtgttctccttgtcaggaatcctgtcattgttagagcccgtttccataacaccataaggaggagccagaagtcctgccatatactgtcgatatttctcccatagtgccttgaagtccttctgctcgatgcggagcagttcactgctctccctggtaacgatggttgcatggcggggtgtgttgtccagaatggactctccaaaggccgtcccaattcccagggtacagatggtcacagcatcctggtgactgctggtctcagatactttaacatccaaagaccctgccaggacagcataccagtttgttccaatatcaccctggcgaaataatgttattcccttttccagattctcataataaccacataagcaaatctgatgaaggagatttgggtgaaatttctcaaaagctttaacttctttcagtcgagtgaagattatatccacatcttcgctggatcgctccagtggtcttttatccaggcaggcgatccactcggcagaggaggaagaatgggcagcgtgcgcagcgaccatgttgagcggcggcgcgcggtgtccctggctgcggcgacctcccgcgctcgctctgcctgcgcctccgcccccgcctcgtccgccgcgcggaccccgctcctcccggacgcctggcgaccagcgcggctgcccgctctcgacgaattcgagctcggccgatttggcctgatnnnnnnnnnnnnnnnnnnnnnnnnnnnnnnnnnnnnncgccgccaccgcggtaaaatccgaggcgccctatagtgagta

SEQ ID NO: 349231 - DNA, 1224 bp, Homo Sapiens
  misc_feature (40)..(40): n is a, c, g, or t
  misc_feature (145)..(153): n is a, c, g, or t
  misc_feature (288)..(288): n is a, c, g, or t
aatcctaagagtggccctctaaaccacaagcgggaccggnctctggcaactccaggctctctcctgagatgaagagacccaagagacctttgggttttaacacataaaggagcctggaaaggtttaaaaagagtcccctcgcttnnnnnnnnncccaaaagggttggccattgaaacttttgcggccacgggtaacattaaggccaaagggtgtgggggtcgcgcccacccccaataaatttccaaaggcggcaaagggcccttccaccaatggctcttcctctggangggcttctgcttgaaagggatgtgcagtcaaaagaaagtcagcccctctgagcatggtgggacccaggccattccggtcccccctgccagtaaggggtaccaatggcttcgttcaggcaattccatgcccaaggcctgggtgactgccagtgtccccatatacagtgcctcgtacttctgaccagctggcttaccgcatccagcagctccactttccgtgcaaggtcttcaggagagatggggtctgggaagcagcaagaggcatcaccactgacctctactcgctctgacaagatctgggcacaaagcccatgtagggcactggcaatggccttggcagggacatcacagcgaaacacatggcacttgagcatacagctatctttgtcacttgccacaaaatgcgaagtccctgtcacggcccttggagctccccacgccccacacacggatgtgcaccagaggctggcagtggatcagactgtggtccaggggattcactaggctcatggcatccttcttcaggatcatcagcatgttctggccctcaccccaggcaccatctggaggctggctccggctgcgggtctgggccagctgctggatacagttattgactgcaatactgctcttccccggtgccaggtcctcttcaggtacctctacccagcccagagagcggactgcaaagcacgtgcctgggtcctctgcatctcactagttcccaggttgggcgctgccactgggtgctaccgctgggtacatgccagtagtaagtacctgcagcatcgtggatcttcctccagccaggaggcaggccagcctccacctccagactgtggtccccccacaagtcatcatcgcagttgaccagaatgatggccagcatgtaatccttgcccagcataaccccggctgctccccgccagcctctgc

SEQ ID NO: 349232 - DNA, 1256 bp, Homo Sapiens
agcggtttcgctggcgttcgtgggcctcccccggacccacacagcggaaacacgcaaccattcggggatccatgacgcccgtttacacgcaccatcccctgggcgggctgtgcggctcaggccctcccccgggacctggcccgtgtcccgccccgtgtcccgccccgtatttgtgcggcgccagctggccccagcagacctgcggcgcaggagaggctgggcttgcaggcgcagtatgctccaaaggtcgcgctgggctgagagtgcgggcctggcagaggctggcggggagcagccggggttatgctgggcaaggattacatgctggccatcattctggtcaactgcgatgatgacttgtggggggaccacagtctggaggtggaggctggcctgcctcctggctggaggaagatccacgatgctgcaggtacttactactggcatgtacccagcggtagcacccagtggcagcgcccaacctgggaactaggagatgcagaggacccaggcacgggaacggaggggatctggggactgcggcccaccaaagggagatccttctccagcctggagagttcactggaccggagtaactctctgtcctggtatggtggggaatcctacatccagagcatggagccagggctaagtgctttgcagtccgctctctgggctgggtagaggtacctgaagaggacctggcaccggggaagacgcagtattgcagtcaataactgtatccagcagctggcccagacccgcagccggagccagcctccagatggtgcctggggtgagggccagaacatgctgatgatcctgaagaaggatgccatgagcctagtgaatcccctggaccacagtctgatccactgccagcctctggtgcacatccgtgtgtggggcgtggggagctccaagggccgggacttcgcttttgtggcaagtgacaaagatagctgtatgctcaagtgccatgtgtatcgctgtgatgtccctgccaagggccattgccagtgccctacattgggctttgtgcccagatcttgtcagagcgagtagaggtcagtggtgatgcctcttgcttgctcccagaacgcatctctcctgaagacctgcaacggcaagtggagctgctggatgcgggtaagccaagctgctcacgaagttcgagggcctggatattgggggcactgccgtcaccaaggcctggacctggatgtgctgaacgaggccctgggacccccatgcag

SEQ ID NO: 349233 - DNA, 671 bp, Homo Sapiens
aggttgggcccagctcagcagggacagtttggggagagtccgagaggctgggctgattcccttctgtgctcccacatgcttccggaacagtgacaggtgagtgaaaaccaggtatcctgagccccatccctgatgtccctactccatccctgctatatccctagcctgactttccagcctcctgcaggctcctgcctctaaccagcttctaccccagccccatctctgcccctgctagggacttcgcttttgtggcaagtgacaaagatagctgtatgctcaagtgccatgtgtttcgctgtgatgtccctgccaaggccattgccagtgccctacatgggctttgtgcccagatcttgtcagagcgagtagaggtcagtggtgatgcctcttgctgctccccagaccccatctctcctgaagacctgccacggcaagtggagctgctggatgcggtaagccaagctgctcagaagtacgaggcactgtatatggggacactgccagtcaccaaggccatgggcatggatgtgctgaacgaggccattggtaccctcaccgccaggggggaccggaatgcctgggtccccaccatgctcagtgtgtctgactctctcatgactgcacatcccattcaggcagaggccagtacagaggaggagccattttgg

SEQ ID NO: 349234 - DNA, 717 bp, Homo Sapiens
tggggacctgcgcccgcgccaccatcttcggctgaagaggcaattgcttttggatcgttccatttacaatggcgcagagaactggactcgaggatccagagaggtatctctttgtggacagggctgtcatctacaaccctgccactcaagctgattggacagctaaaaagctagtgtggattccatcagaacgccatggttttgaggcagctagtatcaaagaagaacggggagatgaagttatggtggagttggcagagaatggaaagaaagcaatggtcaacaaagatgatattcagaagatgaacccacctaagttttccaaggtggaggatatggcagaattgacatgcttgaatgaagcttccgttttacataatctgaaggatcgctactattcaggactaatctatacttattctggactcttctgtgtagttataaacccttacaagaatcttccaatttactctgagaatattattgaaatgtacagagggaagaagcgtcatgagatgcctccacacatctatgctatatctgaatctgcttacagatgcatgcttcaagatcgtgaggaccagtcaattctttgcacgggtgagtcaggtgctgggaagacagaaaatacaaagaaagttattcagtaccttgcccatgttgcttcttcacataaaggaagaaaggaccataatattcctcaggaatcgcctaaac

SEQ ID NO: 349235 - DNA, 516 bp, Homo Sapiens
  misc_feature (470)..(470): n is a, c, g, or t
  misc_feature (496)..(496): n is a, c, g, or t
gttattcagtaccttgcccatgttgcttcttcacataaaggaagaaaggaccataatattcctcaggaatcgcctaaaccagtgaacaccagggggaaccttgaacggcagcttttgcaagcaaatccaattctggaatcatttggaaatgcgaagactgtgaaaaatgataactcatctcgttttggcaaatttattcggatcaactttgatgtaactggctatatcgttggggccaacattgaaacataccttctggaaaagtctcgtgctgttcgtcaagcaaaagatgaacgtacttttcatatcttttaccagttgttatctgggagcaggagaacacctaaagtctgatttgcttcttgaagggtttaataactacaggtttctctccaatggctatattcctattccgggacagccaagacaaaggtaatttccggggggaccctggggaggcaatgcacatnatggggctttcttcccctggaggagnttctgtccaatgctttaaag

SEQ ID NO: 349236 - DNA, 352 bp, Homo Sapiens
  misc_feature (218)..(218): n is a, c, g, or t
attcttggccaaccaagtgcccccatcattaagtggttcctttccaataccaccaaaaagtagaagcctttagagacagggagaaccaggcttcccaattcttgctttatagtctcggggcatgttattcaaactctctgcactttagtttcctaatctcccaacatggggataataccatcttaatacctggcattgaaatgtattcaataaaaaancaaccattaacttaaatatcatctatgaataacagggatggaatgttaccagcctcatgtttttggccccctatgacccacagtgtactagtgagcaggatggtcagctgaggctagcataaaagggggtcgag

SEQ ID NO: 349237 - DNA, 682 bp, Homo Sapiens
cttctcccaaaactcaaccctcattatacatcagaaaattcatactggtgagagacagtatgcatgcagtgaatgtgggaaagcctttacccagaagtcaacactcagcttgcaccagagaatccactcagggcagaagtcctatgtgtgtatcgaatgcgggcaggccttcatccagaaggcacacctgattgtccatcaaagaagccacacaggagaaaaaccttatcagtgccacaactgtgggaaatccttcatttccaagtcacagcttgatatacatcatcgaattcatacaggggagaaaccttatgaatgcagtgactgtggaaaaaccttcacccaaaagtcacacctgaatatacaccagaaaattcatactggagaaagacaccatgtatgcagtgaatgcgggaaagccttcaaccagaagtcaatactcagcatgcatcagaaaattcacaccggagagaagccttacaaatgcagtgaatggtgggaaagccttcacttctaagtctcaattcaaagagcatcagcgaattcacacgggtgagaaaccctatgtggtgcactgaatgtgggaaggccttcaacggcagggtcaaaatttccataaacattcaaataactcacacttagagagaggccttttgctgttacaaatgtgggaaggctttgt

SEQ ID NO: 349238 - DNA, 733 bp, Homo Sapiens
  misc_feature (278)..(355): n is a, c, g, or t
  misc_feature (591)..(624): n is a, c, g, or t
gggatctcaaatgtgggaaggattgttatataagacaaccaaatgatgacatgagacaataaatgctataggaattatggaggaataattagctatttattttctggggttagggaagagatattattagttgtagaagtaaattactaacttctacattttttattgtggaaatcaaaaatatatatatgaaaataaaatgttataattgacttcagtgtcccataaaccagcttcaacaattaccaaattgtgaccaatcgtttacacacatgcannnnnnnnnnnnnnnnnnnnnnnnnnnnnnnnnnnnnnnnnnnnnnnnnnnnnnnnnnnnnnnnnnnnnnnnnnnnnntgatataaaatggtggactatttgcatataacctgtgtacatcccgtattatttaaatcatccctagatcacttataatacgtaatacaatgtaaatgccatgtaaataactgttatactgtattaaggaataacaacaagaaaaatgtacatgttcagtacagacgcaattttttttgtgtgtggaatattttcattccaaggtcagttgaacccatggacataggaagctgacnnnnnnnnnnnnnnnnnnnnnnnnnnnnnnnnnncatacagacacacatattttctgaaatgtaaatattctctttttaaaaaaattatttatcacagctaaacaaattacccagtaattcttttatccctcatataaccggg

SEQ ID NO: 349239 - DNA, 780 bp, Homo Sapiens
  misc_feature (137)..(177): n is a, c, g, or t
gtaaataactgttatactgtattaaggaataacaacaagaaaaatgtacatgttcagtacagacgcaattttttttgtgtgtggaatattttcattccaaggtcagttgaacccatggacataggaggctgactgcnnnnnnnnnnnnnnnnnnnnnnnnnnnnnnnnnnnnnnnnncatacagacacacatatttctgaaatgtaaatattctctttttaaaaaaattattatcacagctaaacaaattaccagtaattcttttatcctcatatacccggtgttcagattttctagattggctcctaatttttttacagattatttgaatctgattcaattcatgtactgtaatgtttgataacttaagtaccctttataggttctcttttacctcttctttattaaattccttgtaatttgttgtactaaatagattgtcttctagaatttcctgtagtctgaattatgtagtattgtttcacatgttccagtgtcctcttatttcctgtgagttggtagttagatctagaagcttgattaaattcagattttctctctttagatcatcaactttagatcatcaacttggatcatttgtttcattttgcttttgatatgttgttttttagaattacctcttaaaattttgatttaattttataatcatgtaaaatgtttataaatttccaaattcagatcagcaaaacacaataaaatctattcagagaaggcaaaccttctgtccagtcgccatcctgttcctgcccacagatcctt

SEQ ID NO: 349240 - DNA, 643 bp, Homo Sapiens
  misc_feature (55)..(340): n is a, c, g, or t
aaagtctgtttccatggcctatagacttggagtaccttaaaatgttacctatggnnnnnnnnnnnnnnnnnnnnnnnnnnnnnnnnnnnnnnnnnnnnnnnnnnnnnnnnnnnnnnnnnnnnnnnnnnnnnnnnnnnnnnnnnnnnnnnnnnnnnnnnnnnnnnnnnnnnnnnnnnnnnnnnnnnnnnnnnnnnnnnnnnnnnnnnnnnnnnnnnnnnnnnnnnnnnnnnnnnnnnnnnnnnnnnnnnnnnnnnnnnnnnnnnnnnnnnnnnnnnnnnnnnnnnnnnnnnnnnnnnnnnnnnnnnnnnnnnnnnnnnnnnnnnnnnnnnnnnnnnnnnnntagacaaatgcataaataactaaaaattacctatggaatgaaatatttctgatcaccaccgatacttttttttgttaaagagctgaaaggtacttggaagacagatgatgccactgactcatttaaccaacaaaagctggtggcaatggaaaaggcgcggtctgtccacggtcacgtggccagtgggacccagccccgcccactgcaagctcagaggtctttcctacaggccctcacggggatcagggccaggggttacacctaagccaggcagtggtgcctttgggaagaacacatctttta

SEQ ID NO: 349241 - DNA, 741 bp, Homo Sapiens
  misc_feature (21)..(21): n is a, c, g, or t
  misc_feature (338)..(338): n is a, c, g, or t
  misc_feature (407)..(407): n is a, c, g, or t
  misc_feature (473)..(473): n is a, c, g, or t
aaaaccagagcacagcaaaanaaaagcagaggtactggatttatgtcataagcagagatactggatttatgtcatccgaaagctacattaattaggaaaaagaacagtttgaaacgcccagtttgtactcattaaaaatgaatgaggtgacagcgttacttcaaacatttcttagggcattttccaaaagaacccagggtcgccctgggtgaaactgtgcctccaaacgttaacaagtgctctgctggtttagaataccgtgcttaccaaggaaccataaatttggaaagggtaaattctccactctaaacctgcttgtgtcatttaagaaaagacantttttctaaatgcagtattgtatacaaagcttggacctcttaaacttggaccaagaaaccaaattaagnccttcaagcatgtggtgtgtgtttttatatatatataaaaaatccctcccctacaatgaaaaccanccaaacaaacagaaaacccaaaagtgtatacctgctttctgatttcacagcaaatcagaaattgcataggatatactttgtgcaaggcaaaaagccttttaagtatctagaatagaactcctaatcttgctcacagttctggcatatcagatatcatcaaatttgtgttttaagtagtctttcatgaccttggcaattggtagttcatcaagtagctttaggttttgaaggcctatacattgtcgaattttaattcggcacaggtcct

SEQ ID NO: 349242 - DNA, 573 bp, Homo Sapiens
cctggaaaactcattgcaaaaagattataacctaggcacatattcatcaagctatataaagtcaagatgaaaggaagaatcttaagagctgtgagacaaaagtatcaggtagcctataaaggaaaaacccatcagatgaacagcagatttctcaacagaaaccttacaagtcattagggatcggggtcccatattcaccctcctgaaataaaataattgtcagccaaggattttgtattcagtgaaactaagtttaataaatgaaggagagataaagccttttttcagacaaacaaatgctgagagaatttgccaatactaagccagcactacaagaaatgctaaaaagagttctaaatcttgaaacaaaacctcaaaatataccaaaatagaaactccttaaagcatacatttcacagggcctataaaacaatgaaaaacaaacaaggtattcaggcaacaactagcatgaagaataaaatagtacctcacatctcaataataaaatgaatataaatggcctaaatgctcctcttaaaagatgcagaatgggctgggtgtggtggctcacac

SEQ ID NO: 349243 - DNA, 1213 bp, Homo Sapiens
  misc_feature (13)..(13): n is a, c, g, or t
  misc_feature (146)..(165): n is a, c, g, or t
caagaacgagganctgggccatattatgttccttttaatattacaagtacaagagcgcttgctgacttcgaggataactaagattacatactttctcaggagaaggctgcatgcaagacttctctgtcagggttgctcctgtggcnnnnnnnnnnnnnnnnnnnnaaacctatatatggaaaaggaaatttcaatgccagatttgataaaagaatgtgatgtatatgtagctgatgacccactggggaacaccagtgttccagttcacttaccacatctgtgacagtgtgtttagattggaataaatgtgatgcattacttcttatgtttttatcagtgacatggttgactgtgccctaattctcttgagttgcagttaagcaatgaaggttatttcctaatagggaagcaaaaggtgattgtcaattgatagtttaatgtttgaccacattagtgtctttatatgaaatagtagaggggaagaaattatagaaaacaaatgtgaaaaaaatacaccagtgggtatctgttctactaaaaccagaagattgttatgagtacttaaacctcactgtgaaataatgatatattttgcaattaatccctccccaactgagtgtcttactgtgttattaaatcttatcttttagttaatagttgcagtatttcttttaaatgtttttgttttaaacttaggggtaggatcctttatttgttcagttgtttccaactatttgggatactttcattccctgctatttatgaagtacatgtttatcactaagtgtagtggtttggtttacattaataattttatgtgtggtctaaaaatgcagtcactaagagaatgtacactgtggttatggtcacagtggttatggatttattggcagtggagtaccatggaggtcactgcaatggtgctaaggctgacagtggaatcttctgcttagggccttaagcccctgagggtcctggtgactcagggaatccatcacagccccgggtctttcaccccagttcactccttttatgtttggcctagattgacccatgcctgccctcttctcaacagctgagtagggaaccagccatctgaatgagctgatcgttgtttatgttcaaatgagtaaatgtccagaccacttaaaactacagctgcttttctggcatctcgtctgcggggccaaaacttaataaaacacgacagcag

SEQ ID NO: 349244 - DNA, 851 bp, Homo Sapiens
  misc_feature (38)..(38): n is a, c, g, or t
tggttttcaaataaatataaatatgatatatatagganctaatatagtaatgcaccatgtaacaaagcctagttcagtccatggcttttaattctcttaacactatagataaggattgtgttacagttgctagtagcggctgccattgggcagccgagtcactgcaatggtgctaaggctgacagtggaatcttctgtttagggccttaagcccctgagggtcctggtgactcagggaatccatcacagccccgggtctttcaccccagttcactccttttatgtttggcctagattgacccatgcctgccctcttctcaacagctgagtagggaaccagccatctgaatgagctgatcgttgtttatgttcaaatgagtaaatgtccagaccacttaaaactacagctgcttttctggcagtctcgtctgcggggccaaaacttaataaaccacaggaaatagactgtcattcttagtttggctgcccagggcttattttagattgagagcatactggtacatgagagcagtagtgttgtttgctcttattttcaaccagggagctatctggcaccttttgtgctcctggcttttttcaatcatagcactattgcatctcctagctatttcttttgcccagcagggtaatattgagtcccattgcaagtatggacaaggcctctggttctcctcaccacccaccttttcagccatagaacatcactgaaaatgcctaatgcctggatctgtgttctactttagtttcactgggaagtctttcagtgggagatgaataaatgttatacattgttatgtccagttatgtcaataaacccactaatagagatt

SEQ ID NO: 349245 - DNA, 1678 bp, Homo Sapiens
  misc_feature (141)..(141): n is a, c, g, or t
  misc_feature (233)..(233): n is a, c, g, or t
  misc_feature (876)..(912): n is a, c, g, or t
  misc_feature (1047)..(1058): n is a, c, g, or t
ccttaagctgcatttgttactgaaatgattaatgcactgatgggtcctgaattcaccttgagaaagacccaaaggccagtcagggggtggggggaactcagctaaatagacctagttactgccctgctaggccatgctgtnactgtgagcccctcctcactctctaccaaccctaaaaccctgaggacaggggaggaacccacagcttccttctcctgccagctgcagatggntttgccttgcctttccaccccctaattgtcaaccacaaaaatgagaaattcctcttctagctcagccttgagtccattgccaaattttcagcacacctgccagcaacttgggggaataagcgaaggtttccctacaagagggaaagaaggcaaaaacggcacagctatctccaaacacatctgagttcatttcaaaagtgaccaagggaatctccgcacaaaagtgcagattgaggaattgtgatgggtcattcccaagaatcccccaaggggcatcccaaatccctgaggagtaacagctgcaaacctggtcagttctcagtgagagccagctcacttatagctttgctgctagaacctgttgtggctgcatttcctggtggccagtgacaactgtgtaaccagaatagctgcatggcgctgaccctttggccggaacttggtctcttggctccctccttggccacccaccacctctcgcacagcccctctgtttttacaccaataacaagaattaagggggaagccctggcagctatacgttttcaaccagactcctttgccgggacccagcccgccaccctgctcgcctccgtcaaacccccggccaatgcagtgagcaccatgtagctcccttgatttnnnnnnnnnnnnnnnnnnnnnnnnnnnnnnnnnnnnntacaacacacacacaaaaatacaacaaatattctaatgaatgtatctttctaaaggactgacgttcaatcaaatatctgaaaatactaaaggtcaaaaccttgtcagatgttaacttctaagttcggtttgggannnnnnnnnnnnaatagaaatcaagttgtttttgtttttaaggaaaagcgggtcattgcaaagggctgggtgtaattttatgtttcatttccttcattttaaagcaatacaaggttatggagcagatggttttgtgccgaatcatgaatactagtcaagtcacacactctggaaacttgcaactttttgtttgttttggttttcaaataaatataaatatgatatatataggaactaatatagtaatgcaccatgtaacaaagcctagttcagtccatggcttttaattctcttaacactatagataaggattgtgttacagttgctagtagcggcaggaagatgtcaggctcactttcctctgattcccgaaatggggggaacctctaaccataaaggaatggtagaacagtccattcctcggatcagagaaaaatgcagacatggtgtcacctggatttttttctgcccatgaatgttgccagtcagtacctgtcctccttgtttctctatttttggttatgaatgttggggttaccaccctgcatttaggggaaaattgtgttctgtgctttcctggtatcttgttccgaggtactctagttttgtctttcaaccaagaaaaatagaat

SEQ ID NO: 349246 - DNA, 1793 bp, Homo Sapiens
  misc_feature (58)..(58): n is a, c, g, or t
  misc_feature (67)..(67): n is a, c, g, or t
  misc_feature (69)..(111): n is a, c, g, or t
  misc_feature (173)..(203): n is a, c, g, or t
aacacacattgcgctttttatctccttcacagagctagtacccagggaaaaaaatccncctaataancnnnnnnnnnnnnnnnnnnnnnnnnnnnnnnnnnnnnnnnnnnntggccatgtgtttgtatcttcaagggaagatcagttcatgtctacagggctgaaaaaaggannnnnnnnnnnnnnnnnnnnnnnnnnnnnnnacactgttaataaggagaattctaaccaagagcaggatttatacacccttcagtagagcagtgataaggaaggtggggagcattgggagatgggggagggagttggaagtgttctcttttgcttctctccccctgaatttcttccctttaacctccctactccaagtaaatacttagggagcagaacttggccacagttcaccaggatgaacaatttccattctctggtgaagagcaaagacttagggaagtgggttcaaaagaggctcctggtagcttgggattgctgcagcgtgccatgaagctaggacttccatgggttttcttcacttgcaagaagcatatttgtactgtgcctggctttacatagggaggattgtgcagagtagaatgtggctgtagaagtagatccaggagcactgcccaaaaagaggtacttctgaaatgaccatgaaaacggggagttgtcccatggacaggtcattctcccacttagagagagcttcataagtaatctaagcacatcatatatccttacctacacaaagtgatgtgattgctgggaagtgatgaacaaaccctactcttcagtgactggaaactctgatgccttctgttctttcagacaataaaatcaaaggacaactttggatagatgctaacctgagcctctaggacagcttaggacaagaggatctgtgctcaatgcatctagaacatggcacaagaaaatatattccttattaattgcttgagaaatcatcctttctgcttacccttttctcagagaacctaactttcacatttgattttggccttcacaacaattcatactgtcttcaactctgtaacctcctaaattgtgtttatttttgttttattttcagcttgtcttctttaaatagaattgacttgtactttttgaaaacaatacttgttttctctccatctatttgctttatttcatagcctataattcaagctttgggaaacttatcccatgagaaattccttccaaaacaaaatgtattgtcttgcccatttcttacagttcagcctttgaacctgcctgggaccccatgcttaccgccatcagcacaagcaaagagtttccaaagacacacatttactgtaatgaggtacttggcccaggatgacagaaaactaatgtttcctttcttatgcacaatgtcctcatttgttacatgcataatacccagtctggctattttccttcctatgaaagattattagaatatagttccacatttaggttttataatataaacaaggaaacaaccccagctatgtcaatgtccttagtgtaatttgaatgtgtcccttctctacactgctataaagttttgatcagaaaaaaatttacagacccagtccagagtccctgtattctagcagttttgggtttagaaatgaagacggtagaatgatagttctgagaagtgatgagaatacagagaccaaactagagataacaaacagctgctgtttacaaacagtgctgggcacagcactaagtgaatattaaattcttattcagaataaaggttagagttgaaagagattttagag

SEQ ID NO: 349247 - DNA, 700 bp, Homo Sapiens
  misc_feature (128)..(223): n is a, c, g, or t
gggacagaacttggccacagttcacaggatgaacaatttccattctctggtgaagagcaaagacttagggaagtgggttcaaaagaggctcctggtagcttgggattgctgcagcgtgcctggctctnnnnnnnnnnnnnnnnnnnnnnnnnnnnnnnnnnnnnnnnnnnnnnnnnnnnnnnnnnnnnnnnnnnnnnnnnnnnnnnnnnnnnnnnnnnnnnnnggagcaccaccctccgggaaaaccatgtgttcatcagctatctggaagctctccaaatcccatcaattttgggggttttaatggaggtttcatgatgtaggtgcgattaactacatcactgggcactggtgaccaacttaaccttcagcccctcccagttcccgaggctggggggtggggcagaaagtcccaaccctattactatgctttggtctttctgtggaccagccccatcctgaagttaccagacaacaaacagtagcatataaaaagacacttaacctcttcgaagattccaaggattttaggagttgtatgccaggagatggcaattaagaccaaatgtatgtttcataatatcaagcatcttatcctccaacaaaatactcctttgcctgtcctgtagtttacctaggcttgggaacatctttcgatcatttctctattcattgtctcttaagctcatcctaagtcaga

SEQ ID NO: 349248 - DNA, 495 bp, Homo Sapiens
  misc_feature (26)..(26): n is a, c, g, or t
gcctggagaaaaccacccttccggcntaaccccttttcctcaggagaacccaaacttccacatttggaatttgggcccttcaacaaacaaatccaaaacggtccttcaaacccggtaacctccctaaaatggtgtttaattttggttttaattttccagcttgtccttcctttaaaatagaattgacttgtactttttgaaaacaatacttgttttctctccatctatttgctttatttcatagcctataattcaagctttgggaaacttatcccatgagaaattccttccaaaacaaaatgtattgtcttgcccatttcttacagttcagcctttgaacctgcctgggaccccatcttaccgccatcagcacaagcaaagagtttccaaagacacacatttactgtaatgaggtacttggcccaggatgacagaaaactaatgtttcctttcttatgcacaatgtcctcatttgttacatgcataatacccagt

SEQ ID NO: 349249 - DNA, 1574 bp, Homo Sapiens
  misc_feature (1228)..(1251): n is a, c, g, or t
  misc_feature (1517)..(1525): n is a, c, g, or t
cccgggatcccgcctccgtgctcggcctgctcctacagaagctgcgcgacgacggctgccaggcctactacctccaaggtggtttcaacaagtttcaaacagagtactctgagcactgcgagaccaacgtggacagctcttcctcgccgagcagctcgccacccacctcagtgctgggcctggggggcctgcgcatcagctctgactgctccgacggcgagtcggaccgagagctgcccagcagtgccaccgagtcagacggcagccctgtgccatccagccaaccagccttccctgtccagatcctgccctacctctacctcggctgcgccaaggactccaccaacctggacgtgctcggcaagtatggcatcaagtatatcctcaatgtcacacccaacctacccaacgccttcgagcacggcggcgagttcacctacaagcagatccccatctctgaccactggagccagaacctctcccagttcttccctgaggccatcagcttcattgacgaagcccgctccaagaagtgtggtgtcctggtgcactgcctggcaggcatcagccgctcagtgacggtcactgtggcctatctgatgcagaagatgaacctgtcactcaacgacgcctacgactttgtcaagaggaaaaagtccaacatctcgcccaacttcaacttcatggggcagctgctggactttgagcggacgctggggctaagcagcccgtgcgacaaccacgcgtcgagtgagcagctctacttttccacgcccaccaaccacaacctgttcccactcaatacgctggagtccacgtgaggcctggtgcacggggggcatggcaccaggcccctgctcggctctccacagggctaggtgggagagcccaagcccgccacctctggcctgaggaacccccagatgtcacctgtgcccagaggcccaggctgatcggtgtcgggagcgcccctcaccatccttgggggcagggcccgctaggcaaggtctcccactgcagggcttgctggagaggcctcggctcttggacacgtggctttgggcgtccaccagggcctcatcctgtccaggacgctcctttctgctgacagcccagccagtttggctgttttttaaagacacatccacggacctgagtttactttttacttttggcaggtaaatccaagctccctggagcacaaagagggtttgagctcttcttggannnnnnnnnnnnnnnnnnnnnnnnaaccaaaaggggttatttccagggcgtacatgcaacagggggattggtttaacccagtatttcatccctttccgggatcctggaaggagagagaacggtccacgatggggtaacggaccagatttcaaaaagcaagtactcggggataggacacgggaaggggatcccaagtggcacaagacggaacgccatgttgaccttgaccaaagtgcgtttggccccattgtgttgaagccctcggttccctcagggggcccttcttgacnnnnnnnnnctacgtgctctcaggtatgggggcaccccccagtgggtgccgcttcccg

SEQ ID NO: 349250 - DNA, 727 bp, Homo Sapiens
  misc_feature (40)..(40): n is a, c, g, or t
caagcattcgccttgtatggggtcttggcccattgaaaanatgtggggtccaatgtcctccccgccgacaaccctttgaacatgtgcatcccctttttaagaagtacacagcaggggccccacgggggccaagaaccagcaggctggggccagcatacgtgtgcagcaggctagcgccatagcgctggcgcaaggtgtgcaggacgctggactcattgaggtacaccagtgaggccagatcctccagacggtcgcaggagggagcattagccttctcaacgtcatcctcatccacatccaggatggccccatcgtggtccagcttcacacgcaccttcccctcaggcaagttgagctcctcagatttgagttgactggccagtgagaagccgtccctatggaccagccacaccttctccgtctcattccaggcctcttctgctgcaatctgttcttctgttttcgcctggctgtgggcatgagaggcggcctcagagtccagagaagctgtgaagatcctctccagccgctggtgggcctcttccacgggggtcagctggaccttggcagctcctgcctcctgcttcacaccagggactggtgacttggactgctgctctcctagtgagatctgacttcgggccggtggagcctggggtcaccagctcttccggtggggctggggagcgctgcttctatggggcttcaggcttggctggggatcctg

SEQ ID NO: 349251 - DNA, 396 bp, Homo Sapiens
  misc_feature (12)..(12): n is a, c, g, or t
  misc_feature (24)..(24): n is a, c, g, or t
  misc_feature (70)..(70): n is a, c, g, or t
  misc_feature (77)..(77): n is a, c, g, or t
cgctgaggttgnaaggcagctccnagagccccaggtcggagcagtccaccctgagcaacatcctgccgtngggctcncaatgacagtgtgtggggcagcccctcagcaacacaccagacctgggagagctgcccccggtcgccagctgcagcagcacaggcaaggacaggagcacaccgagccgggaggtgtccatggtgcccgaagtagggggccacgagccggacgcgggcgaagagcagcaccggactgctacgggccgtggcgcgccgggcgccgctccgtgggcttctgcaactcagcgggcgtctgcagcgccagacgccgcgttcctgaccccacggcgtgggcggcgaggagaagcgcggcggggactgaggtgccggttgccgccac

SEQ ID NO: 349252 - DNA, 603 bp, Homo Sapiens
  misc_feature (46)..(46): n is a, c, g, or t
aacctcaggcctccagctcagccctcagaccagctggtgggccggncggcccgaaacaacgggccagctcctacttaccttcgacccaaatgggcgcttcctggacgggtgggctgcgggcaaacaccccaccgctgaatgcacatgaccgagatccatgagtacaatcaggacctgatccgcaagggtcaggccaacaaggtgaagaaactctccatcgttgtctccctggggacagggaggtccccacaagtgcctgtgacctgtgtggatgtcttccgtcccagcaacccctgggagctggccaagactgtttttggggccaaggaaccaggcttcctggtgggtgcagcccactccctctgccctctgctccgttccctgggggctgggactaaagaaatgggtgtcccccaccccatcagctgggaaagcccaggccgcaggagtgggatgcccgttggactttgcccctcacactggcccagcccctcacactgccccaccccgagaaccctcagctctcaaaggtcactcctgggagtttcttcttcccaatggaagtggcttaagagccaaaactgaaataaatcatttggattc

SEQ ID NO: 349253 - DNA, 1072 bp, Homo Sapiens
cgacacctgctgtgcctggatggaggaggagtgaaaggcctcatcatcatccagctcctcatcgccatcgagaaggcctcgggtgtggccaccaaggacctgtttgactgggtggcgggcaccagcactggaggcatcctggccctggccattctgcacagtaagtccatggcctacatgcgcggcatgtactttcgcatgaaggatgaggtgttccggggctccaggccctacgagtcggggcccctggaggagttcctgaagcgggagtttggggagcacaccaagatgacggacgtcaggaaacccaaggtgatgctgacagggacactgtctgaccggcagccggctgaactccacctcttccggaactacgatgctccagaaactgtccgggagcctcgtttcaaccagaacgttaacctcaggcctccagctcagccctcagaccagctggtgtggcgggcggcccgaagcagcggggcagctcctacttacttccgacccaatgggcgcttcctggacggtgggctgctggccaacaaccccacgctggatgccatgaccgagatccatgagtacaatcaggacctgatccgcaagggtcaggccaacaaggtgaagaaactctccatcgttgtctccctggggacagggaggtccccacaagtgcctgtgacctgtgtggatgtcttccgtcccagcaacccctgggagctggccaagactgtttttggggccaaggaactgggcaagatggtggtggactgttgcacggatccagacgggcgggctgtggaccgggcacgggcctggtgcgagatggtcggcatccagtacttcagattgaacccccagctggggacggacatcatgctggatgaggtcagtgacacagtgctggtcaacgccctcttgggagacccaagtctacatctatgagcaccgccaagaagtttcagaagctcattcagttgctgcttttcacccgggagggtccccagacctctcaccggcccccagctgaacctcgtccattcagcccccgccaaggccaagcccaccactggcc

SEQ ID NO: 349254 - DNA, 423 bp, Homo Sapiens
ggacaactgactcccccatcagctcaaacattaagggtacccgggcacaaccgtacccctgcccccagccccagcctccctgagggcctgccgggctgcctctgccccagccccaagcaagggcactcccaggcttccgggtgggtgcagcccactccctctgccctctgctccgttccctgggggctgggactaaagaaatgggtgtcccccaccccatcagctgggaaagcccaggccgcaggagtgggatgcccgttggactttgcccctcacactggcccagcccctcacactgccccaccccgagaaccctcagctctcaaaggtcactcctgggagtttcttcttcccaatggaagtggcttaagagccaaaactgaaataaatcatttggattcaaggttcagaaagaaagacaac

SEQ ID NO: 349255 - DNA, 1418 bp, Homo Sapiens
  misc_feature (82)..(82): n is a, c, g, or t
  misc_feature (1279)..(1279): n is a, c, g, or t
  misc_feature (1339)..(1339): n is a, c, g, or t
  misc_feature (1366)..(1366): n is a, c, g, or t
  misc_feature (1388)..(1388): n is a, c, g, or t
  misc_feature (1408)..(1408): n is a, c, g, or t
tggaccggtccggaattcccgggatgagatgatcaaggccctcatcgtgttcggagcagaagtggacaccccgaatgacttntggggagactcctacattcctagcctccaaaatcggcagacttgtcaccaggaaggcgatcttgactctgctgagaaccgtgggggccgaatactgcttcccacccatccacggggtccccgcggagcagggctctgcagcgccacatcatcccttctccctggaaagagctcagcccccaccgatcagcctaaacaacctagaactacaggatctcatgcacatctcacgggcccggaagccagcgttcatcctgggctccatgagggacgagaagcggacatgcagaacctgagcccctgagaggtgaagtgacttgctcaaggtcacacggaccacgaccacctgctgtgcctggatggaggaggagtgaaaggcctcatcatcatccagctcctcatcgccatcgagaaggcctcgggtgtggccaccaaggacctgtttgactgggtggcgggcaccagcactggaggcatcctggccctggccattctgcacagtaagtccatggcctacatgcgcggcatgtactttcgcatgaaggatgaggtgttccggggctccaggccctacgagtcggggcccctggaggagttcctgaagcgggagtttggggagcacaccaagatgacggacgtcaggaaacccaaagtgatgctgacagggacactgtctgaccggcagccggctgaactccacctcttccggaactacgatgctccagaaactgtccgggagcctcgtttcaaccagaacgttaacctcagggcctccagctcagccctcaggacgaactagccagagagtgtggcttcgtggggtcctgcttctgaagagttcccagcctcccctcttcccgcacccccagcccccaacacgcacaccctgagatctggagtgcatgggttttatgccagtcccttgtgccactgggccgccctccttccccgcccctagaccagctggtgtggcgggcggcccgaagcagcggggcagctcctacttacttccgacccaatgggcgcttcctgggacggtgggctgctggccaacaaccccacgctggatgccatgaccgagatccatgagtacaatcaggacctgatccgcaagggtcagggccaacaaggtgaagaaactctccattcgttgtctccctgggggacagggaggttccccacaagttgcctgttgacntgttgtgggatgtttttccgttcccagcaaccctggggagttggccaagattgttttttnggggccaaggaattgggcaagatggtngttggattgtttgcaaggattncagaagggcggtttttggancgggaaggtt

SEQ ID NO: 349256 - DNA, 595 bp, Homo Sapiens
ttcctctttggcgtggtgtggtatctggtagctgtggcacatggggacctgctggagctggacccccggccaacccacaccccctgtgtggtacaggtgcacacactcactggagccttcctcttctcccttgaatcccaaaccaccattggctatggcttccgctacatcagtgaggaatgtccactggccattgtgctttttattgcccagctggtgctcaccaccatcctggaaattttcatcacaggtaccttcctggcgaagattgcccggcccaagaagcgggctgagaccattcgtttcagccagcatgcagttgtggcctcccccaatggcaagccctgcctcatgatccgagttgccaatatgcgcaaaagcctcctcattggctgccaggtgacaggaaaactgcttcagaccccccaaaccaaggaaggggagaacatccggctcaaccaggcagcccaaaaaagatttgtttccctgtgtcctgtgaatggaaggacccaagccaatatgttcctttgaaaaaagtccagtacccaggccccatggaaaggtttgaaaataatattccagattaccctgtaaa

SEQ ID NO: 349257 - DNA, 2376 bp, Homo Sapiens
  misc_feature (50)..(86): n is a, c, g, or t
  misc_feature (1729)..(1729): n is a, c, g, or t
aatgatagactcactatagggcgaattggagcttaccgcggtggcggcgnnnnnnnnnnnnnnnnnnnnnnnnnnnnnnnnnnnnnatcaggccaaatcggccgagctcgaattcgtcgagagcggcttttctgatcccagctccgggtttaagagtcctggcccggcccgtcgcacagctctgctcctaactcctgcccgccccgtccgtccatctgtcccgctgccccgcggcccatccaaggggccactccacctcggacccaagatgacgtcagttgccaaggtgtattacagtcagaccactcagacagaaagccggcccctaatgggcccagggatacgacggcggagagtcctgacaaaagatggtcgcagcaacgtgagaatggagcacattgccgacaagcgcttcctctacctcaaggacctgtggacaaccttcattgacatgcagtggcgctacaagcttctgctcttctctgcgacctttgcaggcacatggttcctctttggcgtggtgtggtatctggtagctgtggcacatggggacctgctggagctggaccccccggccaaccacaccccctgtgtggtacaggtgcacacactcactggagccttcctcttctcccttgaatcccaaaccaccattggctatggcttccgctacatcagtgaggaatgtccactggccattgtgcttcttattgcccagctggtgctcaccaccatcctggaaatcttcatcacaggtaccttcctggcgaagattgcccggcccaagaagcgggctgagaccattcgtttcagccagcatgcagttgtggcctcccacaatggcaagccctgcctcatgatccgagttgccaatatgcgcaaaagcctcctcattggctgccaggtgacaggaaaactgcttcagacccaccaaaccaaggaaggggagaacatccggctcaaccaggtcaatgtgactttccaagtagacacagcctctgacagccccttccttattctaccccttaccttctatcatgtggtagatgagacacgtcccttgaaagatctccctcttcgcagtggtgagggtgactttgagctggtgctgatcctaagtgggacagtggagtccaccagtgccacctgtcaggtgcgcacttcctacctgccagaggagatcctttggggctacgagttcacacctgccatctcactgtcagccagtggtaaatacatagctgactttagcctttttgaccaagttgtgaaagtggcctctcctagtggcctccgtgacagcactgtacgctacggagaccctgaaaagctcaagttggaggagtcattaagggagcaagctgagaaggagggcagtgcccttagtgtgcgcatcagcaatgtctgatgacctgttcccactcccccattcctctggtctcttttcctctcttccaatgccctggtaaggaatactacccgggtttactggagatcccccgaagcacccatcctccactccctcttctttaacccagtggcctgttggtagcttaggccaactggagtccaggttcgcctcccactgtcccctttccacttccccagcttctgccccaatacacatacctcccttaagccaggatgggggaaaaagtgggattaggctgaagtggcttaaaaggcctcagccatgcttggatactcacattaggaggaccatgtggtntggaaggatagactgccccctacctcccaccaccaccatgaagtttggtgacttgaggctggagctccctctgttacctttccatctagcaagttcccaaaggcaagactctctctgatggtcactttgtggtctgtgctttcagaaatacaggaatctgatatcaacatatcctagggtatctaccaatctctgttgaaagaagccagggtttgccactgtgaagcttgatttctgctggtgacttctgaccataagctagaaccatggtcgccactgttttccctctgtagtttctcaagtgaacactctcaggatacccagttccctcatagcctctgttctcagagaattggagttggcccaagaaacataaacatataaccacccatatctatcctggattctgaactcttcaatttggagtgactaacacaagttgttatctaaacctttaaacctatcttccaggcagcccagagaagatctgtttccctgtgtcctgtgaatggaaggacccaagccaatatgttcctttgaaaagagtccagtacccaggccccatggaaaggtctgaaaataatattccagattacactgtacctggcttctcttcttcctttgcctgctcatcgtaaacgcatcgt

SEQ ID NO: 349258 - DNA, 2409 bp, Homo Sapiens
  misc_feature (44)..(80): n is a, c, g, or t
  misc_feature (1675)..(1687): n is a, c, g, or t
ggatagatcactataggggaccggagtgatcgcggtggcggcgnnnnnnnnnnnnnnnnnnnnnnnnnnnnnnnnnnnnnatcaggccaaatcggccgagctcgaattcgtcgagagcggatggaaatctgctgtgcatccagagagcaaagtgggatgatctgtcactacacctgcagcaccacgctcggaggacagctcctgcctgcagcttccagacccaggaagcctgaggggaaggaaggaagtacgggcgaaatcatcagattggcttcccagatttgggaatctgaagcgggcccacatcttccggccaacttccattgaacttcccagcactcgaaagggaccgaaatggagagcaaagaaccccagctcaaagggattgtgacaaggttattcagccagcagggatacttcctgcagatgcacccagatggtaccattgatgggaccaaggacgaaaacagcgactacactctcttcaatctaattcccgtgggcctgcgtgtagtggccatccaaggagtgaaggctagcctctatgtggccatgaatggtgaaggctatctctacagttcagatgttttcactccagaatgcaaattcaaggaatctgtgtttgaaaactactatgtgatctattcttccacactgtaccgccagcaagaatcaggccgagcttggtttctgggactcaataaagaaggtcaaattatgaaggggaacagagtgaagaaaaccaagccctcatcacattttgtaccgaaacctattgaagtgtgtatgtacagagaaccatcgctacatgaaattggagaaaaacaagggcgttcaaggaaaagttctggaacaccaaccatgaatggaggcaaagttgtgaatcaagattcaacatagctgagaactctccccttcttccctctctcatcccttccccttcccttccttcccatttacccatttccttccagtaaatccacccaaggagaggaaaataaaatgacaacgcaagacctagtggctaagattctgcactcaaaatcttcctttgtgtaggacaagaaaattgaaccaaagcttgcttgttgcaatgtggtagaaaattcacgtgcacaaagattagcacacttaaaagcaaaggaaaaaataaatcagaactccataaatattaaactaaactgtattgttattagtagaaggctaattgtaatgaagacattaataaagatgaaataaacttattactttaaaggaaaggatttggagaattgaactcacaaactgatgttatatactcaatagcttaaactcatgataatgctgcgatgtgtggttttgcttgattttgtattttatttgggcatctggaattgacacaccattacattctgtttgcaggattttttttgtaaccatgaaattgaacatttccaaattataaactatgttaatacctataaaatatatagccaggaaccatttatcatcaagaaaagtgtaagaaattatttttgagatgtaatttaagattgttttatgtaaaaggaaaatcttgtatggcatcgaatagccttaatgaatttaattctttcacaaaaatgatttcaaattatcctagagtataacatttttatcaaaaatattatttccggagttcttctttctttctttnnnnnnnnnnnnnagtaatttagcaaaaacattactgttctaatgctgaagtgacttttgccagtgccatgtccaggtggtgaggtataagttacttgctcttagcatttggtctgatttttttgctttgtggacacctttgagagtatccacaaagcaatgtctcaggtgtggacacctgagagcatgttttagaaagctttgtaccctgtcttgtggcaggaaagaaagaacaggggttttacataaggaaataagtcctaggaaattagtcaacgcaaattgcatttgcctttgtaccttaccacagtcttacattgttttttaaactctgccatgaaatttggagacatgactgtgaaattcctaacttactatcttacaaagccagtagctaatttgttgctctatgtatgatcctgttacaagtccagtttgcaattcatttgtttcctagaacacagaagggtaccagtaatacactaaatgttcaaggtgtgtagagaaataatatggaattagcagctatgactccaacagacaggattgtgtgagcagctgaaaggagcaaaaaagaactcagtgtaagagaaggcacatacatagttaagaatactaaagtatttttaaaaatcaaggaagaaataaatgttacacaatttgcattggaataaatagatctatttagtcctacaaatcaggagtggtgtagagacatccaaatttaaagaaaaa

SEQ ID NO: 349259 - DNA, 1106 bp, Homo Sapiens
  misc_feature (86)..(86): n is a, c, g, or t
  misc_feature (135)..(135): n is a, c, g, or t
tctgattgagtcctaacccaatccggctaccatgccctttgacagtatcccccattggtacctggaggatgttgctgggtcaaaancagcttttaattctccatttttggcttctgacctgtactggttgggaanagaaaggacctgggattccctggaacacttaggcaccatggtgactggtccgaacgagtgggactgcagctggaacagccacattagaactggtaattgaggcaggaatagcaacaggcatggtttgtccattaaggaagatgtaacagaagaggaaatgggcctgggaacaggaaccaattggcctgttagaggatggtgcctgggtgatttacagtacttgaggttggtgaaggtactgcctgctgaataattacacttgagtcagaacttgtaagcagcacattgggaacctgtaatgatgctggacgaacaatagctgatgtgggctgtgcagtttgtgccaatggtacttccttctcatcactggtagtagactctgggtgaggtaaaggactatcctggtgagttgtttctacaacagaaggctcctcaattttgcttcttatgataggtgttgcaagaggggataaatctagaggcatttttttaatgtcatcttctgaagctttcttgaattcattctcaaatggactcgccaactcattaaacaaacccacttcttcacagtttttcaagaatcttgttggtgttggggtctgatctggccacatccaggcgcagtacatagaaagggtttgtcatcactcatattccacaggtccttgtattgcctggcagaattcacatgtaacttgaatttcataagttgaataacttatcacattctttttctcatggcaagaatactttctagctggtgggccatgagctttatttactctgcttccaggaataccttagctgttatcaataagcagtcctttctcaagtttccatctagtaccctttccaggtcactagttcatgatcctttcggtcacccgcgagccctgagcacagccgtgtttacaaagcacccctggaggaaaaggctgaacggcactttaaaggccacgggctcccacccc

SEQ ID NO: 349260 - DNA, 834 bp, Homo Sapiens
ctcgcgagagaggacggaagcctgtgggagcccgtggcctttaaagtgccgttcagccttttcctccaggggtgctttgtaaacacggctgtgctcagggctcgcgggtgaccgaaaggatcatgaactagtgacctggaaagggtactagatggaaacttgagaaaggactgcttattgataacagctaaggtattcctggaagcagagtaaataaagctcatggcccaccagctagaaagtattcttgccatgagaaaaagaatgtgataagttattcaacttatgaaattcaagttacatgtgaattctgccaggcaatacaaggacctgtggaatatgagtgatgacaaaccctttctatgtactgcgcctggatgtggccagcgttttaccaacgaggatcatttggctgtccataaacataaacatgagatgacactgaaatttggtccagcacgtaatgacagtgtcattgtggctgatcagaccccaaacaccaacaagaatcttgaaaaactgtgaagaagtgggtttggtttaatgagtttggcgagtccatttgagaatgaatttcaagaaaagcttcagaagatgacattaaaaaaatgcctctagatttatcccctcttgcaacacctatcataagaagcaaaattgaggagccttctgtgtagaaacaactcaccaggatagtcctttacctcaacccagagtctactaaccagtgatgaggaaggaagtaccattggcaccaaacttgcacagcccaatcaggtatgttcgtccagcatcttacaggttcccaatgtgctggttacaagttctgaacta

SEQ ID NO: 349261 - DNA, 1672 bp, Homo Sapiens
  misc_feature (619)..(710): n is a, c, g, or t
  misc_feature (878)..(1175): n is a, c, g, or t
  misc_feature (1177)..(1187): n is a, c, g, or t
  misc_feature (1259)..(1321): n is a, c, g, or t
  misc_feature (1525)..(1525): n is a, c, g, or t
  misc_feature (1600)..(1600): n is a, c, g, or t
gatcaagaggactgaaattcagcatttgtaaactgacagtttgatgggcctgggatttgaagtgaactcagcacacaattctgaacgtgtatttgcatgtggactgggaaggaaataaatgggaacttggaaataatggaatatttctcctatgaaagaatttttcgtagaagatttgtttttgatataatctttctgttggttagcttttagtgtttccattccttttctgatccacactcctttaagtgaccaaatgaatataacccaacatgcattgggaatgtgtttaatattaaacaatgtctaactgaatctgcaaatgcgggaactgagatatcacctccatgtgcacacctgtgtgtacgagtattctatacaacttgtagcatttactgccacttaattgggttgaacttgcaagataaacttttggaaactgcttagtgccaacggagtctcctttagaagctgccatcaggcaaatgctatcccataataccagcagtaagcctggcaacatgttcaacagatttagtacccaagaggaaatcaacagcgatagtagagaatgagtcagatgtagtgggataaatactagcctaggaagaaggagcgnnnnnnnnnnnnnnnnnnnnnnnnnnnnnnnnnnnnnnnnnnnnnnnnnnnnnnnnnnnnnnnnnnnnnnnnnnnnnnnnnnnnnnnnnnnnaagtgtattggactagatgatccttagggtctttccaaaagtctaacattctatggcattataggttgccttgcaaattcagcctgctatagtgatggcaaatatcacgtttaagcctgagtctcttatgttgcagttaaataaaagaactatgtaagatgatttttnnnnnnnnnnnnnnnnnnnnnnnnnnnnnnnnnnnnnnnnnnnnnnnnnnnnnnnnnnnnnnnnnnnnnnnnnnnnnnnnnnnnnnnnnnnnnnnnnnnnnnnnnnnnnnnnnnnnnnnnnnnnnnnnnnnnnnnnnnnnnnnnnnnnnnnnnnnnnnnnnnnnnnnnnnnnnnnnnnnnnnnnnnnnnnnnnnnnnnnnnnnnnnnnnnnnnnnnnnnnnnnnnnnnnnnnnnnnnnnnnnnnnnnnnnnnnnnnnnnnnnnnnnnnnnnnnnnnnnnnnnnnnnnnnnnnnnnnnncnnnnnnnnnnnctcaagcaaatgaagttcataataataggggatgttgataaaacttgtggcagccttccaattcatttacannnnnnnnnnnnnnnnnnnnnnnnnnnnnnnnnnnnnnnnnnnnnnnnnnnnnnnnnnnnnnnccatacagtctgtatgtaaagtctggttttcattaagctgtggccagtatttgccactacaacagaaacacactgtcacacttgctagaatataactgtacttgggcttctcctttcctgtgaagtagtgctgggctttctagagtttaattctcaagtggcacaagatagcagagcccatgcattttaatggctgagactgcntagagtgaacctaaacactttacagttgcagagagaaatgaaaaagtattacatgctattagcattgagaaatgntgacaaattaatttgttggaaacaaaagatagctttctgatgacaactcccaaagtgattggccagttgtat

SEQ ID NO: 349262 - DNA, 1172 bp, Homo Sapiens
  misc_feature (556)..(578): n is a, c, g, or t
cattgatgtttgtcatttttatttgcaatactttaggtccaagtttcaaactgcaatatttttacactcaagacacagtcatgcacaatccatatttcaattttctattgcttcaaccacaatttaaaataacaatattgaaaacaaaaatccttaaaaagattggatgctgaggtcagaaggatggaaccataccatcagcaggtctacaaaagaaataacttacttaaaaatcaaacaaacaaaaagaccataaatacctttaatccaaagttacagaagaatttcactacacatggtttacagataacacattctgacaaaagtaatgctcagccaaatgagatacaattctgataaacaatgaaaacgtggatccttctcaacttgttttgtgtagatgttatgagtataatcccagtagacatcactaccctgtgatctggctcctcctggctgatgtactgagattaaaaactcaatgcattagtagctacaggattctgtgaagatcttatcatcaataatgaatatggtatttgcgggtccataaagnnnnnnnnnnnnnnnnnnnnnnnttgaacttgaattttgcactcagggctggttggcactctgctgtaggcagggcattgggaccatccactaactcccagtttaccctctttccagcagtgtactcatcatacaactggccaatcactgtgggagttgtcatcagaaatgctatctttggttcccaacaaattaatttgtcaacatttctcaatgctaatagcatgtaattactttttcatttctctctgcaacttgtaagtgtttaggttcactcttagcagtctcagccattaaaatgcatgggctctgctatcttgtgccacttgagaattaaactctagaaagcccagcactacttcacaggaaaggagaagcccaagtacagttatattctagcaagtgtgacagtgtgtttctgttgtagtggcaaatactggccacagcttaatgaaaaccagactttacatacagactgtatggaaaatgaaaactgggaacagtcaacagaaaatggacattaaaacaaaaacaaaacgaaacaactgtaaatgaattggaaggctgccacaagttttatcaacatcccctattattatgaacttcatttgcttgcc

SEQ ID NO: 349263 - DNA, 797 bp, Homo Sapiens
  misc_feature (21)..(21): n is a, c, g, or t
  misc_feature (70)..(70): n is a, c, g, or t
  misc_feature (74)..(74): n is a, c, g, or t
  misc_feature (100)..(100): n is a, c, g, or t
  misc_feature (110)..(110): n is a, c, g, or t
  misc_feature (219)..(219): n is a, c, g, or t
gttgcagcagtaggattgctnatcttgggatttactgctttgaacttaaacatacattggaaaattaaancaancaatcatattgcaacaccatacacangaatataaantaagtttaaatactctgaaattgtgcaaatagaattaaatagaatttactgctacaatttagggttcacctcatgctttggctttcataacagaaaggtttttgtttcnttaaattcagcacttaggaaattaataatcagaaataatgacgcataatattaaaatttgtgagttctattatatgggttctgaacaatgttaactgttgtcccattagatacagtcccgggaaatgtcaccgtcttcatttactaaagtgtgatggagagggggattgctgaacaatcccagggacagacgtcatcatggaatgtcagagacgccaaggtaaaacccaatactatgtggctacttttcaaacctatttgtcatctcaatgcaggtctttaaaaaatcttgtgttggtgtgacagagaatgcccctttgaacagcgtttttgatctgttttaaaaaacagacttctttgagtagcactgggaaactcagggaccccaggtaagaaacccctgctttagagaatgatggatggtaagggtatgttggaagagaagctgcaaaaggaatttccagatgtgttctatcagaagttaagaaagaataaataaaaggagtaaaaactatttcatgtaacatttcctagagagcaagacaatcttacctgttaactgtttgttacaaagcattt

SEQ ID NO: 349264 - DNA, 832 bp, Homo Sapiens
  misc_feature (522)..(522): n is a, c, g, or t
ccacgcgtccgtgaaggaatgcactgctaactggtacgaagtcacagtgtatagctgaatctaacacgaaggcattcctttggcaggagtcaaaatctcagacttttcattaattcatgcagacttctttgtcaatctaagttattaagattttctatattgttaaacggacttttttttgctaatttgaaaaaaagttgatgattttgtttcaaatacgtcagtgtcgcgggaagcctttaatcagggtatgataatagctccctgtgtgtttccagccaagtccatctacctcaagcttgagttctactcactcggcttcacctaatgtgacaagttctgctccatcgagtgccagaggtcagtgccagagtgtggggaagactgagggtgcccagagaaccttctagtccggggaacgggggccagctgccacacgttcaggctcttcgcctccaaacaggggcaggcaccactaccatgctgaggaacctctctctccttctcttcccagcttctccnttggtggtctgacaaacacaaacattctccgagaaaactctggcctgtcaccaaaagagagaaccatgcagtgccatctatccatcaccggtggagccttcgcagaggatgctgtttaatcatatgggagacggggccttgccacgcagggacccaaatctctctgcacctgaaaaagctgtgaaccccacccctagcagctggagcctggacagggggaaggaagccaagaacatgtcggatagtgggaaacttatctctccccctgtccctccaagacccacacagactgcttcaccagcaagacaca

SEQ ID NO: 349265 - DNA, 1248 bp, Homo Sapiens
gtaccggtccggaattcccgggtcgacccacgcgtccgattaatatatgttaaatatttatgtttagtgaaagtgttcataattgagaaaataaacgcaaacagttgttgatgcagtatgattgttataattatgccaaatactttacgtatggaaaaagaatatttgtacatatgtgcttttaacaattctgccatattgactttacaattttgaatgtcggaaaaattaatatatgttaaatatttatgtttagtgaaagtgttcataattgagaaaaggaacatatgcattttagctttgtatcttgcaagttttgcagtcagaaattttttgaactagcttttgcttttgataacacttcgtgtttgtaaccacattcatacatatatacatatatatgtgaagctccatatttctgttgctttaaagaagtaaaaccttccatttaaataagatgacatgcataagataacaaagcttccttgatttccttttcctgtgtaatttaatagatttgttgactagtgcttgggcacattataaatcagtgttatttgctcttggagccattttttaaaaaaaattttggcagtgagcagttgaatttatcttgaatttatcatgtgtgtgtatttctgaagcagctacatagcagaacattttaagagattctgttagcccacatgttcatgttggttgctgctgaatggtaaatattaaataaaattaccagattaatcttaatatttctgtctttactcctatcatcagcatgtctttacttgtaatagaagcggctcttgatcttattatagtgagatttccagacttctttttagatagatcctgtttgtgttgtcctgccacgtagatgcatttcacactcactacggctcacttatgccatagggaacaatcaccagaaaggtaacaaacagtatgggttaatatcccatagaaagggtaacatttacctggttggctgaccattcattggcctaaccagagccaacttaacaagtcaaaccatcaaaatgtgtttgcatcagaaaacttgacataaaacagataacttccaagcatataagggcatggttaaatgctggttttgacagctgtggtaaaaatctatctgcatgccaactcttctccctggttttcataaaatgatagaaaatatacatgtgacatacactgaaaaacccactgactacaagatttctattaataaagcctggcttttaa

SEQ ID NO: 349266 - DNA, 976 bp, Homo Sapiens
gctgcggggtgagaggaccagggccgagaagggcttcaggacgcgggaggcgcacttgcttcaagtcgcgggcgtgggaacggggttgcaaaacggggcctctttgtccgggcttgcttccggcgtcatggctcaaagggccttcccgaatccttatgctgattataacaaatccctggccgaaggctactttgatgctgccgggaggctgactcctgagttctcacaacgcttgaccaataagattcgggagcttcttcagcaaatggagagaggcctgaaatcagcagaccctcgggatggcaccggttacactggctgggcaggtattgctgtgctttacttacatctttatgatgtatttggggaccctgcctacctacagttagcacatggctatgtaaagcaaagtctgaactgcttaaccaagcgctccatcaccttcctttgtggggatgcaggccccctggcagtggccgctgtgctatatcacaagatgaacaatgagaagcaggcagaagattgcatcacacggctaattcacctaaataagattgatcctcatgctccaaatgaaatgctctatgggcgaataggctacatctatgctcttctttttgtcaataagaactttggagtggaacaagattcctcaaagccatattcagcagatttgtgaaacaattttaacctctggagaaaacctagctaggaagagaaacttcacggcaaagtctccactgatgtatgaatggtaccagggaatataatgtaaagggctgctcatggcctggctggcaatttattcactaccgtgattgccgccaagccttccaggtgagccaagggaagtctccatagtttggtcaagccccagtgtagaactacgtctgccagctgaaattcctttgggcagataccctccaggattgggtgataccgagaatctgctgttcatgggtgccaggcgcccctg

SEQ ID NO: 349267 - DNA, 1044 bp, Homo Sapiens
  misc_feature (19)..(19): n is a, c, g, or t
  misc_feature (27)..(27): n is a, c, g, or t
  misc_feature (51)..(51): n is a, c, g, or t
  misc_feature (70)..(70): n is a, c, g, or t
  misc_feature (76)..(76): n is a, c, g, or t
  misc_feature (90)..(90): n is a, c, g, or t
  misc_feature (131)..(131): n is a, c, g, or t
  misc_feature (183)..(183): n is a, c, g, or t
  misc_feature (272)..(288): n is a, c, g, or t
  misc_feature (619)..(628): n is a, c, g, or t
tcctcaaaggtaaaagaanatcccccncgtggatgggggaatccaagcccnctttttggagtctgggccnctcccntctgccactaaagntcgagtgggtgtgggcatgaatctgctttgtttattcccancaggctctggctcgtgtcacataaggcaccaacatccttttcaaggtagtanccatctagaatcaactcaattgtaacctgaattcataagcttaagtcaccaaaagacatcactgggtcataattatataggttcccctnnnnnnnnnnnnnnnnntcaatttctgctatgtagaaaaagagaacacaaaggtttaggtgcctttgccttgtgcaatggatatttcatatagtttattaattggtttcagttaatatgtaatatgaaggcatgataaatgtgtcaaactgttctcttgtttcagatacaattcttggcatttcaatataggttattatctcatatgtcagacttgagtccagagaatactagaaggacatttaatttcctttcctcctccttcctttcactactcaattcaaagaaaagttatgagtacacagctaggaaccatttttacgtaggcatccatctgagcccatcttgnnnnnnnnnnctaaaacaacaaaaagactaaggacaattacataatgcattcccaagccttttatggatatcagggcctggggggactatctggcctatttgggttctttcattcaccaaaattctattatacatgccaagggttaaagggaacaccatcagtcaagagacggctgggccctagaatggaatctattagcataaaatggaacagtgggacccaaagagctatcagcaaaattccctttgtaacagacgtaaaaatcatgaatttgaggggaaaaataaactagttttggtgggatgcagtggctaacaggaattacttattagaaggtaatgaagttgctaaattttccttgtttttgatccctgtgttctgttggtctcttgaagcaatccctaacatcccgacccgtaccagcc

SEQ ID NO: 349268 - DNA, 344 bp, Homo Sapiens
ccgtgcccagcccatcttcatcttctttacttgaacttaattctttttcatgcatcttcccttctttcctcttttctcctccacccaaatgtcttaactgttaacattcccaggtgtttggtcctgggcctctggaggttgtgaaggagcactgctcagtcctcccttcaagaaagcagcttcaaggagttcaattacaaaagctcctggcattggggacctgccgccatgttcctgcccagggcatgctggtcctggctgtcaccaagcacagtgaaggtcagggtgctaggccatttctgcccgacacaggcctcctctaatgagcagtctgaggccaggca

SEQ ID NO: 349269 - DNA, 610 bp, Homo Sapiens
taatatttgaattttgtttatgtatcacatactgtgctacagttagcctcaatgaagattctattttgaactagacatcctgtcaatagtttgtcaagtaacttcattgcttcctttgatagcaattcagtgaaattttttcccaagtgatattttcccccaacttttgtgagtttgataaataggatgagtcttttatattggaaatactgtgaatggaaaattgccaaatcccttcttagtatattttaagcaccctacaacactttacctccctgcctttagtggtatttaaacatatggccaagttagtatttgggtttgattcctttggtgaagattaaggcatcaaaacatttcttaaaatgtttgagtacaaggctaagttataatgtcaactttcaaagactatgttgtgattcggtttgaatatgctgaagtgagcaattatgatttgcccaagtgcaatacaacaaatctataatgtatatttcacattttctacttgaacacattcatgtatatattttggtaaacttcatatgtatttaaaaagaatcatgaactggtatcaaaattctttcaataaaatttctatttaaaaatctct

SEQ ID NO: 349270 - DNA, 571 bp, Homo Sapiens
acaaaatggcggcggtggaatcaaaggcagcagagctgcgcgtgccaaattccctcttcccttctcctcccagcaacccccttctcgggggtcactgcggccgccctacaaaaggcccagccgcatcgccagcaaagtcagggagatcccggcccactattctacgtgtccaggagatgaagacattaagactggcagggacgggcgcacaaccgctgtgtaaaaacgacccgaacagtgaccgccctttcacctcagtacccctcaaacagtatgccaaaagggagacgtgccccagcgcccacctcgaatcaactgcgctcattagacgccatcctccgcaaagagagcagccccggccgctcacgatctgagcggccatgaagaagcctcgatccgagaaggcttgccctcaaagtgagccactcacctaccggacggggtctttggcggctgagacccagacaggtccgtagtctgcgacggagtcgtcgacctccacgcagaccaggacttaactcgtctacgccactccacaactgacgcacttagcagctctggcgctccacaa

SEQ ID NO: 349271 - DNA, 1240 bp, Homo Sapiens
  misc_feature (49)..(85): n is a, c, g, or t
  misc_feature (1166)..(1184): n is a, c, g, or t
gatgatagactcactatagggcgactggagttcaccgcggtggcggcgnnnnnnnnnnnnnnnnnnnnnnnnnnnnnnnnnnnnnatcaggccaaatcggccgagctcgaattcgtcgagagcggggaagtgacgtaggacgcgccctccattttgtggagcgccagagctgctaagtgcgtcagttgtggagtggcgtagacgagttaagtcctggtctgcgtggaggtcgacgactccgtcgcagactacggacctgtctgggtctcagccgccaaagaccccgtccggtaggaagtactagccggacatcatgagtggctgtcgggtattcatcgggagactaaatccagcggccagggagaaggacgtggaaagattcttcaagggatatggacggataagagatattgatctgaaaagaggctttggttttgtggaatttgaggatccaagggatgcagatgatgctgtgtatgagcttgatggaaaagaactctgtagtgaaagggttactattgaacatgctagggctcggtcacgaggtggaagaggtagaggacgatactctgaccgttttagtagtcgcagacctcgaaatgatagacgaaatgctccacctgtaagaacagaaaatcgtcttatagttgagaatttatcctcaagagtcagctggcaggatctcaaagatttcatgagacaagctggggaagtaacgtttgcggatgcacaccgacctaaattaaatgaaggggtggttgagtttgcctcttatggtgacttaaagaatgctattgaaaaactttctggaaaggaaataaatgggagaaaaataaaattaattgaaggcagcaaaaggcacagtaggtcaagaagcaggtctcgatcccggaccagaagttcctctaggtctcgtagccgatcccgttcccgtagtcgcaaatcttacagccggtcaagaagcaggagcaggagccggagccggagcaagtcccgttctgttagtaggtctcccgtgcctgagaagagccagaaacgtggttcttcaagtagatctaagtctccagcatctgtggatcgccagaggtcccggtcccgatcaaggtccagatcagttgacagtggcaattaaactgtaaataacttgccctgggggcctttttttnnnnnnnnnnnnnnnnnnntcccaaacctacttgctaaaaatttggtaatatgtgctttttggggggtggattga

SEQ ID NO: 349272 - DNA, 2740 bp, Homo Sapiens
  misc_feature (7)..(7): n is a, c, g, or t
  misc_feature (9)..(9): n is a, c, g, or t
  misc_feature (22)..(22): n is a, c, g, or t
  misc_feature (62)..(63): n is a, c, g, or t
  misc_feature (66)..(66): n is a, c, g, or t
  misc_feature (68)..(69): n is a, c, g, or t
  misc_feature (78)..(78): n is a, c, g, or t
  misc_feature (83)..(83): n is a, c, g, or t
  misc_feature (93)..(93): n is a, c, g, or t
  misc_feature (114)..(114): n is a, c, g, or t
  misc_feature (127)..(127): n is a, c, g, or t
  misc_feature (136)..(136): n is a, c, g, or t
  misc_feature (138)..(138): n is a, c, g, or t
  misc_feature (153)..(153): n is a, c, g, or t
  misc_feature (158)..(158): n is a, c, g, or t
  misc_feature (161)..(161): n is a, c, g, or t
  misc_feature (164)..(205): n is a, c, g, or t
  misc_feature (210)..(210): n is a, c, g, or t
  misc_feature (213)..(213): n is a, c, g, or t
  misc_feature (221)..(221): n is a, c, g, or t
  misc_feature (225)..(225): n is a, c, g, or t
  misc_feature (232)..(305): n is a, c, g, or t
  misc_feature (309)..(310): n is a, c, g, or t
  misc_feature (318)..(318): n is a, c, g, or t
  misc_feature (339)..(339): n is a, c, g, or t
  misc_feature (344)..(344): n is a, c, g, or t
  misc_feature (415)..(415): n is a, c, g, or t
  misc_feature (427)..(447): n is a, c, g, or t
  misc_feature (1201)..(1236): n is a, c, g, or t
  misc_feature (2708)..(2708): n is a, c, g, or t
ggaggtntngtggtcacccttntccctaacaaggaaaacaaattaagcatttatgtaggagnngangnngggctcttntaagngtccaaagcnattggggggtttaattaaggnattaaactaattntgggttggngnttttttaaccaaganctttnttnttnnnnnnnnnnnnnnnnnnnnnnnnnnnnnnnnnnnnnnnnnnatttnttntctctttnattnttctcannnnnnnnnnnnnnnnnnnnnnnnnnnnnnnnnnnnnnnnnnnnnnnnnnnnnnnnnnnnnnnnnnnnnnnnnnttcnnccccttgntggtccacatctacaaagatntcctncccatcccaaccccccttccaaatcccacccccacagaaaagcacatacttaccagaatttttagcaagtntggtttgggaannnnnnnnnnnnnnnnnnnnnaaaaaaaggcccccagggcaagttatttacagtttaattgccactgtcaactgatctggaccttgatcgggaccgggacctctggcgatccacagatgctggagacttagatctacttgaagaaccacgtttctggctcttctcaggcacgggagacctactaacagaacgggacttgctccggctccggctcctgctcctgcttcttgaccggctgtaagatttgcgactacgggaacgggatcggctacgagacctagaggaacttctggtccgggatcgagacctgcttcttgacctactgtgccttttgctgccttcaattaattttatttttctcccatttatttcctttccagaaagtttttcaatagcattctttaagtcaccataagaggcaaactcaaccaccccttcatttaatttaggtcggtgtgcatccgcaaacgttacttccccagcttgtctcatgaaatctttgagatccttaacacaagataattgtgttaagcaaagaagaggaaaggggacacacaaacaatcacatgatataaaaaaaacaagactactgaaagagaagatgttagataaagtacaaacatggcatttaccacacttgtattctatcagaattcaaaaattatctatgtcagggcacggaataagcaaatagcatattgcttttaagcaaaatgctaaaagaaattcagattttaacattaaggtagtattagtctatgctgagctcagtacnnnnnnnnnnnnnnnnnnnnnnnnnnnnnnnnnnnnggaaacagtacatatttttaaagtaaagactaaagtagagaagttttatttaaaaaaacagaacatttacaagacaccagttattttgtgccccatatgtcattaaaaaagtttactttacctttattattatttccctaggctagtcaagcagcaaaccattaatcggtcggagaaaccttcatgacatatgcccgactggctcttcgccacccacttgaaggacactacccaatcgatggaagcctttaatcgcacagccctccctattagcggactattggcggatgcagacatgttctactcgagcagttaccaaggaccactttactgcgatcaggattccaacgaccacctaatttcgtatctttcaactcttttcgaccggacctcttattcggaagcgttacaggaagacaggtctcaacttagggatcagatcacgttatcaacgctctgggatcgctgcaacctggcacttcaaggaagtgcaccgataacgtctagaccggcaaacacagatctagaggtggccaactgatcactgtaggagctgactggcaaagtcaaccaggcccaaccaagagtgaccaagacaacgattaggataacccacaggcactcctcgtcataaggccaacgacacagacaggctggcaaataaagggtttaatatttggttaaaaattgattttaaaaaacaagaaaaatatcctcaaaacatttacatttgatcactaatattaaagttcaaaatatcccccaaattacatttaattaaatgtttaaaattacaattccattaaatccattaatttaaaactacttttaataaaacaatacaacattagctacccattaacttttttaaaaagccacatcaaaataactcaaaactgtatttcaacaaacctgccagctgactcttgaggataaattctcaactataagacgattttctgttcttacaggtggagcatttcgtctatcatttcgaggtctgcgactactaaaacggtcagagtatcgtcctctacctcttccacctcgtgaccgagccctagcatgttcaatagtaaccctttcactacagagttcttttccatcaagctcatacacagcatcatctgcatcccttggatcctcaaattccacaaaaccaaagcctcttttcagatcaatatctcttatccgtccatatcccttgaagaatctttccacgtccttctccctggccgctggatttagtctcccgatgaatacccgacagccactcatgatgtccggctagtacttcctcgaatcaactgcgctcattagacgccatcctccgcaaagagagcagccccggccgctcacgatctgagcggccatgaagaagcctcgatccgagaaggcttgccctcaaagtgagccactcacctaccggacggggtctttggcggctgagacccagacaggtccgtatctgnacggagtcgtcgacctccacgcagaccaggac

SEQ ID NO: 349273 - DNA, 1054 bp, Homo Sapiens
gagcgggtcggttgtggagtggcgtagacgagttaagtcctggtctgcgtggaggtcgacgactccgtcgcagactacggacctgtctgggtctcagccgccaaagaccccgtccggtaggaagtactagccggacatcatgagtggctgtcgggtattcatcgggagactaaatccagcggccagggagaaggacgtggaaagattcttcaagggatatggacggataagagatattgatctgaaaagaggctttggttttgtggaatttgaggatccaagggatgcagatgatgctgtgtatgagcttgatggaaaagaactctgtagtgaaagggttactattgaacatgctagggctcggtcacgaggtggaagaggtagaggacgatactctgaccgttttagtagtcgcagacctcgaaatgatagacggtatgtgaagggtggatggctgcattgaacaattattgtaggggtagcatttaagattcaggagtcattagcagtgatgattttgggtcctgccgtataatctgttcttctattcccacgttagccagttgttcttgatgaatctatatgagtcatagaacacaaatctattgacggaagtcattagaatggcttgtgatatctgatggcttgaacttgcccacagttgaacacaagtgctgtcattgcatttcttccattgtgaatacgaattttcttcctcagaaatgctccacctgtaagaacagaaaatcgtcttatagttgagaatttatcctcaagagtcagctggcaggtttgttgaaatacagttttgagttattttgatgtggctttttaaaaaagttaatgggtagctaatgttgtattgttttattaaaagtagttttaaattaatggatttaatggaattgtaattttaaacatttaattaaatgtaatttgggggatattttgaactttaatattagtgatcaaatgtaaatgttttgaggatatttttcttgctttttaaaaacaatttttacccaattttaaacctttattggccgcctgtctg

SEQ ID NO: 349274 - DNA, 676 bp, Homo Sapiens
cccggtagtaggtctcccgtgcagaaaaagccagaacgtggttctcaaagtagatctaggtctcaagcatctgtggtcggcaaaaggtccggttcccgatcaaggtccaggatcagttgacagtgcaatttaacctgtaattaacttgccttggggccctttaaaaaccaaaaaccccaaaaattcccaaaccatacctgctaaaaattctggtaagtatgtccttttccgtgagggtggattttgcaaggggggttgggttggcctgaatatctttgtagatgtggaccaccaaggggttgttgaaaactaattgtattaaatgtcttttgataagccttctgctcacatttttgtgaatgtctgaagtatatagtttgtgtatattgacagagctcttttataactaaagcaaatttaatttttttgtactagaaaaaaatttgaacattttagttcttggttataaaaatgttaattcagaattagtttaatgccttaattaaactaattaatagctttggacacttaaaagagctctaaatttgcttgtacataaaggcttaatttgttttccttgttagggtcaagggtgtcctccactctttaacagctgctggacagacacattagaccagcggtttgttattgataataaaatattataaaactaaac

SEQ ID NO: 349275 - DNA, 2590 bp, Homo Sapiens
  misc_feature (1786)..(1828): n is a, c, g, or t
  misc_feature (1935)..(2006): n is a, c, g, or t
  misc_feature (2161)..(2161): n is a, c, g, or t
  misc_feature (2544)..(2544): n is a, c, g, or t
  misc_feature (2548)..(2548): n is a, c, g, or t
gggattttgtggagcgccagagctgctaagtgcgtcagttgtggagtggcgtagacgagttaagtcctggtctgcgtggaggtcgacgactccgtcgcagactacggacctgtctgggtctcagccgccaaagaccccgtccggtaggtgagtggctcactttgagggcaagccttctcggatcgaggcttcttcatggccgctcagatcgtgagcggccggggctgctctctttgcggaggatggcgtctaatgagcgcagttgattcgaggaagtactagccggacatcatgagtggctgtcgggtattcatcgggagactaaatccagcggccagggagaaggacgtggaaagattcttcaagggatatggacggataagagatattgatctgaaaagaggctttggttttgtggaatttgaggatccaagggatgcagatgatgctgtgtatgagcttgatggaaaagaactctgtagtgaaagggttactattgaacatgctagggctcggtcacgaggtggaagaggtagaggacgatactctgaccgttttagtagtcgcagacctcgaaatgatagacgaaatgctccacctgtaagaacagaaaatcgtcttatagttgagaattatcctcaagagtcagctggcaggatctcaaagatttcatgagacaagctgggggagtaacgtttgcggatgcacaccgacctaaattaaatgaaggggtggttgagtttgcctcttatggtgacttaaagaatgctattgaaaaactttctggaaaggaaataaatgggagaaaaataaaattaattgaaggcagcaaaaggcacagtaggtcaagaagcaggtctcgatcccggaccagaagttcctctaggtctcgtagccgatcccgttcccgtagtcgcaaatcttacagccggtcaagaagcaggagcaggagccggagccggagcaagtcccgttctgttagtaggtctcccgtgcctgagaagagccagaaacgtggttcttcaagtagatctaagtctccagcatctgtggatcgccagaggtcccggtcccgatcaaggtccagatcagttgacagtggcaattaaactgtaaataacttgccctgggggcctttttttaaaaaacaaaaaccacaaaaattcccaaaccatacttgctaaaaattctggtaagtatgtgcttttctgtgggggtgggatttggaaggggggttgggttgggctggatatctttgtagatgtggaccaccaaggggttgttgaaaactaattgtattaaatgtcttttgataagccttctgctcacatttttgtgaatgtctgaagtatatagtttgtgtatattgacagagctcttttataactaaagcaaatttaatttttttgtactagaaaaaaatttgaacattttagttcttggttataaaaatgttaattcagaattagtttaatgccttaattaaactaattaatagctttggacacttaaaagagctctaaatttgcttgtacataaaggcttaatttgttttccttgttagggtcaagggtgtcctccactctttaacagctgctggacagacacattagagcagctgtttgttattgataataaaatattatacacctaggaaaaaaaacaaacaaacgcatcaaaccacaaaataaacccgtccaccatccgcatcccgcaaacactccttcacacccacgcattccggcctctgataccctattcgcgccacgcgaccccagcccgtacnnnnnnnnnnnnnnnnnnnnnnnnnnnnnnnnnnnnnnnnnnntcggcttccctatcacaacccccccacgcccctccgcttcttcccctctccgcgaccatctccccgtccttgccatacccaccgcagcttgcccgcgcgcgttatgnnnnnnnnnnnnnnnnnnnnnnnnnnnnnnnnnnnnnnnnnnnnnnnnnnnnnnnnnnnnnnnnnnnnnnnnttgacgaatttccccgaccgctccccccctcgcgccctattctctcctgtctcgtattgcgcatacccgttttccgctacgacctcgccgcgcccgccccacattccctattctcccgccgcgttcggtttatcgccctttccatccccgttaantccctgcccgcgcgcccgccctcttgtttgaccgccgcgccctccaccgccttatccgcgcccgccctattcatcacccatttataccctcatgccacgctgttcgtaccgcgcgcatcctctttatctccccctatccccaccccttctctttgtcccgccctacatgtgccaccaatctcaccttcctctggctgtcccgcccctatataaaccactctgccaagcgctctcgtttcccgcttacgcggcgttattccataccgccacgcggcgctatgtctccgcctatatttacctatttaccgcttcacctctgttgatacgccccgtgtcgtgcgccggatatcccaccccgtactctaaccgccccgcctccctgnctancgcccgcatatttttcccctctttccgccgccctgttgtccc

SEQ ID NO: 349276 - DNA, 838 bp, Homo Sapiens
agcggtagtgacgtaggacgagcacgccattttgtggagcgccagagctgctaagagcggcagttgtggagtggcgtagacgagttaagtcctggtctgcgtggaggtcgacgactccgtcgcagactacggacctgtctgggtctcagccgccaaagaccccgtccggtaggaagtactagccggacatcatgagtggctgtcgggtattcatcgggagactaaatccagcggccagggagaaggacgtggaaagattcttcaagggatatggacggataagagatattgatctgaaaagaggctttggttttgtggaatttgaggatccaagggatgcagatgatgctgtgtatgagcttgatggaaaagaactctgtagtgaaagggttactattgaacatgctagggctcggtcacgaggtggaagaggtagaggacgatactctgaccgttttagtagtcgcagacctcgaaatgatagacgaaatgctccacctgtaagaacagaaaatcgtcttatagttgagaatttatcctcaagagtcagctggcaggtttgttgaaatacagttttgagttattttgatgtggctttttaaaaaagttaatgggtagctaatgttgtatcgttttattaaaagtagttttaaattaatggatttaatggaattgtaattttaaacatttaattaaatgtaatttgggggatatttgaactttaatattagtgatcaaatgtaaaatgttttgaggatattttcctgttttttaaaaatcaatttttaaccaaatattaaacctttatttggcagctgtctggtcgtgggctttgaag

SEQ ID NO: 349277 - DNA, 493 bp, Homo Sapiens
gtactcctgtaacgatctatgtcagggcacggaataagcaaatagcatatggcttttaagcaaaatgctaaaagaaattcagatttaaacattaaggtagtagtagtctatgctgagctcagtacaaaagaaaaagagacaaacaagtatacaacaaaaaaggaaacagtacatatttttaaagtaaagactaaagtagagaagtattatgtaaaaaaacagaacatatacaagacaccagttattttgtgccccatatgtcattaaaaaagttcacttcacctttattattatttccctaggccagtcaagcagcaaaccactaagcgagcggagaaacagtcacgacatatgcccgacaggctcttcgccacccacttgaaggacactacccaatcgatggaagcctctaatcgcacaggccctccctattagcggactattggcggatgcagacatgttctactcgagcagttaccaaggataactttac

SEQ ID NO: 349278 - DNA, 549 bp, Homo Sapiens
  misc_feature (124)..(159): n is a, c, g, or t
ggcggtcctgtaacatctatgtcgaggcacggaataggcaaatagcattgcttttaagcaaaatgctaaaagaaattcagattttaacattaaggtagtattagtctatgctgagctcagtacnnnnnnnnnnnnnnnnnnnnnnnnnnnnnnnnnnnnggaaacagtacatatttttaaagtaaagactaaagcagagaagttttatttaaaaaaacagaacatttacaagacaccagttattttgtgccccatatgtcattaaaaaagtttactttacctttattattatttccctaggctagtcaagcagcaaaccattaatcggtcggagaaaccttcatgacatatgcccgactggctctccgccacccacttgaaggacactacccaatcgatggaagcctttaatcgcacagccctccctattagcggactactggcggatgcagacatgttctactcgagcagttaccaaggaccactttactgcgatcaggattccaacgaccacctaatttcgtatctttcaactcttttcgaacggaa

SEQ ID NO: 349279 - DNA, 727 bp, Homo Sapiens
  misc_feature (25)..(25): n is a, c, g, or t
  misc_feature (589)..(589): n is a, c, g, or t
  misc_feature (611)..(611): n is a, c, g, or t
  misc_feature (626)..(626): n is a, c, g, or t
  misc_feature (631)..(631): n is a, c, g, or t
  misc_feature (656)..(656): n is a, c, g, or t
  misc_feature (665)..(665): n is a, c, g, or t
  misc_feature (683)..(683): n is a, c, g, or t
  misc_feature (689)..(689): n is a, c, g, or t
ctgtttcaaaattttagaccagggntaccttacacagaattggtcatgttactgccaggagatttctgtgtaacttcatttattggctacagttttggcatttgaagatgtggtactcagatggggttttgtccaccattgtcaagattgtaatcttaaaaatcataccagtcattgataatttagtttatcctgaggcagtcgacttgcagaggcacagtctacaaagcctaggatgttgccactcaatggtttacattttgggacatcttttaagttgtttgtagcactgcagttcaaagtgttaatatttagagggacttctagattttatacctaatgcagtagaaccttgaagtatatttaagcttttttgttaagcttgaacagttggcaagaataatgtgagttcctatctgaaatagaatggtacattaccacttttaagttttaaaaattgatagatgttcacatgtatctcaaactcagttttatttttattccaaatattgtgaatgagaagccattggcctaaacttttggcccatttttgtgctataaacatgcatttttaaagttataagggggnatccaaccaatatggtaatacnagtatttaaggatgngaatnctttgctttttgggaggacctggtnaaaaaaganaaattatggtggtttgcnccggcnttaaataaaaattcttggatttttaccaagtggctttg

SEQ ID NO: 349280 - DNA, 3065 bp, Homo Sapiens
  misc_feature (2729)..(2769): n is a, c, g, or t
  misc_feature (2869)..(2899): n is a, c, g, or t
  misc_feature (2908)..(2991): n is a, c, g, or t
gtgagaacccacggaggggaggaacgaaactccgatgaagtcagagccccttacccgccgccgcggccaggccccccaacatggactgtctctgtatagtgacaaccaagaaataccgctaccaagatgaagacacgccccctctggagcacagcccggcccacctccccaaccaggccaattctcccccagtgattgtcaacacagataccctagaagccccaggatatgagttgcaggtgaacgggaccgagggggagatggaatacgaggaaatcacattggaaaggggtaactcaggtctgggcttcagcatcgcaggtggcactgacaacccacacatcggtgacgacccatccattttcatcaccaagatcattcctggtggggctgcggcccaggatggccgcctcagggtcaacgacagcatcctgtttgtaaatgaagtggacgtgcgcgaggtgacccactcagcggcggtggaagccctcaaagaggcaggctccatcgttcgcctctatgtcatgcgccggaagcccccggctgagaaggtcatggagatcaagctcatcaaggggcctaaaggtcttggcttcagcatcgcagggggcgtagggaaccagcacatcccaggagataatagcatctatgtaacaaagatcatcgaagggggtgctgcccacaaggatgggaggttgcagattggagacaagatcctggcggtcaacagtgtggggctagaggacgtcatgcatgaagatgctgtggcagccctgaagaacacgtatgatgttgtctacctaaaggtggccaagcccagcaatgcctacctgagtgacagctatgctcccccagacatcacaacctcttattcccagcacctggacaatgagatcagtcacagcagctacctgggcaccgactaccccacagccatgacccccacttcccctcggcgctactctccagtggccaaggacctgctcggggaggaagacattccccgagaaccgaggcgaattgtgatccaccggggctccacgggcctgggcttcaacatcgtgggtggcgaggacggtgaaggcatcttcatctcctttatcctggccgggggccctgcagacctcagtggggagctgcggaagggggaccagatcctgtcggtcaacggtgtggacctccgaaatgccagccatgagcaggctgccattgccctgaagaatgcgggtcagacggtcacgatcatcgctcagtataaaccagaagagtacagccgattcgaggccaagatccacgaccttcgggaacagctcatgaacagcagcctgggctcagggactgcgtcctgcggagcaaccccaaaaggggtttctacatcagggccctgtttgattacgacaagaccaaggactgcggcttcctgagccaggccctgagcttccgctttggggatgtgctgcatgtcatcgatgctagtgatgaggagtggtggcaggcacggcgggtccactctgacagtgagaccgacgacattgggttcatccccagcaaacggcgggttgagcgacgagagtggtcaaggttaaaggccaaggactggggctccagctctggatcgcagggtcgagaagactcggttctgagctacgagacagtgacgcagatggaagtgcactatgctcgccccatcatcatccttgggcccaccaaggaccgcgccaacgatgatcttctctccgagttccccgacaagtttggatcctgtgttccccatacgacacggcccaagcgggagtatgagatagatggccgggattaccactttgtgtcgtcccgggagaaaatggagaaggacattcaggcgcacaagttcattgaggccggccagtacaacagccacctctatgggaccagcgtccagtccgtgcgagaggtggcagagcaggggaagcactgcatcctcgatgtctcggccaatgccgtgcggcggctgcaggcggcccacctgcaccccatcgccatcttcatccgcccccgctccctggagaatgtgctagagattaacaagcggatcacagaggagcaagcccgcaaagccttcgacagagccaccaagctggagcaggagttcacagagtgcttctcagccatcgtggagggtgacagctttgaggagatctaccacaaggtgaagcgtgtcatcgaggacctctcaggcccctacatctgggttccagcccgagagagactctgattcctgccctggcttggcctggactcgccctgcctccatcacctgggcccttggtctggactgaattgcccaagcccttggctccccccggcctccctcccaccccttcttatttatttcctttctaactggatccagcctgttggaggggggacactcctctgcatgtatccccgcaccccagaactgggctcctgaacgccaggaacctggggtctgggggggagctgggctccttgttccgagcccttgctccttaggatccccgcccccacctgcccccaatgcacacacagacccaccgggggccacctgccctcccccatcctctcccacacacattccagaagtcagggccccctcgaggagcacccgctgcagggatgcagggccacaggcctccgctctctcctaaggcagggtctggggtcacccctgccctcatcgtaattccccatgttccttgatttctcannnnnnnnnnnnnnnnnnnnnnnnnnnnnnnnnnnnnnnnnggggggagaagcaggggactccgcagcgggcccctgccttccacatgcccccaccatttttctttgccggtttgcatgagtggaaggtctaaatgtggcnnnnnnnnnnnnnnnnnnnnnnnnnnnnnnnggggaaaannnnnnnnnnnnnnnnnnnnnnnnnnnnnnnnnnnnnnnnnnnnnnnnnnnnnnnnnnnnnnnnnnnnnnnnnnnnnnnnnnnnagactggaaatgctgccgccttctgcaatttatttatttttttcttttgagagagtgaaaggacagagcacaga

SEQ ID NO: 349281 - DNA, 924 bp, Homo Sapiens
gctggaaggaaggagccagcgtgcaaataatgaaggagcacgggggcaccttcagtagcaccggaatcagcggtggtagcggtgactctgctatggacagcctgcagccgctccagcctaactacatgcctgtgtgtttgtttgcagaagaatcttatcaaaaattagcaatggaaacgctggaggaattagactggtgtttagaccagctagagaccatacagacctaccggtctgtcagtgagatggcttctaacaagttcaaaagaatgctgaaccgggagctgacacacctctcagagatgagccgatcagggaaccaggtgtctgaatacatttcaaatactttcttagacaagcagaatgatgtggagatcccatctcctacccagaaagacagggagaaaaagaaaaagcagcagctcatgacccagataagtggagtgaagaaattaatgcatagttcaagcctaaacaatacaagcatctcacgctttggagtcaacactgaaaatgaagatcacctggccaaggagctggaagacctgaacaaatggggtcttaacatctttaatgtggctggatattctcacaatagacccctaacatgcatcatgtatgctatattccaggaaagagacctcctaaagacattcagaatctcatctgacacatttataacctacatgatgactttagaagaccattaccattctgacgtggcatatcacaacagcctgcacgctgctgatgtagcccagtcgacccatgttctcctttctacaccagcattagacgctgtcttcacagatttggaaatcctggctgccatttttgcaactgccatccatgacgttgatcatcctggagtctcccatcagtttctcatcaacacaaattcaaaactggccttgatgaaaaacg

SEQ ID NO: 349282 - DNA, 1402 bp, Homo Sapiens
  misc_feature (633)..(655): n is a, c, g, or t
  misc_feature (1356)..(1356): n is a, c, g, or t
gtcaccctcagccggcgccgggcaccctggacagtgcggtgggcgatggcccaggtgggtggccgcgacggtggcctcctgcagagctgggacccggtcctacattcgtgattttgttttctcccaagtcagaaaaatgttgagggtattagacatccctgaaactcagttaaccgaatttccagtctccaaagcggaagggtaggcatcgccaggcgctggtgagccctggtcaatgagcgcttccatggaaaccgctcggctgattacattttttctgtgtattatttgaatagagagtaaagctcctccgctgtttcgtaaccatatcctttcccccgctaactggaggctgatttctacatatttcttccatgtatctgagaatatctaactagaaggatgagaaggaaataaaatgttataatcagataaggctggttataaaagagtaatgtattacctcaatttttgactgactttgtaaaagccaataactggtttaatgtttatcttgatagactttaaatgtatcaagtcttaattgtattttaaattgaagccttacatttttaaaacagattttgtatttttcttgtggaaggctttgctctaataacacacacacactgnnnnnnnnnnnnnnnnnnnnnnnaattctaggcacacatttagttagatgtgaagcatttaattcattgggagctaggtcagctgccagatgagttgcaaaaacagaaaaaaacctacccattgaataacttctttgaatttggagataagttttcttttacttaaaatgaatatattaattctagaggggcaaaactagcaatgcttatgcaagtgacggtgctgctcttgttccacccccacccagatggtctctgagtgcgccgtcctgggcagggcacacggtctggagctgagagggtggagcaagagtgcactgactccgagccgagggcaggagtggctcaacttggtctcgtcttgcacttagtgcaaatccaataattaagatgcctagacttctgcccttggtcacagtaacaacaacattttgaagacttttccctggtggcatcctagagggaccgactttctgcagcctctgtcttccaagctgagcttctgctgcagtgtggctgtcactgcacctgtgtgtctccctgacgtccctgtcagctgcttcattttgatttcctttcttctcccgccctttctgtaggctctgtcccagcatctcctgttcttaactggccacaatacaacactaagcgcatttttagtaatttgtatttattaaatagagtttgtgggccttgttctctactttaaaagcagatgagtggnacatttatgtttccctggtcaatgagcctcaataaaaaacaaacag

SEQ ID NO: 349283 - DNA, 1589 bp, Homo Sapiens
  misc_feature (1091)..(1124): n is a, c, g, or t
cgcgccgcgcacccatggacggcccggccatcatcacccaggtgaccaaccccaaggaggacgagggccggttgccgggcgcgggcgagaaagcctcccagtgcaacgtcagcttaaagaagcagaggagccgcagcatccttagctccttcttctgctgcttccgtgattacaatgtggaggcccctccacccagcagccccagtgtgcttccgccactggtggaggagaatggtgggcttcagaagggtgaccagaggcaggtcattcccataccaagtccaccagctaagtaccttcttccagaggtgacggtgcttgactatggaaagaaatgtgtggtcattgatttagatgaaacattggtgcacagttcgtttaagcctattagtaatgctgattttattgttccggttgaaatcgatggaactatacatcaggtgtatgtgctgaagcggccacatgtggacgagttcctccagaggatggggcagctttttgaatgtgtgctctttactgccagcttggccaagtatgcagaccctgtggctgacctcctagaccgctggggtgtgttccgggcccggctcttcagagaatcatgtgtttttcatcgtgggaactacgtgaaggacctgagtcgccttgggcgggagctgagcaaagtgatcattgttgacaattcccctgcctcatacatcttccatcctgagaatgcagtgcctgtgcagtcctggttcgatgacatgacggacacggagctgctggacctcatccccttctttgagggcctgagccgggaggacgacgtgtacagcatgctgcacagactctgcaataggtagccctggcctctgcctgcctcccgcctgtgcactctggaacctctggcctcaggggacctgcctgtcctcagctccctgggagctgaaagtgaggatactccgtgctccaggccacagggtgaatgtggccatgcctacctgttttgtttttttaagaacagaaacaactattttaaaagaactcttttaagaaatttcataaagggacatgcattttactgggtttgcttttcttaaaacataccnnnnnnnnnnnnnnnnnnnnnnnnnnnnnnnnnngctggatctctatcagacttcctttcaactggtcctcgcctccaagcagaccacctgtccccttctatcccagctcagagcagctgacccaactcagaatctcttccctacaggatgaagtggcctttggaatgttatttaaagccgagagttaattttcctacacaacatatgaccagacatcttttagtctgtaatcggtcttagatactataagaacgatgaacttgacaattttctagaacctggtagcgtgtgtgtgtagtggcggggggtgctgagggaggggagtgagtcacaggagcctgtcccccaacaggtgtgactgctctgacaacctgtggcatgctgcagggtcaggctcctgataggcaggattccatgactatgtcattgtctccactcatttttgacccagttgggaatgtatctgcaattgtgtggctcaacacttcaggaaacata

SEQ ID NO: 349284 - DNA, 541 bp, Homo Sapiens
gcggccgccgcgccgcgcacccatggacggcccggccatcatcacccaggtgaccaaccccaaggaggacgagggccggttgccgggcgcgggcgagaaagcctcccagtgcaacgtcagcttaaagaagcagaggagccgcagcatccttagctccttcttctgctgcttccgtgattacaatgtggaggcccctccacccagcagccccagtgtgcttccgccactggtggaggagaatggtgggcttcagaagccaccagctaagtaccttcttccagaggtgacggtgcttgactatggaaagaaatgtgtggtcattgatttagatgaaacattggtgcacagttcgtttaagcctattagtaatgctgattttattgttccggttgaaatcgatggaactatacatcaggtgtatgtgctgaagcggccacatgtggacgagttcctccagaggatggggcagctttttgaatgtgtgctctttactgccagcttggccaagtatgcagaccctgtggctgacctcctagaccgc

SEQ ID NO: 349285 - DNA, 1005 bp, Homo Sapiens
aaggaagcgaggcctgggtggcgaattcggcacgagggcgtccgctgcagctcatgacagagatagagatgtagataaacgagactcatctgttagtaaagatgacaaagaaagggaaagcgtcgagaagagacactccagccacccttcaccagcacctgtcctcccggtgaatgccctgggacatacccgcagctccactgaacagatccgggctcatctgaacactgaggctcgggagaaggacaaacccaaagagagggagagagaccactcggaatcccgcaaggacctggccgccgacgagcacaaggcgaaagagggccacctgcccgagaaggacgggcacggccacgaggggcgcgccgcgggcgaagaggccaagcagctggcccgggtgccgtctccctacgtgcggaccccggtggtggagagtgccaggcccaacagcacctcgagccgggaggccgagccgcgcaagggtgagccggcctacgagaaccccaagaagagctccgaggtcaaggtgaaggaggagcggaaggaagaccatgacctgcctccagaggccccgcagacccaccgggcctcggagccgccgcctcccaactcctcgtccagcgtgcacccggggcccctggcctcgatgcccatgacggtgggggtgacgggcattcaccccatgaacagcatcagcagcctggacaggactcgcatgatgacccccttcatgggcatcagccccctcccgggcggagagcgcttcccgtaccccttcttttcactggggaccccatcccgggaaccccttgaagggatcccttaccgagaaacttgacattcacccggaaagaacccgctggggccagggaacttccctggcttaagggaccgaacccggcttccaccggggtttcttgaaattccccccgggttggaaccaaagaccgaaaccggttcccttttcagggggacccgggggaaacccttcacgggaattaaccg

SEQ ID NO: 349286 - DNA, 848 bp, Homo Sapiens
ccacgcgtccggcggcggaggcggaggcccggcgccctgggcggcgccctgtccccgaagtccgtcctccccgttaggtggcgagcgcccgaggggaggggacagccgggcaagcaggaagctgcggcttaaaagggcaacccgcgcgggacccttcctccctagtcgcggggagtctgagaaagcgcgcctgtttcgcgaccatcacgcacctcccctccgcttgtggccatgtaccagctacctgtggcgaagcgctgttgctgtcccgggccgggcccgctgccctgggctcggcgtccgccgactcggccgcgttgctgggctgggcccggggacagcccgccgccgccccgcagccggggctggcattggccgcccggcgccactacagcgaggcggtggccgaccgcgagggacgaccccaacttcttacaagcatggctggagggcttcttcgatcgcggcgccagcatcgtggaggacaagctggtggaggacctgaggacccgggagagcgaggagcagaagcggaaccgggtgcgcggcatcctgcggatcatcaagccctgcaaccatgtgctgagtctctccttccccatccggcgcgacgacggctccagggaggtcatcgaaggctaaccgggcccagcacagccagcaccgaacgcactgcaagggaggtatccgataacagcactgatgtgagtgtagatgaagtaaaagctttggcttctctgatgacatacaagtgtgcaggggttgatgtgccgataggaggtgctaaaagctggtgtcaagatccaatcccaagaaactatactgatacatgaattgggacacaggat

SEQ ID NO: 349287 - DNA, 728 bp, Homo Sapiens
ctccaccagcttgtctccacgatgctggcgccgcgatcgaagaagccctccaccatcttgaagaagttggggtcgtcctcgcggtcggccaccgcctcgctgtagtggcgccgggcggccaatgccagccccggctgcggggcggcggcgggctgtccccgggcccagcccagcaacgcggccgagtcggcggacgccggagcccaggcagcgggcccggcccgggacagcaacaagcgcttcgcccaggtagcggtacatggccacaagcggaggggagtgaaaaatgtactctgacctgaatcctgaattttccttgatggtcaaaagattaagaaatcatgagtggaggatctcaagtccacatttgttggggtgctccaattgctccactgaaaatcacagtatcagaagacacagcttctttaagtgtctgtggctgacccctggaaacagagaattcagcttttatacagtcaaccatgcttgatatctgaaggatgaagaaacagcacaaaaatcttgaaaacttattaaagtcccagaatctatgggttctccagatcttagtggtcatttgcttagcaaactgtatgaatagacatgttcatgtgaacagatgactttgtaacgtgctggttctggaaacacagaagtatagaaatcccagaagattcactcctctagactgagtgatatacctagctctaatattgccacatatgtgg

SEQ ID NO: 349288 - DNA, 1023 bp, Homo Sapiens
  misc_feature (340)..(340): n is a, c, g, or t
cggacgcgtgggtggaatggttcagtttaggaaccaagaggcccaggtgaggcaacatcttttttctctacaggtaccaacaaaccttgacttgtcagcttccatcatcaattaagattctcagaatttgcaattaattgaatagaattcatttactatctgcccactcaaagaagtacaagggtagagtaagctaactgggctttaacatggtcagaatgtctggtgcatgaactataaaaaagagaactgtctcccatccccttccttgttttactcttagtaacatccagaattccctggaacagattgcctaccaccagaccttagaaaagactgncattctcttgctccttacttgaaatacaaatattgggaatgtcacagacatcaagcaactactgtcaagtgggaggagagaatgagcagaattgctgactcctatttgtagagtgaaaaggaggagtgataatagatgcccttctgtctagctttcctttcttcaactagtggtaatgcaagattagaatcaagggtgacaggaggcaagatcactcctgaagtgacagaaagacaattctcctttgctccaaagagagaaatctgtcacctttgcacctcactgcctttaaacacagacgggagggcaggccaaatctcagcattgacttttgtcctccaagagaggaagagaagaagtaattgggcaacttggaggcccgcgccccagctagccttcctgatcgtaacctccaacctcaggaaagggaccttcccaaaacacagatcccaaaggaaacaaaatagaccaaggagcataatctgcttctctcacacagcctctctgccagtggaccctgcctgcttccctctcagtgctcagcactctgtgtagtgtctttcaggttgatacactctcccaaggtgcaggcgctggccccatgagcccagcaccaaagttttctaagtcataggtcagactgtcaagatcaattctttatctataggttgatatttagctta

SEQ ID NO: 349289 - DNA, 449 bp, Homo Sapiens
  misc_feature (18)..(18): n is a, c, g, or t
aaacctgtaacctttgcnacctcaactgcccttttaaacacagacgggaagggcaggcccaaatcctcagccattgacttttgtccctcccaagagaggaagagaagaagtaattgggcaacttggaggcccacgccccagctagcccttccctgatcgtaacctcccaacctcaggaaagggaccttcccaaaacacagatcccaaaggaaacaaaatagacccaaggagcataatcctgcttctctcacacagcctctctgcccagtggaccctgcctgcttccctcctcaggctcagcactctgtgtagtgtctttcaggttgatacactctcccaaggtgccaggcgctggccccatgagcccagcaccaaagttttactaagtcataggtcagactgtcaagatcatttctttatctataggttgatatttagcttaaaaaaaa

SEQ ID NO: 349290 - DNA, 469 bp, Homo Sapiens
  misc_feature (11)..(11): n is a, c, g, or t
cacctaaaaanggtttcccctttttttccatccccaagaaagttaagaaactcccccccagaatattccaacaacctaatagggatcctgaaattccccgaagaattcctaaaaaatatccttaaaacccacaagagagaaaatcctagttcctgccctcagccccccagtccagcaggcccatctgtccccttccctctccctctgagtcagacagctctggcaagcaaggctccttggctagttcctaatgcactgacaggagccctcccattaaggacgacttctactcaaaatgcgactctccctctgaacttcagatgcctctgttagcaggaaaaggcattgattggattggatatatttatgtgactgcgggcatttgtggctgtagaatccgtgaccgtaatgttatatgtaatgggaactatcttataaacttgaaaaaaataaagtttttattttctat

SEQ ID NO: 349291 - DNA, 2946 bp, Homo Sapiens
  misc_feature (1493)..(1501): n is a, c, g, or t
  misc_feature (2724)..(2743): n is a, c, g, or t
acggctggtaccggtccggaattcccgggatgtttagaggtttgaattttctcggagaaagacaggccggccacgaggaaaacagaaacaagccgcagcaacatctaagcccttgaaaggatcctgagagaggggggaaagggaaaacagcagccaccagcccaaccacttgtgtcttctgccccttcccacctatcttgcccaccccaccagcccacgctgcttgggacttgaaatctgtggccgaaggaccgtcactacataacttcaaaaataatcaaccaccctcccttcccaaaccacccaaattcactcatccagcgtttacttttttgaatccactcagaacttttttctgcgacccccctccctaaatggagttgggtgggggggaaatgaatactgagttggcctttattttttaaaagactttttgatccaatgaggccccctaaataattgagttttgggtcctggttggttgttttaatttttttcctccaaaattttaccccctcccccctgagcccgaggtgctgacgtcgcaaaaaaattggataaaaccaccatcatgggttcgggtcccatagaccccaaagaacttctcaagggcctggacagcttccttaaccgagatggggaagtcaaaagtgtggatgggatttccaagatcttcagtttgatgaaggaagcacgaaagatggtgagtcgatgcacttacttgaacattctcctgcagacccgttcaccagaaatattggtcaaatttattgacgttggcggctacaaacttcttaacaattggctgacgtattcaaagacaaccaacaacattcccctcctccagcaaattctactgaccctgcagcatctaccgctcactgtagaccatctcaagcagaacaacacagctaaactggtgaagcagctgagcaagtcaagtgaggatgaagagctccggaaattggcctcagtccttgtcagcgactggatggctgtcatccgctctcagagcagtacccagcctgctgagaaagataagaagaaacgtaaagatgaaggaaaaagtcgaactacccttcctgagcgacctttgacagaggtgaaggctgagacccgggctgaggaggccccagagaagaagagggagaagcccaagtctcttcgcaccacagcacccagtcatgccaagttccgttccactggactagagctggagacaccatccttggtgcctgtgaagaagaatgccagcacagtggtggtttctgacaagtacaaccttaaacccatccccctcaaacgtcagagcaacgtagctgctccaggagatgccactccccctgcagagaagaaatacaagccactcaacacaacacctaatgccaccaaagagatcaaagtgaagatcatcccgccacagcctatggagggcctgggctttctggatgctcttaattcagcccctgttccaggcatcaaaattaagaagnnnnnnnnngtactgtcacctacggctgccaagccaagcccctttgaagggaaaacgagcacagaaccaagcacagccaaaccttcttccccagaaccagcaccaccttctgaggcaatggacgcagaccgtccaggcaccccggttccccctgttgaagtcccggagctcatggatacagcctctttggagccaggagctctggatgccaagccagtggagagtcctggagatcctaaccaactgacccggaaaggcaggaagaggaaaagtgtgacatggcctgaggaaggcaaactgagagaatatttctattttgaattggatgaaactgaacgagtaaatgtgaataagatcaaggactttggtgaggcggctaagcgagagatactgtcagaccgacatgcatttgagacagcgcggcgtctgagccatgataacatggaggagaaggtgccctgggtgtgcccccggcccctggttctgccctcacctcttgtcacccctggaagcaatagtcaggagcgatatatccaggctgagcgggagaagggaatcctttcaaggagctcttcctgaaccaaggagagtccttcatgagcctgatcctgagccctacgagcccataccccctaaactcatccccctagatgaggagtgttccatggatgagactccgtatgttgagactctggaacctggggggtcaggtggctcacctgatggggcaggaggctccaagttgcctccagttctggccaatcttatgggaagcatgggtgctggaaagggccccccaagccctggaggaggaggcattaatgtccaagagatcctcacctccatcatgggtagcccaaacagtcatcccttcagaggaactactgaaacaaacagactattcggacaagatcaagcagatgctggtgccacatggactcctaagccctggcccaatacccaatggtttcccaccaggggggtcctgggggccccaagggcatgcagcactttcccccctggacctggggggacctatgccaggttccccatggaggccctggtgggccagtgggtccacgtcttctgtggtcctccaccccctccccggggaggtgatcccttctgggatggcccgggcgaccctatgcggggtggcccaatgcgggggggtccaggaccaggtcctggaccataccatagaggccgaggtggccgaggaggaaacgaannnnnnnnnnnnnnnnnnnnattccgaggcgccagaggaggtcgctctggaggaggacccccaaatggacgaggggtgccctggttggggggacattggtatggagcgtgcgtggagcatcgctcattcacgaaatgccctgatgggccggccttggaacaaacagcagtggaaatcgaacgcacaaatggcactggcggtgtaagcgatctggacatcccac

SEQ ID NO: 349292 - DNA, 502 bp, Homo Sapiens
gacaaaatacaccccactcgcacctagtgagagccaccaacatcagtgcacagcctgtgtggctgcctcaggccaccgccaccacacacagatgtggacaccgctcaccattgacctcagtgggcttggcacagacgcttgacaggcctgcagccgccatccaggcagaaaccccctacttccacctcccctgcacagccttggactgtgttcctccagactcagggggaagcccccaagtagtcacagttagctcctccctattggtggggctgccatgcacctgtcccgggggtggggtgggtagagaatgacttgctttgtctgtggctcatataacatctctcaacatatggggtcaatgcaggactggagggcaccttccctaccggtaacctgtcctggacccaagacccgagatgagcgtgggtgagagcagctgccctcctgttggcttactgtggatggcgtggccctgcacgggtgggcttttgaatgccct

SEQ ID NO: 349293 - DNA, 1132 bp, Homo Sapiens
  misc_feature (1033)..(1041): n is a, c, g, or t
ggcctgggtggcgaattcggcacgaggccagggggaacgcaggtcgcttacccggctgggtaggtcggcggcctggttgccatggcagcggggtcgcgggccggcgccagggaaggccccgaggctgcgggcggccagggctgcccgcggattcccagacccggacgcccgagccagcaaccctgaggggcggccgggcagcgccgccaccatgttcctgggcaccggggagccggccttggacacgggagatgacagtctgtctgcagtcacctttgactctgatgtggagacgaaagcaaaaaggaaagctttccacaaacctccacccacatcgccaaagtcaccttatctctctaagccgagaaaagtggcctcctggaggtccctcaggacggcagggagcatgcctctgggcggccgagcgtccctgaccccgcagaagctgtggctgggaaccgcaaagccaggaagtctgacccaggccctgaactcacccctcacctgggagcatgcgtggactggcgtccccggcggcactcctgactgtctgacagacaccttcagagtgaagaggccacatctcaggcgctctgccagcaacggtcatgtccctgggactcctgtctacagagaaaaagaagatatgtatgacgagattattgagttaaagaagtcattgcacgtgcagaagagcgacgtggaacctgaggagaacgaaactccggcgccctggagggaggaaaacagaaggaaaggacccgaagataaagcagctcctgggatccccagcccgcggcacgggatttttgttccggactctgggaagagaaaaggccccaatgccagttggggtcattaacccgggctgaaagccagaaggatcctggaaacctggaaacaccagttgccaaggaagaagggacgggcacccattcagggaaaactcccagacccgattatgaagggacttcccaaaccctgggaaaaaagatggccggatccgcccaggggaaggacattcctacccgannnnnnnnnccctccgggtctcgaaaaccctctcttggcaaaatctctcggagacagcctccctccaaacaaaggcggccctgtggtgggacaaataaaa

SEQ ID NO: 349294 - DNA, 1442 bp, Homo Sapiens
  misc_feature (1304)..(1304): n is a, c, g, or t
  misc_feature (1322)..(1322): n is a, c, g, or t
  misc_feature (1371)..(1371): n is a, c, g, or t
  misc_feature (1383)..(1383): n is a, c, g, or t
  misc_feature (1399)..(1399): n is a, c, g, or t
  misc_feature (1416)..(1416): n is a, c, g, or t
gacacctccttagcgctggccgcgggccgcctctgcggcagcgctagtcgccttctccgaatcggctccgcacagctaggagaaaagatgttcactgtgctgacccgccaaccatgtgagcaagcaggcctcaaggccctctaccgaactccaaccatcattgccttggtggtcttgcttgtgagtattgtggtacttgtgagtatcactgtcatccagatccacaagcaagaggtcctccctccaggactgaagtatggtattgtgctggatgccgggtcttcaagaaccacagtctacgtgtatcaatggccagcagaaaaagagaataataccggagtggtcagtcaaaccttcaaatgtagtgtgaaaggctctggaatctccagctatggaaataacccccaagatgtccccagagcctttgaggagtgtatgcaaaaagtcaaggggcaggttccatcccacctccacggatccacccccattcacctgggagccacggctgggatgcgcttgctgaggttgcaaaatgaaacagcagctaatgaagtccttgaaagcatccaaagctacttcaagtcccagccctttgactttaggggtgctcaaatcatttctgggcaagaagaaggggtatatggatggattacagccaactatttaatgggaaatttcctggagaagaacctgtggcacatgtgggtgcacccgcatggagtggaaaccacgggtgccctggacttaggtggtgcctccacccaaatatccttcgtggcaggagagaagatggatctgaacaccagcgacatcatgcaggtgtccctgtatgcctacgtatacacgctctacacacacaggcttccagtgctattggccgaaatgaggcctgagaaaaaagtttctggcaatgctcctgcagaattctcctaccaaaaaccatctcaccaatccctgttaccctcgggattatagcatcagcttcaccatgggccatgtatttgatagcctgtgcactgtggaccagaggccagaaagttataaccccaatgatgtcatcacttttgaaggaactggggacccatctctgtgtaaggagaaggtggcttccatatttgacttcaaagcttgccatgatcaagaaacctgttcttttgatggggtttatcagccaaagattaaagggccatttgtggcttttgcaggattctactacacagccagggctttaaatctttcagtaactttttcctggacacctttaacttcagcaccctggaatttctgctcacaagaaatgggangtcagcttccactggtgnttccccaaaatttgatgaaggtatatgcccccttttactggtttttcangccactacattntaccccactggttggngacgggttccaaatttnccagaggagaacttgggccccaaaac

SEQ ID NO: 349295 - DNA, 795 bp, Homo Sapiens
  misc_feature (33)..(33): n is a, c, g, or t
  misc_feature (40)..(40): n is a, c, g, or t
  misc_feature (68)..(68): n is a, c, g, or t
  misc_feature (616)..(645): n is a, c, g, or t
taacagccgcgggctccaaaagccactggactngctgtcntcttgtgccacgctgctccgcccaaaanaagctgcttgacaaatcgctccgcaatgacgctggcttggtccagcacgaagggtggcagaaggctctcaggttcctggcgggcacctcccatttcttcttcctcctcgctgctcagggccttaaggtcctcagtgctctcagctgccacgaagtccaccatgtcacctggggggtccatccaccagaaggcccctggtgggcatcaagcctgtgttctccaggacttctggagattctgtgtctgaaggcgtctcctcggcactgggcccttccacagcagaaaatacctcttgctcactcccagcctcagggtccggctcaacctctggcagggaagaaatggactcgaagctcatgctgcttctcagtactggttggagaccggccactgggccttctgctgctcctggagctttcagactccctgcgcccctttcccatagcgccccgggagaaaagtaaagcgttggcccgatagtgccagcagtggagggcgcccagcagggagctggcaaagtcggctacactgatccgccaccgccaggnnnnnnnnnnnnnnnnnnnnnnnnnnnnnngagcactggggactccggcccagcccccttctcgttgccctcatgccctgtcagtcctccagagagacctgaaagcgacgcgtgggtcgacgatatcccgagattccggaccgtacagcctgcttgtaacacgttcaagtcaaaacgagt

SEQ ID NO: 349296 - DNA, 682 bp, Homo Sapiens
  misc_feature (69)..(69): n is a, c, g, or t
  misc_feature (79)..(79): n is a, c, g, or t
  misc_feature (129)..(129): n is a, c, g, or t
ccaaaaacccagaaagttgtgggggaaaaaaagtttgggggcccccctccccgtggccaggttaaaggnactgtacccntcaaaaccccttaaaaattggtgccatttaaaaagacaatagacccttcntcaatcagttcacccaaatgagaggacagctctcttctgggctcaatagtcctgagaggggcaagcatccccgttttccagcaagtcccatacacacattggcagtgactagtacccccaccctaaattcagggggggcagtcagaggagctgggcagtgatggggcaacaccccccaaattggggaggagggttttcagtccaacccccagcaggggtgaggccagagatttcaggcaggaattggggggattctctgccctgccccactcctccccaaggcagtgatgacccccacacacacactggtagccacccctctcacaagagatcaattgtggccaacccccaactctcctggtgggaggaggaggtggatcaggcagatgggagggaaaccccatgggaatgtcagttgagtaccccacatgaaaactggggagcaggaatgtagggagaaacccgaagtggcagaattattggtccatcataacatactgaacttcacaccacagcttagatatccctgctccccctccacacagaaaaccag

SEQ ID NO: 349297 - DNA, 1242 bp, Homo Sapiens
  misc_feature (1132)..(1187): n is a, c, g, or t
tcggggctagtctggactacctgtccaggcttccttaggtacatcttctttgtatccattgggaggctctgagactggccccacttggtcctaagaatcccaaggtctttgggagcgtccagcatgttaattagcgtatcattacatactgctatccctttccatttctttttgttccatcactcttctctcaacctgtgtttctttttttactgaggagttagtccccattagttcttgtatcacattttcatttgcacgacattactcgcaggtggtggggagcctgggcttttggggaaccaggctgctctggtccccagcattgcctcctcctagcccctctagtccagtttgcctcccttaccctcattttccaaacctcttgtaccctcctctccctcccccagctggtatgtaagtgtcttgaagttcagtatgttatgatggaccaataattctgccacttcgggtttctccctacattcctgctccccagttttcatgtggggtactcaactgacattcccatggggtttccctcccatctgcctgatccacctcctcctcccaccaggagagttgggggttggccacaattgatctcttgtgagaggggtggctaccagtgtgtgtgtgggggtcatcactgccttggggaggagtggggcagggcagagaatccccccaattcctgcctgaaatctctggcctcacccctgctgggggttggactgaaaaccctcctccccaatttggggggtgttgccccatcactgcccagctcctctgactgccccccctgaatttagggtgggggtactagtcactgccaatgtgtgtatgggacttgctggaaaacggggatgcttgcccctctccaggactattgagcccagagagagctgtcctctcattgggtgaactgattgaggaagggtctattgtctttttaaatggcacaattttaagggtttgagggtacagtcccttaacctgccacgggagggggcccccaaactttcttccccccacacttctggttttctgtgtggagggggagcagggatatctaagctgtggtgtgaaagggtaggagagatgctggaggtgggggtgctgtgttctagannnnnnnnnnnnnnnnnnnnnnnnnnnnnnnnnnnnnnnnnnnnnnnnnnnnnnnnattttgtggcgcatccagattgtgaaaatgtacaataaatgtgtaatgagtaacc

SEQ ID NO: 349298 - DNA, 363 bp, Homo Sapiens
  misc_feature (52)..(52): n is a, c, g, or t
acaacaagcacctgtcccaggcttcccttagggtaacatccttcctttgtancccattgggaggctctgagactggcccccacttggtccctaagaatcccaaggtctttgggagcgtcccagcatgttaattagcgtatcattacatactgctatccctttccatttctttttgttccatcactcttctctcaacctgtgtttctttttttactgaggagttagtccccattagttcttgtatcacattttcatttgcacgacattactcgcaggtggtggggagacctggttcccagcattgcctcctcctagcccctctagtccagtttgcctcccttaccctcattttccaaacctcta

SEQ ID NO: 349299 - DNA, 1509 bp, Homo Sapiens
  misc_feature (42)..(78): n is a, c, g, or t
  misc_feature (1481)..(1481): n is a, c, g, or t
tgatactctatgggcgactggagttcaccgcggtggcggcgnnnnnnnnnnnnnnnnnnnnnnnnnnnnnnnnnnnnnatcaggccaaatcggccgagctcgaattcgtcgagagcggggggcggcgggggtgcggcggtgggctggtcttccgcggccggcgttgcgccgcggcggagggtgggcgcgcggggagcgggatggagccggggctgtgaggccgaggcggcggtgcctgggaggaagggtcggatgccggaccgggggcaccgctgtaggcggtgggtccccgacctgcgagacaggtttggaagcccccgctgcgcccagtccgtgcggaccgcgaggccgcgggcgggtggaggcgcgtctccggcacgatgaaggatttgggggcagagcacttggcaggtcatgaaggggtccaacttctcgggttgttgaacgtctacctggaacaagaagagagattccaacctcgagaaaaagggctgagtttgattgaggctaccccggagaatgataacactttgtgtccaggattgagaaatgccaaagttgaagatttaaggagtttagccaacttttttggatcttgcactgaaacttttgtcctggctgtcaatattttggacaggttcttggctcttatgaaggtgaaacctaaacatttgtcttgcattggagtctgttcttttttgctggctgctagaatagttgaagaagactgcaatattccatccactcatgatgtgatccggattagtcagtgtaaatgtactgcttctgacataaaacggatggaaaaaataatttcagaaaaattgcactatgaattggaagctactactgccttaaactttttgcacttataccatactattatactttgtcatacttcagaaaggaaagaaatactgagccttgataaactagaagctcagctgaaagcttgcaactgccgactcatcttttcaaaagcaaaaccatctgtattagccttgtgccttctcaatttggaagtggaaactttgaaatctgttgaattactggaaattctcttgctagttaaaaaacattccaagattaatgacactgagttcttctactggagagagttggtttctaaatgcctagccgagtattcttctcctgaatgttgcaaaccagatcttaagaagttggtttggatcgtttcaaggcgcacagcccagaacctccacaacagctactatagtgttcctgagctgccaacgatacctgaggggggttgttttgatgaaagtgaaagtgaggactcttgtgaagatatgagttgtggagaggagagtctcagcagctctcctcccagtgatcaagagtgcaccttctttttcaacttcaaagtggcacaaacactgtgctttccatcttaggaaatctggattgttctgtcagaatttatatttacaggtttccaaaggcaataaatggggggggantagggtagtttcctgggggttaggcccc

SEQ ID NO: 349300 - DNA, 1099 bp, Homo Sapiens
  misc_feature (928)..(928): n is a, c, g, or t
tccagatcaaacagtccttgtccctcaggcatcgttttggagctcctgaaggaggccatggtggccagcctcggggacaccaggcgcttcctgattgacggctatcctcgggaggtgaagcaaggggaagagttcggacgcaggattggagacccacagttggtgatctgtatggactgctcggcagacaccatgaccaaccgccttctccaaaggagccggagcagcctgcctgtggacgacaccaccaagaccatcgccaagcgcctagaagcctactaccgagcgtccatccccgtgatcgcctactacgagacaaaaacacagctacacaagataaatgcagagggaacaccagaggacgtttttcttcaactctgcacagctattgactctattattttctgaaggcaaaaatgcatgtttgttagaatggaaacagaaaaacattaaaaagttcattccttaacacaatgtttcaagttaaaccttttgtgtcaccgcccccaccaaccaccacctcctaaatcctgacagcactgtttgcttcccagctagacctgtgtgagaggtgtctggaaatcatgcatggtgtatttgggactatatcaacctattctccacacttcagacaactgtctgcactcacggcacgcacactttgtatcatgcaggccacactcagagctagtcagtacatgaacagtggtgcggtgccagtctgtgtccgttgtgatcacaggccttgctagaccctgatcatctggttctcctctcattaagcatccctaacccccagtcacaccttcctcttacatactgttccccaatggaggcccctggcataggggacagccctgggcatcttcctttggtgtctggcttgttttgtcaactctcatccactggtggctcagagccataaggngggttgattacacaatgccttgtacatgatatagaggcatcaagcaagtaaaatttgacagaaattttaaaatatggagatgttatagctttcccaagatgatggtaaaacccaggttaagtcatcagtaaccttctctattaatatattttttagaaacttggaatactg

SEQ ID NO: 349301 - DNA, 1357 bp, Homo Sapiens
  misc_feature (895)..(907): n is a, c, g, or t
  misc_feature (1027)..(1140): n is a, c, g, or t
ggcagcactgtttgcttcccagctagacctgtgtgagaggtgtctggaaatcatgcatggtgtatttgggactatatcaacctattctcctctcattaagcatccctaacccccagtcacaccttcctcttacatactgttccccaatggaggcccctggcataggggacagccctgggcatcttcctttggtgtctggctgttttgtcaactctcatccactggtggctcagagccataaggtgggttgattacacaatgccttgtacatgatatagaggcatcaagcaagtaaaatttgacagaaattttaaaatatgaagatgtatagctttcccaagatgatggtaaaacccaggttagtcatcagtaaccttctctattattattattttttagaaacttggaatactgtcattatggctaagagaacaaatctgataaattgtgtaacctagtctcttctctacatggtgatgcatttcagcaattataaattaatataaatgaccaaaagtaacttaaaagcatgagatatttgctatttcattcattgggcacatatcaaattataattttgattttaaatggtcacccatgtatttgttgccaagcaagtaaaaaaataccctaacaaacctgatgtgggtgggaggggcatgtcagtaagtggtgtgttcaatgtgtttgtttcatatgggccctttccaggagtttgcaaaccttgtcatacccatatgcaaaactgtgtttccttgcattaaaccagtgaagtttgggttctcttttgtgctatcaatcagttgtaaaatcagagcttcttatatattctactggaataactgcatcttccactcagtcactacaaaaaagcatagtttcagtttgcatgaannnnnnnnnnnnncttcaagggttgtgcagataaggatccatttcggggatagaatggtattgaaagtcgatttatattcactgtgaaaagtggatagtgtacaaattaacaataacggggacagacagaacnnnnnnnnnnnnnnnnnnnnnnnnnnnnnnnnnnnnnnnnnnnnnnnnnnnnnnnnnnnnnnnnnnnnnnnnnnnnnnnnnnnnnnnnnnnnnnnnnnnnnnnnnnnnnnnnnnggcgaccagacacaaaataaacaaagaaaaccaacaggcagcaagacgccacaacaacaggcgagcccacatagaaaaggaacaccaagaaacaaaaaaccaaaacgaacaagcaaggacgcacgataaatacagcgacaggtagagaagaagaaaaagaggacaaaccagaagcgcgacagagaacaaacaagagactccacaataggaagggagc

SEQ ID NO: 349302 - DNA, 454 bp, Homo Sapiens
tgtaatgctgggaccttgaaaggaaccaaaggcccaagaaaggaaaaaaccaggagccctgggcctttcccagaacatcaagcagggtgaggtttctgactgtgttgtgctcccactcccatctccagattggagacccacagttggtgatctgtatggactgctcggcagacaccatgaccaaccgccttctccaaaggagccggagcagcctgcctgtggacgacaccaccaagaccatcgccaagcgcctagaagcctactaccgagcgtccatccccgtgatcgcctactacgagacaaaaacacagctacacaagataaatgcagagggaacaccagaggacgtttttcttcaactctgcacagctattgactctattattttctgaaggcaaaaatgcatgtttgttagaatggaaacagaaaaacattaaaaagttcattccttaaa

SEQ ID NO: 349303 - DNA, 937 bp, Homo Sapiens
  misc_feature (303)..(401): n is a, c, g, or t
tagctttattaaaaaataaatcactgccaggcttcattcttcatatgatcctctaaaaatggacacttcctctgaatgctgtatctcatggcacctggtccaactagaaatggtcaaggaattcatttggctccttgatacatcagtcctcaatattactttctaggtattttatggccagattgcttatatgagtggtcttttggtttggtagtaggtttttatttttaatttctgtactaatgaaattcctgactttaatttctgaaaaccaaaaactctccaagtgtatttatttatatnnnnnnnnnnnnnnnnnnnnnnnnnnnnnnnnnnnnnnnnnnnnnnnnnnnnnnnnnnnnnnnnnnnnnnnnnnnnnnnnnnnnnnnnnnnnnnnnnnngattatccaatatggagccaccatgccagatttgttcatttttaaaacatttttatctcttcaagtcatcttttgatcttttaaaaagcaccttcaaacagctgcaccttccatttgcactaggaaatgaaggtagtgatgggattggcaatgttcctggcagatgtttcagcccaaaagctcttctacagaccggtttagagctggtgccctatgagaatattagggagcttttattttaaattgaactttacccttgtccatgcaaggcattcctcctgaatgcatccatgaatttgtttacttttgcgtcaaacatatgagccattgtcatgctcagcctgtgccaccattgctctgtctgatgtatgtaatcatacaagacctgattttggttctaacacagtggtctttgactatcaacattgatgtttttagagatgggttcttctggttgatacagactatgcattgcgtttagcagatggggtaaaactggcctaaaacaagtctttgcagaatacatgccaatttct

SEQ ID NO: 349304 - DNA, 747 bp, Homo Sapiens
acatcttccggtcactttaccacaagctgcaccgtctcgaaatgccccactgctacctagggacacaggcgagccggacagtgccggaggacccgggggtgcctccctccacgtgcgcggcctcacaggtcagtggaaacaagaaatcccccaatccacagccacgatgactttcaaaatacttcctgaaggcatcaggccatgaagctgcgacctgcgaggacacagcaagcggggtgacgctgagcagaggcttggtgtggagtccgcgcccgcagggtccctccccgccccgcgggtgcttcccgccacctcgctcgcctctgcgtcgcagtgacaacgcggggatgccgaccacaggtggttggaaggagacagcgagattctgaggggaaagaataaggagagaagcagcatcttttgggcagaaggcccgtttccgcgcggtcctgccgaggcctccgggcatccttcacctcagggaagagaaaatccaaccttacttatcacaggcgcgggacctacgttcccttcgggagcagaagaaccaggacaggattaggacgcaggccaggcggcaaagccgctccctctctcccacctccaggacaagcggcacctccagtccaccctcgctccagccctcccgtactctacccccggcatcctctgccccgaagcagggagatgccgggagccctccctaccaggctgtaccggagaaaaacaacctggagccaccacgct

SEQ ID NO: 349305 - DNA, 470 bp, Homo Sapiens
gcttggaaattgtatgaaattcagacttcattgtctatgaatttttattgggactcagctatactcatgtatttatgtattgcctgttggtactttcacactacaaaggcagagttgactggttgcagcagagactgtaatggcctacaagcctaaaatatttactgtgtgactctttacaagaaaatgtttgctgatttctgatagagagttgatgaagagtaagacaaaaatgtcatataggtgaatgcagatcttgtgatcttacagttgtgaaactggaacataaaacagtttgtcggtgggctttattaggtgacattgtgaaacttctgatgacagtcttgcaggtacttaaaaaagtagtacaacaaagtgagtaattcatgtgcagtccaggggaaaacttaacagatagcaaaagaaagtatatgattaaaaaattcaaataggccgggcacattggctca

SEQ ID NO: 349306 - DNA, 552 bp, Homo Sapiens
ctaaaaacataaaacactggaggttagtggaggcccctccccaagcagggagcctgggatgggcagggagtgatagccaaactccttggtcacctgctccaagaaggaagcagtagctgagcacctgccctcacatactgctcttttcccctctccctccacaccagagatgtggtgagctctgttcttctaccaacccagtctcaacacacaaagtgccaccaccttccctgactcagaacccacatccactcaatgtgaactctactaccacgacctccccatattcctcacttctccatcacctccagcctgactccctgtctgccctttcacccccaagattttgcacaggttaaggccagttatggcctttttgaaatctgtaatagctcccctttccccaactctaaagcctagaccttaaacctgttcctagagctatgcacacccctgccccagtttaccgttcctccctcagggcctccgtgacactccatgaaaagaagttcttgcataccggaaagttgaataaatggatgaattcattca

SEQ ID NO: 349307 - DNA, 1105 bp, Homo Sapiens
  misc_feature (18)..(18): n is a, c, g, or t
  misc_feature (24)..(24): n is a, c, g, or t
  misc_feature (44)..(44): n is a, c, g, or t
  misc_feature (52)..(52): n is a, c, g, or t
  misc_feature (91)..(91): n is a, c, g, or t
  misc_feature (209)..(209): n is a, c, g, or t
  misc_feature (472)..(481): n is a, c, g, or t
  misc_feature (499)..(507): n is a, c, g, or t
  misc_feature (1056)..(1056): n is a, c, g, or t
  misc_feature (1087)..(1087): n is a, c, g, or t
ccccccaaaggccccccngcctanaaaaaaccttgtgcccccanaaaaaacnaaacggtgaacaacttccatcctccttcaagcgtccagnaaaaatgggccataagaaatgtaccccatgccaaattgaaatgtaatcctccattcctcccactggccatagtaagatataaactattccctttgccctacccttttactgcccttanccctggaaatattgggaaaataagcccatatcagtgagatttacctaaaaacaaaggaaggaaagtcactatggaaaccaagtagatgctttttgtaagtttggtggagcataactggcccagaagtctgggtgcctgagttctagttcgtgctctgtcaactggtagatttgtaattctaggtcttggttttcttacctggtgaataagtcatgatctctaaaacccttcctgcccttaatattgtctgaatttcaaggggnnnnnnnnnntctggttcctttaattannnnnnnnnaacacttaaattcctaactttattagacaagaagtatggcccacttaacagttaaggaacgtaaatttgttattggctcgaaataataatttgacacaatactagtcaaccatttagaggccttggaaaaagaagaggaacagcactgaaaattccaagtatgattggaaattatctgggagcggggaattaaatattcaatgcatgaaagcaattgtactggcttctgggaaaaaggaaacaagaacattgctatggaacttgttacccagagaaaggaagtgaaaagatttacaattataagcacgaaattcattggcagattacctgctttatctacagacagattgttttggggtttggttttgtctaggcagcctctggccaggctccttaattgcttgctctgctaatatttcagcttcctctcttgactccttgaggaaccaaccgctctttggaagacaaacacttagccacctctgtgctccagggtaaccctgtggaagctctgctgttctggggggcaagctttctttccaaagggantgaggagggaagggcaagcaggcagggtccngccagcgtcaggccttct

SEQ ID NO: 349308 - DNA, 857 bp, Homo Sapiens
gtcaactcagtagctctaggagcaccatctgccctggcggagcccggccttgccctcaggaagcatcatggaaatagcaggagcatgttgatttcttggttaggttgcatgataataacaagagtcagaacactaagtcgaaacaacttgcagtatgcatttcttcacaccagtacattcttaagtgtacttgtttataaggaataacataaactaatctgtacctttatatatatgtgtgtgtacatatatacatatataaactgtatagtgtacatggtaatgatttattgctatgccccagatccttaatgtagttctcatcctccgcatgccctcagccacaagcgggtgactgactgttccctgatgatttggcccacctcctgtgtttggacctctagggaggagggttttggtcatactctccttatcctcgtgcacagaaatgctcagggtccccatgtgcctgttgttcagccctctctcttgttccctttctgagcatgtggtccttccccaggctgtgggacagctgccttcccacgaaagtgtaaagcagtattaagatcattactgcatgtgccctaaaaacccaagttttctattcccttaggacagaaaattgcatgtgaggtgggataatcgagtttcagtgacccacgtcagttacacattaaagccagaccccatgataaaattccacaaaatggaaataaaactcaaatttctttagcattgtgtaaataaatctgaatgtgtttaactttgtactggtaattttctgtatatttggaatatttgggttaaaaataaaacagactggactttgttacctgacctactgaaatgactaa

SEQ ID NO: 349309 - DNA, 2544 bp, Homo Sapiens
  misc_feature (95)..(103): n is a, c, g, or t
  misc_feature (161)..(161): n is a, c, g, or t
  misc_feature (2460)..(2473): n is a, c, g, or t
ggaacttccctttaagggatttggggggcttaggccaattaaattccttttcccatgttcccttatccaggtttaaaataaggtataaaaggttnnnnnnnnntttttattttaaaggtaccagaataggtttaggttattcccttataaacaaagttccnttaaggaatgttactggtgggaagaaaatgcaattctgcaagttgtttcgaaattaaagtttcggactcttggtattataaaggcaacttaacccaagaaatcaacatgctcctgctatttcaatgatgcttcatgaggggcaaggcctgggctctgctagggcaggatggtgctcctagagctacctgagctggacaaacccatggcagacagaacagaaagtctggcacctgctgactccggccctccctgtcacttcatcacacagcaaatcttaaaactttggttttttcaaagaacatttaagtccatgttcattttcctgcttcagggaagatggtagcaaagttgaaagccgaatcccttcctattttagcacttccaagtatcctggatgaatataggggcgaggggctacactgacaatgagcaggatgcactctaggtcattgtggacaggcacggagctcttgagagcactgctcaaaggaaagagggaatctctatctggatggttggcctggaaactaaataatgactaatgccaggccagccccgttaccctggggtgggtatggatggccctgggctcccctccgtatcctggtatcgtgacgaaggccatgagaaccagctctggtttacagactcgatgcaggagctggaggtggccagcacattaccagcctgtcaaggatgaaagaccaccttgggcatggagaggcccagaggcaagcatcagagcaagagagaggaggtgggaagtccattcagaggcagacgtagattctacgttccagttacggctgatctatggactctccagagcccgcccccagaactgccgcaaactcgtccaaaaggcttttattctttgaaatagagttgccattgaattaaaagcctacaggagagacgggcctggtctgtggtctcactaaagccccaatgccccaattaggtcccagagaagaaagaagagtgagttccctacctggatttaagaactcggaccactttggactggtttgtccaatctctcttataatgctaaattccattgctgaagcctccagaaatgatctcttctgctacatcaagcctgggagtttacacaatgatacactatgttttaccttcaaagataatgctcctaacatgagtaggacaaattagaaatctatttttttagaagctgtaacagatttgggctttcttactctctggctgagggcacacatttgtgagtgagcaggttgataaagaaagctaactagccaataatgagaatgagccaggctggctgtcagtcttcaaaccaacagagctagccagcccggggtggaaaccaggatggggagggagacccatcagtggagagtccactcctgcactcttgagcagtgaccctcaatgaggggaggggcagtttctgcaaacgtatttaaaattcccattacttttgttttcagccatgaaagacaggaaaatacaattttctgttcaccaaggtggcaaaaaggtgctaaatactgctaggaaacaaatgccactgatccctgtcataaagaacagcaagtcatctacaagaaggcagccttgctcaaagtggttagcactcgcatgtgtaaagatttccaagagttctgaagacagccagccagcactgcttatcacacacacggggaccctgaacaactgactccatcccaagaacattgtgaggttcaaatgacattatgtgagtgaaggtgctctgaaaatttgccaagttccacagaaatcccagatatcattaaaagcgaagagccctatcgtatatggttagagaagaatattgagtttcctacgtcttaaaatgagtaagaggattaccatgtattggtgcatctgcccacagtgagtacatgctgggagaaaggtgagtggtataaacagttcttttctgagtaccaaattcactttgggcaggagggagggtggggcagaggctgacgttttcatttgtgagctggtgtatcttcggaattatttttaattttaaaaccatgcaaaatgaataagcaaaaagactagtgcactccagccctaaccatattatcttcacaaaaactgcctcaactttattttctaactgaagctccctgactcatttcattctactgcagttttaacatctctaaaagtctccatccactctctcccccactttccacgcagctgttaatccattctggggaggagagaacttagccatctgctcacattctgactaaagttaatttggcacttcaaatnnnnnnnnnnnnnncacacaaaactgctttctagccacaaaataaactagtagcaaatatcccgggaattccggaccggtccagc

SEQ ID NO: 349310 - DNA, 429 bp, Homo Sapiens
aatttctgaaattgcaatcccaatctccccaacactccttcacccccttaccttgctctcttccccctacagttcacctttcttgtactctccaatgaattcatattatgaattctattgtttattatctgtcaccctctcccccatctagaataaaactcaatgattaagggtaggagtctttgtctacttgttctttatgtgtcccaggcatctaggttagtgccttgtacacagttggtactcaagattagctgttgaatgaatgaaggagaaaaaacatctccttcctggccccttttcccttttcaatctctttgcacatcaccagggaaggaaaagaaacacacctcaataatcaattagtttgaggagagctgtaccctcgttaagtctcttagtgtgtggaactgtttcttcatctgtaaa

SEQ ID NO: 349311 - DNA, 1046 bp, Homo Sapiens
  misc_feature (11)..(11): n is a, c, g, or t
  misc_feature (659)..(659): n is a, c, g, or t
ttgaaaccgtncgcttgcaggcccggtccggaattcccgggtcgacccacgcgtccgacaacgagacacaaaaagagaggcaacccctagaccaccgcgaaggacccatctgcaccatgaccgagaccaccaagacccacgttatcttgctcgcctgcggcagcttcaatcccatcaccaaagggcacattcagatgtttgaaagagccagggattatctgcacaaaactggaaggtttattgtgattggcgggattgtctcccctgtccacgactcctatggaaaacagggcctcgtgtcaagccggcaccgtctcatcatgtgtcagctggccgtccagaattctgattggatcagggtggacccttgggagtgctaccaggacacctggcagacgacctgcagcgtgttggaacaccaccgggacctcatgaagagggtgactggctgcatcctctccaatggtcaacacaccttccatgacacctgtgatcgggacagccacaaaacgagaccccccagcccatttaccagaacaagcaacgtggccaccaagcccactgcagccaagatcttggggaaggtgggagaaaacctcagccggatctgctgtgtcccccccccggtggagcgtttcacctttgtagatgagaatgcnaatctgggcacggtgatgcggtatgaagagattgagctacggattctgctgctgtgtggtagtgacctgctggagtccttctgcatcccagggctctggaacgaggcagatatggaggtgattgttggtgactttgggattgtggtggtgcccgggatgcagccgacacagaccgaatcatgaatcactcctcaatactccgcaaatacaaaaacaacatcatggtggtgaaggatgacatcaaccatcccatgtctgttgtcagctcaaccaagagcaggctggccctgcagcatggggacggccatgttgtggattacctgtcccagccggtcagcgactacatcctcaaagccagctgtacatcatgcctccgctgccccctct

SEQ ID NO: 349312 - DNA, 977 bp, Homo Sapiens
catgcaggctggtacggccccgagagtatggatctcgagggtttgcagcctggcaaggataacctgggccaccacttgacaaaggcctggctcagctaatccttgtcacaatcctcaagggtccaaaggagggtttattttgcagggtggacccttgggagtgctaccaggacacctggcagacgacctgcagcgtgttggaacaccaccgggacctcatgaagagggtgactggctgcatcctctccaatgtcaacacaccttccatgacacctgtgatcggacagccacaaaacgagaccccccagcccatttaccagaacagcaacgtggccaccaagcccactgcagccaagatcttggggaaggtgggagaaagcctcagccggatctgctgtgtccgcccgccggtggagcgtttcacctttgtagatgagaatgccaatctgggcacggtgatgcggtatgaagagattggtgagtgggactgcgaaagtgcggaaaatggggacatttggagctccctgccttcacgacaggcaacatggggagcagagaggcttgaaaacccagggactgttttgcagcagggtctcctctcggaagagggatcgttcccaggctaagattgcattcgtagttagctccctttaacatctcttaactggactccagccaactcccaaggagataggactggatcatttggtgatttttccttcagagcctccactccctcctctaaaaaacatgaaagttgagctttggcaccagctggaaagaccttctttagggcacagacactgcacacacaatgaggcaagaaagagcaccccggccttcctcattcagtgcttgtagatgaagaaaacagcagagcgggactgaaagccacctccaaaacatcccttgcaagcttgagacagaagctaaggcacttcctgtctagtgtgaagggtgcctgccaacccatacca

SEQ ID NO: 349313 - DNA, 1665 bp, Homo Sapiens
  misc_feature (250)..(251): n is a, c, g, or t
tggagaaaaaacctataaatgtaatgaatgtggaaaggccttcaacgggccctcaacttttatccgtcatcatatgattcatactggtgaaaaaccgtacgaatgcaatgaatgtgggaaagccttcagccagcactcaaacctcactcagcatcaaaaaactcatactggggagaaaccctatgattgtgcagaatgtggaaaatcttttagttactgggcatcccttggtcaacaccctggaaattcnnactggagaaaaaccttacaaatgcaatgaatgtggaaaggccttcagttactgctcatcccttactcaacatcggagaattcacaccgagagaaaagccctttgaatgcagtgaatgtggaaaggctttcagttatctctcaaaccttaatcaagcatcagaaaactcatactcaagagaaagcttatgaatgtaaagaatgtgggaaagcttttattcggagttcatctcttgctaagcatgaaagaattcatactggagagaaaccctatcagtgtcatgaatgtggggaaaaccttcagttatgggtcatcccttattcagcataagaaggatccatactggagaacgaccttacaagtgtaatgagtgtgggagagcattcaaccagaacatacaccttacacagcataagagaattcatacaggagccaagccttatgagtgtgctgagtgtggtaaagcctttcgacattgttcatctcttgctcaacatcaaaaaactcacacagaagaaaaaccctaccagtgtaataaatgtgaaaagacctttagccagagctcccatctaactcagcatcaacgaattcacactggggagaagccctataagtgcaatgaatgtgacaaagcctttagccggagcactcatctgactgaacatcagaatactcatactggagagaaaccttataactgtaatgaatgcagaaagacttttagccagagcacatatctcattcagcaccagagaattcattcaggagagaagccttttggatgtaatgattgtggaaaatccttcagatatcgctctgctctcaacaaacatcagagactgcatcctggcatatgacaattctaggaacatcataaatttaggggagatatttactttagtttgtccttttgttaagtactgaagaatcagagtggatttagaaactgccttgaaatcttttaaattttcactatcattgttatggaatggaaagtacattgggctgaactaatccaattgttattaagcccactctgtgacattagaaaactctactgttttaagctttagtttcctttatggaatgaaggctttggagtagattatttcaaaggtagtttggagttttataatcagttttgtatatttacaatattttcttgaatgggtttactatacatcagcattttgctgtgttgcatctagaatgtgtatgtttatgcatgttttgccaatagaatttgtgcttcagtaactagatcggggatctagtatgctcctggtctaatgcatttacattgtttaggtaactggttcctaataaaaagaattataaaataccctcaaattaacaattcaattgcatataatagcctaactcagtaagaatattaaaacttactattattctta

SEQ ID NO: 349314 - DNA, 1842 bp, Homo Sapiens
aggaaaactgagcccgtggaaaacctaaccactgggcaggcagaatttgtttgagggatagaacgacaacaaaataaatgttcctgcagcctgagatttcaggtagagtactgactaaggtttaataagacaataggtgacctgaggacatgcaagcttgtaaaatgcaacagcctcctgctagagtgacttgtacatgagcttgcttgcagaagactagattagatgtttctcaggatcccctcctgcgcaggggttctctgattttcgtgttctctgcccagatgggctgggggagttgagagtgtgcttattttcactgcgatcatgagaccacagttctgggttatctcctctcatacatcaagccccagaggaggcggcaagaggaacagccacaaacaagtactttaccccacagcttagtggccagtaaacaccctggggactaggaaaaggaaccaactgtaggcacctctccagggcctagggagacaagtgtcctctcttctgcatacatttgggctccccttacagagccctttgccctggctctctggtccttgttgctctaacagtccagatgtacacccagcctcagggggaaggcagctctctccagacagagtctcagggcccagcaaggtcaggttatctgctttcattcagggcaacaaatgatacaaatggtgccagggagtggcaaggccatgggggtaggtgggggtgtctttttcttttcataaagtaacaacagacgagactgaggttaaacatcagaaaaaaacctctggaatgaccttcctcattccaggaggccctggaataaggaagaggcttctttctgagggagctttgaggaattttgacagctgttgacatgggatttgggaaaggtgaagctgtgactggaggggcaggagatggtccaagtgtccatccagagatgagactcttagaatcaaagtgttcagcccaggaagtcttggagatcccaccttctgtggccctgcaccttatgggaagccattaagggggctcatctaggaattctggttacagcccagtgctcatcccagcgtatgctgcctctttagggcagccccaagggccagccagcctgtactctgggcaagagccaaaaatggctaggaatgtttgactcccttaatctcttccccagctacagaggaatcttttctctgcctggtctcagaatgggactgccaactggctcattggtgggagacacagtatcctcaaacctgtggccactggcatgacagtggtgctctgtctccctgggtgacacccaccctaggcttcctcctggatgtgatggggattgccagagaggctcttagcataaaaggcattaggtgggcatttttctgtgtgcccccaaaaagctccatggaaacaggcacctggtagctgcggaacacccgtggacttgtgtatatggtcataggctttgggaagacaggacgtaaaggaaaatgagagaaacaaaatgggtcagatagctttggccacagccccaggcagcctttggggcctatgacacttagtgcccttagatgggatacatcttgcctcggccccaagactcctccaacttacccgtcccatccagggcctgcacagcttagagaggctcacagcttggcaaatgctagggcttcatcagaccactgacttgactcagtgtttgttaaaatggaaccactcccgttggcctactgtttctctcctgtacttcttgtaatgatagttatttattgactctggtagcaggcagttcttaaataaagatggtttctcaacctgttggggaagctg

SEQ ID NO: 349315 - DNA, 452 bp, Homo Sapiens
ttttggattgaataatttacttccctgtattattatagtaacaggagcaaatacataaatttttattaataaaacaaaaaagatgaaaaacagaagcaacaaatgaagacatccatactgcccataacacatcagccatatgatcagaaaacccatttctaaagagcaatggttgctggtgtcacagagttttattgcattcatcgggggaaagggagatggttggaatgaaaaagatccatcagtcttctgacaggaagatgttatatgggggctccaacccctaactgggtactcctcttgctaccacctttggagcagaagatgaaggggagagggagcttctccctatggcctcatggcttcttgtgagacagatcagtccagccagatacagagcaaagcagctttgcatcaccacaggccagttgctgatgcccagctttatgtct

SEQ ID NO: 349316 - DNA, 2055 bp, Homo Sapiens
  misc_feature (51)..(87): n is a, c, g, or t
  misc_feature (252)..(277): n is a, c, g, or t
gatgtatacgatcactatagggcgaatggcagcttatcgcggtggcggcgnnnnnnnnnnnnnnnnnnnnnnnnnnnnnnnnnnnnnatcaggccaaatcggccgagctcgaattcgtcgagagcgggtaagggaataggaggtggggagcaaagagggcagcctgactagatgcccctgctgaatctggtactttctgcacagccttgagtgactggagtcccctaatgactaataaacttgaacatgtannnnnnnnnnnnnnnnnnnnnnnnnncattttaggaagtggttctcctactggaaaatatgctacagaatgaaagtttgtaattgaaagaaaaagaatgtattcatctgcttcttgggtttaagcacacacctgaaggggagatattgggggacacggtggccactcgcggtctgtgtcatgacacttcccattcacatcattggcctgcgttgctggggctttgaaccaccaccccgtactttgttttgcctgtagagtgttgtaaaatattttggatgtgaatgtccttgcaggccggttagtctccagtttccacagagaccacctacccaccaccttcccaggtcacctgcctggtccctgaaagaaagcatttgtgtgggcaatcccaacatgaaatgtagacagcgtgaatacggacaggaggtgatgccatattcacagtgggggatggagggcccccacccctgcttcacaaaataatgggaagtgactctagtctttgtaagcaattttcattctcattaggaagttaaatgtagattcacagatacatttactttcagaatcctcaagaggatttcaaatgctaacttttagtttcttgggattgatcaaggcaagagaagtggctttaaccatgccagccagaatgaagcatcatgggtcctgatggtttcccgttttcatggtaacaaattcgcacagaggttttgctttatactgtagaataccgactttcatgatgacaaccttggtttatgcatgaatattgcagtatttccatatagcaaaataacatttctacccaggataatagtcacagttttccagggagggaatgatataattttcatgacaatgtcatgtgatgatagaatttctccattgatgaatctctagtatgtgtgtatactttatttacccatacgtatattttatgaccatgagctaagttgttatttctttcattcatatccctgctgaaatattggtactagcaacttaaagttggcaagtctcatcttcagtaatacggatgccatgggagtggccaggccagattgaaggtgaatatggagcagtagcagaagcctcattccagaacccatctggccagagaagcagcagcatcctgggggatggccgtgcatggggtgtacactcgctataggcataggcccggcatggctgtcgctggacgccagctgtgcacacccagccacacctgctgcacgccgcgttagtgtgcggctccgggcctgagcattcgcaaagctcgcttctccagggagcctcctcttggctttggaaaagagcccagggacttaacgtgctgcctgttgtactctgtcccctcatgactttttagacacagggactaggacatcgaccaccctctgcccctcctgcagtcagaacccgagtagtgcaagaacggccacccggttttgccagcgttcagcgtctgcccatggacccataaggcacattagcgtagggggtctctttacagcagcctcacagacattcccgtccttactggtatggtgtagactgtgtttcagcatcactctaccctcccatgtccttagcattgctgtgcgtgtttccaggcacttaggacacccttccccacgttgccatcttactgacagttcaaatgactctccttttttgttcgttagtaacaatcttcatttgacaccttaatacatttctgactgttcttaaaacagtggggatgcctatatttcccttgagtttttgtgactgactttggctatatatacctttctggg

SEQ ID NO: 349317 - DNA, 310 bp, Homo Sapiens
gcagcagcatcctgggggatggccgtgcatggggtgtacactcgctataggcataggcccggcatggctgtcgctggacgccagctgtgcacacccagccacacctgctgcaccccgggttagtgtgcggctccgggcctgagcattcgcaaagctcgcttttccagggagcctcctcttggctttggaaaagagcccagggacttaacgtgctgcctgttgtactctgtcccctcatgactttttagacacagggactaggacatcgacctcccctgccctctccctgaaataaagaacagcttggcag

SEQ ID NO: 349318 - DNA, 1031 bp, Homo Sapiens
agggagcgcgtgcgtaatgcgggtgctccccgtcacacgtcgcatggtgtggatgacgccttcctttctgaagatcgcccgaaaggaaacccccggtggatacgggggtaaattccctgtgttacaaacgggacccgtgaatggagagggaacatggcggcccccccagtaccccaattgggggggcaatgtatgtcccccgtcagctggctcctttctggggccacaagccccagaccgctcttcagccacgttcccagcttctggtcaaaccgccacgccgagacataggcattgtgcctcaggctgctctgcgtggccaggggcacagtgacatagatgggaccatccaccagcaccggcgttccattactgctcagcaagtggacgctgacggctgtgacgggggtcaggtcatgcctggtgctgtttcctgttccatttccgtctaatcctcgcaaataaggaaaactgtccacctccgaaggggagctggcggccgtgagaaacgcggtcaggtcactgtagctggtgttctcaggcaacctcagagcccttctctggaaatgaacgcgaggctgtggccgggcaccttggaatcctgatactatttggacgacatcttcatataccattagagtggcagagcgttctggaagcaggccaaggctcagagaggaaaatacaggtaaccggattggcttccatggggcagagtttggcacgtaggcatgcttcgaggcggtgacaatcaactgactgcccagcttatactggaacttgataaaggcgacgccatcagtccccgaggtgccagaggctatggaggcctggttggtgaagatctcgatgagcgcatctgctacgggctggtgggtgctggcgtcgctgatgtgcacctttaacgtcacctcttgggctccggcgccgggctcccgcagcgtcttggtcaccgccttccagacgtggcagcccagcaggcacagcagcagcgtcgcggacctgctcatctccgccgcgtatcgaagaat

SEQ ID NO: 349319 - DNA, 1499 bp, Homo Sapiens
taaagaggggaaatcaacctttccaaagcagaaacaaacttggggggaaagaggaggtaaaaattacagtcgctttttcgaaatgagtctgaatcgtaaaaccataaagaatggttttactcattctctgtcagccatttgaaatcaataaactatgattcctacattttgtttgtattacacaaaaagtaaacaacaatgaaagctgtttttaaaagaataaaaaccaccaaccaccaaatagaagagaaccccagacggttctcttggagggatgtttatcaccagtgccaaaagcctcccccctctgaaatgtttctctcagttgacaactttcaaatgatttaaagaacatgaagaacaagtagaacatgaagcttggatctgaatagtaaagaataatattggagtggtatttacaaaggagaggcagatatatgtgcctagcaccagatttttcaagtaagcaagttcagccccaaactaactgaagttttacatttttaaactctctccattatttcccagagttggaagctgtgaaatgtttcagcatggtgctattcactaatggtgtgaactcaaaaggtgggttttctgcagctgaactgattctaagtctcaggactccaagatacctccagtccaagtgtcgtggactctactggctttatacacctaatttgggactatccattttttccttctttaaagctggctagggaattccttcactaatgataatgtgtgcaaacacacacacatattgaaaatctataactaattctagcagccaaaagatgtttttccttaccagaaattacccaaagaaagttacattagaaataatatgactaaaaatatatttttaaagctatttaatactcatgatgtctaaactttcaatttattgtctgatttctggatatttctgtattttagattctacagacttcagattctgaagcttgttgaaaaagctaagttcctcaatatggatgaaaatctatctggctgtacttttagaggggaatttttctacttttgaaaaaaattctgaatatttatatatagtattaacagaataccccagtaagtcatatttcagataaatattctatagtataatttgcatcatacccaatattttagatattaaaataagggtaaaatttggaatataatcacttgtctgcatatttcccaatgtaagttttcatgtagaatattaaaatttaaattgatatttggatttataagctgttttccctgtatactatacgtatctattagcaatagagacaattttggagtcatggtatagtgaacctctctggctctccttgcacaaggctccatgagtcagtctgggcagtgcacgctacccttgcataactcactccccacactcaggcttaggggtactaacatgcaatcctaggacaacacttgacactagcactgacattttaaaattcaatccaaggaattccggaccc

SEQ ID NO: 349320 - DNA, 749 bp, Homo Sapiens
accgtctacattaccaagagaagcccgaggccaagcagtgaggggctccgctttgagtcacagagtcgggaacaacattggaactggacatcccggccacctgctgtgggctctgaagaggccatgcctctccctagtgtagcaatggtctccattaatacaggggtatatattgtatagatataaaacacacaacacacaattacgttatagaacaataattcaatatttctgcttcttagtaaaatatgttaagcacagtatttaaattgcatttctctgaaaagcatttggtatattaaatagcagaaggtatattaaatagctctagaaacgtttgctggcatactcttaacagcataatgattctaaagaaattaaaatccactgacgcatagagattttttcctttataataccataaactgaacaaaaatgtgaaaaactactttattcccaaaatgcagacttgatagcttgctggatattagcaggtggctacataatttttctgagcttgagagaaaggatacatattgctgactgtgattttttttaaataccaattcggtaggggaaaaaaggattcagttgaaaggtgaaaatgaaagactgctatttccacttagtatccattctgaaaaatttgtatgttttcaaaagatgttatcatagttagaagtaatgttgaggtgaatacagaaaatgctatataataggaacattttgtgagaagagaaaatgatacc

SEQ ID NO: 349321 - DNA, 433 bp, Homo Sapiens
  misc_feature (24)..(24): n is a, c, g, or t
  misc_feature (29)..(29): n is a, c, g, or t
  misc_feature (64)..(64): n is a, c, g, or t
  misc_feature (209)..(209): n is a, c, g, or t
tgtttgaagtctcgggcccagaanttttncttaaggggctcagggtcccaggacagcttgaacnccattttcatggcccgctgaaagcctgagggcttccaagacctgctgcatcactctttcaaagtctggggtttggtaggctcccaggatttccctcagcaggcatttgtgctgccgcagggccgtctgggtgccccgcagggtcntcctggatgctctgtagcctgcggtggaacgactccctcactgactgtgtggcaaagctaagctctgccctgacccatgtggcattggccaggatgggggccaggccctgtgggatgctttgctgcccgtctcctgaggcaccgactgcctctcctcccagtgtccccaagtgcttcctcagagactcaacctggctccagaactcaccatccactaggacctt

SEQ ID NO: 349322 - DNA, 1402 bp, Homo Sapiens
  misc_feature (345)..(359): n is a, c, g, or t
  misc_feature (378)..(378): n is a, c, g, or t
  misc_feature (981)..(989): n is a, c, g, or t
  misc_feature (1192)..(1200): n is a, c, g, or t
tataaaatggtatgcaaaatatgcatgggctgattttacctgctgacttcctttaattttgaattatccccagatgttttcagaaatttgaaattgttagtgttttaagattaatgaaaccatttccttgagctgattcacagtctatatgatgagcagagtagaattactgctgtttattaaacagaattcagagcgaatctccatctctctcccctgccaagcatctaccagaagccatttagagaaaaagaatatttgcccatttgattttaggctaatgcaaatgagtgggaattctgacacatgcaaacgtgttcagaagaggcaaagaagtactttaannnnnnnnnnnnnnnaattattattgtctcttangtttggatattgatgggatatacagagtaagtggcaacctcgcagtgatccagaaactaaggtttgcagtcaatcatgatgagaaattggacttgaatgacagtaaatgggaagatattcatgtcattactggagccctcaaaatgttttttcgagaattaccagaaactctttttacatttaatcattttaatgattttgttaatgcaattaagcaagaaccaagacagcgagtcgctgctgttaaggacctaatcagacagttgccaaagccaaaccaagacacaatgcagattcttttccgacatctcagaagagttatagaaaatggagagaaaaatcgaatgacctatcagagtatagcaattgtttttggtcccactctattaaaaccagaaaaagagactggtaatatagcagttcatactgtgtaccagaatcagattgtagaattaattcttctggaactgagttccatcttcggacgttgattcttactgaagacaacctgtggaatagaagctggattccatcagatttcaaatgtttatacacaatgtattttattttttggaccaagcagtgactctttgattttgcacnnnnnnnnngagggatcagaagggaaggggagagtcgagatgtgtgttaggccctcatatttgctgctttgttgcaagttgatataactgcgtgtaattatgaattcattttatcctgaatgtttgcatcccatactctgaatttcagtaaaaatcaaaacttaaaattctaaccagtcatatacacctggataattggtaagaaactgtannnnnnnnnccctgaaatgggatatgtaccttcttctcaagattcatgacttgatagaacaatactttcagtttatgtgcacaggctctgggggcatttttaacacaaacatgaaggtttatccattttgaaacctgggttattcctttcgggggtctctgcattgccggggccagccttaatgccaaattcattatataccccaaataac

SEQ ID NO: 349323 - DNA, 345 bp, Homo Sapiens
tacattgtgtataaacatttgaaatctgatggaatccagcttctattccacaggttgtcttcagtaagaatcaacgtccgaagatggaactcagttccagaagaattaattctacaatctgattctggtacacagtatgaactgctatattaccagtctctttttctggttttaatagagtgggaccaaaaacaattgctatactctgataggtcattcgatttttctctccattttctataacttttactgtattcttcatagcaaatcatttacccatgacagacttgatactaaaaggagttgagtaactttttcaagttacaaagacagcaagtagcatag

SEQ ID NO: 349324 - DNA, 525 bp, Homo Sapiens
  misc_feature (400)..(408): n is a, c, g, or t
  misc_feature (444)..(444): n is a, c, g, or t
  misc_feature (456)..(456): n is a, c, g, or t
  misc_feature (472)..(472): n is a, c, g, or t
  misc_feature (489)..(489): n is a, c, g, or t
  misc_feature (498)..(498): n is a, c, g, or t
  misc_feature (503)..(503): n is a, c, g, or t
tatgctacttgctgtctttgtaacttgaaaaagttactcaactccttttagtatcagtctgtcatgggtaaatgatttgctatgaagaatacagtaaaagttatagaaaatggagagaaaaatcgaatgacctatcagagtatagcaattgtttttggtcccactctattaaaaccagaaaaagagactggtaatatagcagttcatactgtgtaccagaatcagattgtaggaattaattcttctgggaactgagttccatcttcggacgttgattcttactgaaggacaacctgtgggaataggaaggctgggattccatcaggatttccaaatgtttattacacaatgtattttattttttggggcccaggcagtggactctttggattttggcacnnnnnnnnngaggggtccagagggggaggggggagagttccaggngtgtgttagggncccccaaatttgccgncttgtttgccaggtggnataaccgcngggtnaatttgggattcatttatcccg

SEQ ID NO: 349325 - DNA, 545 bp, Homo Sapiens
atactttgggttcacataaggaaacaggaagcagggatctggtgtctatttcttttgccaagcacaatgtaagcacagttctaggctgtgtttgtcttgtgagtccttcctggctcccctcaggcactggctttctctcctctctcctgccttctctttctggatccaccctccaaatgtgggagttccttagggttggattcttggaactcttctgtgtctatgtgtactccctagatagcatcatccgtaagtgacttaaatagcactcataatgcttaaaaacacaaaatttccgttgctagccgggacgtctctgaattccagaatcacggtcaactgaagaatcccctttatacgaccttaagttggaaatgccggtgatttatccaacagcctccttggtcggggttccagccgtatcaccggcatctcatttaactcacggtatgcacatctgaattctacggactctcctagactggcactcggctccatctcagccaatggtaccacccagtttcctgagctaagtgccttctttg

SEQ ID NO: 349326 - DNA, 618 bp, Homo Sapiens
  misc_feature (566)..(566): n is a, c, g, or t
  misc_feature (593)..(593): n is a, c, g, or t
cctctccccttgcggcctttctaacgttggccctgctcttgtggcctcccgcagaatgtggatgacgcccaaaagaagcaagatggaagtcgacgaggctctagttttccggcccgagtggacccagcgttatttggtggtggagcctccgaagggcgatggggacctggtgcctggtctgtcgccgcctcatcgtagctacccgcgaacgcgacgtcaggcgccactacgaggctgagcacgaatactacgagcggtatgtggcggacggcgagcgcgcggccctggtggagcgtctgcgtcaggacgacttgcccgtggcctacttcactcctgaagagagagctgctcgtgcaggactcgggctctgccgcctcttggccttgaagggtcgcggctggggtgaggggggactttgtataccaatgcatggaggtgttgctgaaaagaggtactgcccgagcatgtaagcgtcctgcaaggcgttgacttatctccagatatcacaaggcagaggatcctgagcattgacaggaatctacgcaaccagctttttaaccagccanggacttttaaaagcctattcttttgcnttggacaacaagcctttttggctat

SEQ ID NO: 349327 - DNA, 530 bp, Homo Sapiens
  misc_feature (178)..(178): n is a, c, g, or t
cttacatctgtcaagtggttccatacttcttgtaaaagtaaagtttgggtattgtttgctgtatcaatatgatggctttccatgcattgtctcattatccctaggatacgtgctaaaggaaaactgtcctgtaattcctgttaatatattgttaatgtcagacgtgatgtgataccgntagactgtccaaatgtacaacaatttaatggtgtttgtagaactgatatgtcttaaatggtggcatgaaatatggtataaaaatagatttgttttctattttcaacacctcagaattgagggttcatgggccaataagtgcaatatttaatgactcactcagtgtatataaactagtatgaaagagtgaattataatgaatgtgtgagatgctttgatagctgtgtgacttattcaaatgattttcttgtagctgtatttgtctagtggtgcaatttatacagtaaatacttattggtgtcatgtaaacccctctgtcctacttcaaaatacttttttcttataaaaccaaa

SEQ ID NO: 349328 - DNA, 2993 bp, Homo Sapiens
ttcccctgtgtaaatacccataaaatttatggaagatctttcttcaactagaggtataggattttagacatttctataccaacacggacattagtgttaagtgcagttgaattaattacactgaaaactgtattccaggacttcagaacagaagccacgggaatgaaacacacatacctaaaataacctcagcacaatttgtgatacatcacactaggaacaggaaactacttttataaatgaactttttgaactgtacatacacagggctaacaatgttagataatccagactcttatactctcatgattacacataaagtttctcaattattgaataatctatttcatattatggaagcatatctttctgtaagactcactgatatatattatactgatgcaaatattaagtagggcataaaaataaaatttatcaaagatagaattttatgtactcatatttagttctttcatagcctcttttgtttagcaaagaaaatgacaaagcacataactcaggcgtgcactccccgaacttccccactatacaggtggtagtgcaaccatttctccatccagttcaaactcttctgtcccatccgttgaaaaaagataagttagtggtttccatggagactcttcaaggcaggatggatagagtttccccacagtgcatcgaaaatctctccccaagtcccacagtacacgttcagatatatgctgccgcagagaccaccggtcaagttccaggtcatattggtaggtgacgtatttagctcgctcatttaagtgggtttctcgcataaacacacatagagaatttgagatcacaacagctctaacacaggggtcagagtacctcttagcagggatgttggctgccattttccactcatttttattacacatcataaatttccacagttactgaagacccatctacagtgccagagggggagtcttatgccggaattggtagcaatatgcaaccctccaatatagaaaattttatcaccaaaagctgcagctgaagcaaaggacctactagtctgtctcatggccatttctacccatgagtcagaccttggaaaataacagtacatgaggttcagtgtcatcacataaatgcagtcatgaaccacaactgctgcactccattgccaagcacaaggtaaagggcttaccatcgtccactcatctttctcagtgtcgtatctttctacggtcctccgattaagttctccacatacgctatctcctccaattgcatagatatagccttcacagcaaaccaaagatggctttatgcggacaaaaagcattggggtctttggaaaccaggtattttgctgtgcatcaaaccaataaaagcaattcacagttctgaaggcagtctgaagtttgcttgttttactgtgatttgtttttgtgtttttcagaggaacttgaccccctgctatgtagatatcattatcaggagttacaacggtcccaaccttatgcaaatcagctggtgggctacataacttgtaaactttttctgcttgggggctgtaacagacagaagagtaaagactacaaggattttctgaagatgcttcaatgaaaatcatcatttcctctttagtcatcccaagtcttggtttgaaaaacttgggcatggacttatacagaccttgaaccaccactgacttatcattgggtggcagaccttgaaaccaagctctctgtgttacttctgaaagtgcatcaattctgatttggctaaaaacagaagacaaatactgggatcgtgattctgtgttatactctagccacagcatagcagcttctcgaacggtttcttccttttctacatttaaattgtcactactgagaatatctatcagtaggtcatgggacagctgcatgaacgcgtcctgatgatacacagcagtgaacttgtgctccaccattcttttagcactctgttttaattcctcacaactgaagagatcagcaaaactcaacaatcgtacacaattctctgcatttatttttttaattaaatattctcgacaacgttgtaaccacatcttctgacctgtaggaagcaagctgtttgcataaagctgttctacagtgctgtcattcattgccaagttacccgtgtatgcataagttattattatctgtaaggtggcagcatcgacattcctcaggtgtacatgggtttgtttgctttcacttagtccactcataaacatggccctgaaataagagctacatgttgcaagaaccatcttatgacaagggaattcagtgccctcaacaattaacactatgtcagtaaacaactgctgttcataaaacagtttcaactgttccaacaatgacacagcatattcagtattgatctgcctctcgtcttgagtggacatgactgtattccattaatatctccaggaacagattagaaaagtccgtcttactgatggaaggtcaagtgaatacttcagaaataaaggagaacctacttgctgttatctgcagcattcagtaccaagactgacacattcactaatgagtaatatcttgttacacagacttagaatcactcctaggtcatcctgtgttaattaggttcttcagagtttttcaacacagtctgcagacattgtgctcaaatctgcaattgtgcagctcatgagtgaaagagaaaaatacacgaggtagattttgtggcaacatcctatgttcagcggatcctgtggagtaaccgcgtccctcggtccggaggtgtgggatccgctccagccggtggccccgtccacactgggcccctccggcgcggcaggcgggggcagtggccctcccgccgcggcctcgcactggggtctcgcctccgcctccggccgaggaaggctggaaccgccgcctcttccttccggtttcccctcgcaccctccctcgcttggtccgtccagcgcggaaagcagcgtcccctccgct

SEQ ID NO: 349329 - DNA, 687 bp, Homo Sapiens
  misc_feature (602)..(602): n is a, c, g, or t
  misc_feature (626)..(626): n is a, c, g, or t
  misc_feature (640)..(640): n is a, c, g, or t
  misc_feature (642)..(642): n is a, c, g, or t
ggtacaagcagttctcagttctcatgcttcagccacctgagtagctgggacgacaggtgcgcaccaccgcacacggccaagtttctaaagtttgctctttcattttgtttgctttttatggctagcctctccagtttgaaatatacttaaaatgactgaattttttttaactggatactttactaaactctattctctaaggggaaacaaagttcactatgaaagttattacttttcagtacatgcaggcctcattgacacacattggtagaagctatatatttgaagaaggaatatctaacttagagaaaatttgcacgtaaggaaacaaggtcctatttaaacctcatttgaaaatactgagttaattgaaggcaaaagaatattagatgacaccctaatactttcaaacttaatttaaaaacaaagaaagttctaaatatttttctccatgatgttccttcttcagttttcaaatcttgctctcacagggctgcatttcacctgcggctggtaaaatgagcatggaactcagcccacactagctaggaagggtcctacagggagcttcctttaagcccagcacaccttcccgccccctnggctgtgcctcatggggcaccatncagaatagtaaaangngtttccccaaaaagagctagaggctccaagtttgaaggctggcga

SEQ ID NO: 349330 - DNA, 927 bp, Homo Sapiens
atcgcaattgcgaagttgggaggcggggtgacaacgtttgggaagggccagggcgaccggcagtgtgcacagggactgtgtcgggcttggacctcacctgatcctctctcttagcgcgacccttcctctgctccctgtctcctctttctgccacttgtgcgctgcttccgcgcactcccggctccctaacggcaggaggaggaaggcgcacagcgggtggagagggtgcgccaaggagaggtaaccccttcgggagcccagggaatcccggccgccaccaggggccgtgccaccgccctcgcgggaccaaagcttccggcgtgtccccaactttgtggcgccctcaagccgcggcgactgggttagagatgccttccagcggcagagcgctgctggactcgccgctggacagcggctccctgacctccctggactctagtgtcttctgcagcgagggtgaaggggagcccttggcgctcggggactgcttcacggtcaacgtgggcggcagccgcttcgtgctctcgcagcaggcgctgtcctgcttcccgcacacgcgccttggcaagctggccgtggtggtggcttcctaccgccgccccggggccctggccgccgtgcccagccctctggagctttgcgacgatgccaaccccgtggacaacgagtacttcttcgaccgcagctcgcaggcgttccgatatgtcctgcactactaccgcacccggccgcctgcatgtcatggagcagctgtgcgcgctctccttcctgcaggagatccagtactggggcatcgaatgagctcagcatcgattccctgctgcagggacagaatacttcagaaggaaagagctgagtgaaactttagacttcaagaaggacacagaagaccaggaaagtcaacatgagagtgaacaggacttctcc

SEQ ID NO: 349331 - DNA, 2048 bp, Homo Sapiens
gtgaacaggacttctcccaaggaccttgtcccactgttcgccagaagctctggaatatcctggagaaacctggatcttccacagctgcccgtatctttggcgtcatctccattatcttcgtggtggtgtccatcattaacatggccctgatgtcagctgagttaagctggctggacctgcagctgctggaaatcctggagtatgtgtgcattagctggttcaccggggagtttgtcctccgcttcctgtgtgtgcgggacaggtgtcgcttcctaagaaaggtgccaaacatcatagacctccttgccatcttgcccttctacatcactcttctggtagagagcctaagtgggagccagaccacgcaggagctgggagaacgtggggcgcattgtccaggtgttgaggctgctcagggctctgcgcatgctaaagctgggcagacattccacaggattacgctcccttgggatgacaatcacccagtgttacgaagaagtcggcctactgctcctatttctatccgtgggaatctctatattttcaactgtagaatactttgctgagcaaagcattcctgacacaaccttcacaagtgtcccttgtgcatggtggtgggccaccacctctatgactactgtgggatatggggacattagaccagacaccaccacaggcaaaatcgtggccttcatgtgtatattatcgggaattcttgtcttggccttgcctattgctattattaacgatcgcttctctgcttgctacttcaccttgaaactcaaggaagcagctgttagacagcgtgaagccctaaagaagcttaccaagaatatagccactgactcatatatcagtgttaacttgagagatgtctatgcccggagtatcatggagatgctgcgactgaaaggcagagaaagagcaagtactaggagcagcgggggagatgatttctggttttgaattaattttcaatttatttacaaaagctatgtacaattaactaaaatgataaagcagtgatgtggatttctgtattctgatgatgagtctcttcagagtactgctcatcttaattaatttttgctgatatattgcttcatctactagaatatttcacatcacctataacaactgcacagtgttctgacacatttgagtgtccaaaatagccaattaacacaaccaaatacaactgggccaatataaacatgtttgaattgtcaaatataaaataatgttattgcaatacatacaaaaaagttaaagattttatgtatcactaacattagaagttttttgcaccactaattttttaaaaatggaaggtaaactgcatagcccagagaaagataagtaaatatttaagaacatattgaacaactttgctatttaaagatattatccaagtacataaattactccattctctatcagttaaagctattgaatataatacttagctttacaagagaaaacccatatttgatgggcagagattatatccctatcttctttttcatgtaaaccactggtcacaaatgaactgatctctgtatcccattattactataagaggtgggaatcccaaaactgcttagattgcagtacatgagtctacacaaagacttcaacaattgcacatcttcattctcccaactgagtgtagtatgtggagcataaaacagcatatttcttagtatttcatgaatatcagatggtctttaaatgtctctttatggatgtattgttcacattatggctttaaaataatgaatatgtaaaagtgaggtagtgaacatcctaaatttctacactggaattactaaataatcttatttcataaaatgggaaatatatgttaaatgacatcactggatgaacttgaagatcttttacttgttaacaaaaaaatactatggacagctttctgattgttggggtaaatagcaaatgttcaaactttgcaggcattttgacattcatcataacaacacaattcctagacattgtattatataattaaagccaaaacctctaaagct

SEQ ID NO: 349332 - DNA, 1184 bp, Homo Sapiens
  misc_feature (1060)..(1060): n is a, c, g, or t
  misc_feature (1065)..(1065): n is a, c, g, or t
  misc_feature (1067)..(1067): n is a, c, g, or t
  misc_feature (1070)..(1070): n is a, c, g, or t
  misc_feature (1077)..(1077): n is a, c, g, or t
  misc_feature (1081)..(1081): n is a, c, g, or t
  misc_feature (1088)..(1088): n is a, c, g, or t
  misc_feature (1095)..(1095): n is a, c, g, or t
  misc_feature (1105)..(1105): n is a, c, g, or t
  misc_feature (1108)..(1108): n is a, c, g, or t
  misc_feature (1113)..(1113): n is a, c, g, or t
  misc_feature (1115)..(1115): n is a, c, g, or t
  misc_feature (1142)..(1142): n is a, c, g, or t
  misc_feature (1164)..(1164): n is a, c, g, or t
  misc_feature (1169)..(1170): n is a, c, g, or t
aggaccacttccggccagggagggggataggctcagacacaaggagaggcttggagagagcagacgccttctggattcaagaagacgaggctcacctgttactcggcctcccagaaagatggataggagaaatgactacggatatagggtgcctctatttcagggccctctgcctcccccggggagcctggggcttcccttccctccagatatacagactgagaccacagaagaggacagtgtcctgctgatgcataccctgttggcggcaaccaaggactccctggccatggacccaccagttgtcaaccggcctaagaaaagcaagaccaagaaggcccctataaagactattactaaggctgcacctgctgcccctccagtcccagctgccaatgagattgccaccaacaagcccaaaataacttggcaggctttaaacctgccagtcattacccagatcagccaggctttacctaccactgaggtaaccaatactcaggcttcttcagtcactgctcagcctaagaaagccaacaagatgaagagagttactgccaaggcagcccaaggctcccaatccccaactggccatgagggtggcactatacagctgaagtcacccttgcaggtcctaaagctaccagtcatctcacagaatattcacgctccaattgccaatgagtcagccagttcccaagccttgataacctctatcaagcctaagaaagcttccaaggctaagaaggctgcaaataaggccatagctagtgccaccgaggtctcgctggctgcaactgccacccatacagctaccacccaaggccaaattaccaatgagacagccagtatccacaccacagcagcctccatccgaaccaagaaagcctccaaagccaggaagacaattgctaaggtcataaatacttgacactgagcatatagaggctctaaatgtcactgacgcgctaccaggcagattgaggcctcagtagtggctatcaggcccaaaaatccaagggcagaaggtgccacaggggcccaattctgtctctgagtntctgngnccncttgccntcanatatcanaaccaancctggcagcnccngcggncnagagagggttagggtcggaggtgcatnaggtccggcaatgaaacaaatncaatnntgccagggccaggc

SEQ ID NO: 349333 - DNA, 905 bp, Homo Sapiens
catatgctcaggtgtcagtaattatgaccgttagcaattgtcttcgtggctttggaggctttcttggttcggtatggaggctgtctgtggtgtggatactggctgtctcattgttaatttgaccttggtggtagctgtatgggtggcagttgcagccagcgagacctcggtggcactagctatggccgttatttgcagccttcttagccttggaagctatcttaggcttgatagaggtgatcaagggcttgggaactgggctgactcattggcaattggagcgggaatattccgtgagatgactggtagctttaccacctgcaaggggggacttcagctgtatagtgccaccctcatggccagttggggattgggagccttgggctgccttggcagtaactctcttcatcttgttggctttcttaggctgagcagtgactgaagaagcctgagtattggttacctcagtggtaggtaaagcctggctgatctgggtaatgactggcaggtttaaagcctgccaagttattttgggcttgttggtggcaatctcattggcagctgggactggaggggcagcaggtgcagccttagtaatagtctttataggggccttcgttggtcttgcttttcttaggccggttgacaactggtgggtccatggccagggagtccttggttgccgccaacagggtatgcatcagcaggacactgtcctcttctgtggtctcagtctgtatatctggagggaagggaagccccaggctccccgggggaggcagagggccctcgtcttcttgaatccagaaggcgtctgctctctccaagatcccgggaattccggaccggtgccagctggaaggatggagctcagaaaggctcacataaaaagaggagtggggggg

SEQ ID NO: 349334 - DNA, 614 bp, Homo Sapiens
gtcccgggtcgacccacgcgtccgtatcaaagtaacctctccacaggcgaactcattttgaggagataaggaaggccagttgagtatatggcccaggtgcagcttggagggccagccttctcaaatgtcctggtgtactggtggggaggctgccccctaatagagcgagcgctgagaagcagccagaccacattctataatctttgaacatgctggcagatggaggcttttaggagaatagttttttaaacattctgacaagggccagccaggaatttctaaggacttagaaatcccagcgtcatggagttgcttggggtcaacacaagtcacctcttagcttcatgccttagaattctcaactggctgttttcttaccacctgagaaactaaatttctcaattataaaaatctcatgtattattactgttagaagtatttgcacctcatatatatctcatttacagtttgaccttgggatatcgagttgtctcatatttaggtatgaatacaggtttctattttaaacattgattctcacatgcttcttaattattcatggatgacaagccattatagtaggcccttcttatccaccgctttgttttctgtgg

SEQ ID NO: 349335 - DNA, 1190 bp, Homo Sapiens
  misc_feature (22)..(22): n is a, c, g, or t
  misc_feature (43)..(43): n is a, c, g, or t
cgaaatagggaaaacatttatncccctcccctccaaaatttancctacatcccactttaaatagctgttgaaggttaattaaaatgcagcaaagtataactacgttacacaagtgacttccagttattttaatgtgagaaaaatcagactatggtatcttacgagtcattatagaaatgctcatcattaaaaagcatttattaggcactgaactgcatgatgttaccttaagtcatttacaaaagaattcctggtccatgtgatgtgaatgggctgggcactttctccataaattttgtagatgactatttgtaagattatacacttaataggttttaaaaccaggaactatcaaagggcaactgcacaaaaataaacacgattatttagctttgtagtaattatgacattgtcataattttaaaactatgaataatacaatctattactttctgactagcattcatttcccgagaaaacattttaaatgacaagttgtaagtgttgtacagtgcacgcaatgcaaaacaaattatcatgtgactttcacattggatatttagaatgctgaacggcaaaattaaagtataaaatttaatgatcagaatgctgactgatttccataattcatttcccctctggaaattaaagaggaatcactgattccatttaatgaccatacaattcatgtaaatggctaacattatttagcagaatacacattcacctgacttgattagaaaaagttttccattaacttagcaacactgctgaagcagtctcacattagagcacagagtggaggtgggaggacgggaagtacatatatcatttaaaatttacaacgttcctgagaaacactgttttcctaataatatctacaatataacatctttctgggtgtgagacaccaatatatttttatatgtatatataaaacatttagaaagtccatgctcaataccactgtatactattcaacattaaagaagcaacttccagcttttcaatgctaaatgaatgaggattttctattataagtcgtattgtctgaattgtaaacattgtaaagcaactgtgttagcatttgccagagtccctataaggaactttttaattgaagagtacgtgtcctttatttcaaaaaaacacatgttaaaagtcacattgactgtttatttcaatcctgg

SEQ ID NO: 349336 - DNA, 1081 bp, Homo Sapiens
  misc_feature (44)..(44): n is a, c, g, or t
  misc_feature (47)..(47): n is a, c, g, or t
  misc_feature (157)..(157): n is a, c, g, or t
ctggatccttgattcagttattggaaaattaagtatatttagancancaacaaagtatgtttggaagaactatgtgaatctacttatcaactctacgttttataaatctaaatgtgagttatgtattacaaatgaaaattttgtgtgtagattaacncattacataccagatttcaaaaatagtgcaaaaaacaaaatgtctcaatacttttttacattgattacatgatgaaataatattatggatatattgggtgaagtaaaatacatttttaattttacctgttttattttctaaaagtggctactagaaaatttgaaattatgtatgtggctcacattatattactgttggatggtgctgaagtacctaaaacacctgttccaatcagcttttttagagccctgctcttaaatataaatagtcaaagatcatcagaggcttcaggaaagcctccagtgtgagagacagaaaacaggtgaaaacaactcaaaggaaacagggataatgcagggagcagaataacacagaaagacactataattaacatgctcagagaaaaaatatttcacctatgaaacaaaaccaattagaaaaaaggaagaaagaatcagataatgcacttggaaataaaaatatgacagcagagataaaaacattcacaacatttaatagtagagctggaagataaagttgaagaaatcttcaagaaagcaggaaaaatcaaagacatggatagagtggcccaggaatccacctctccacctagataataattacatcggcagaaagttcctaaagtgattattttgggagcacatgagtccatctgaacacttgtagcttctaggggaaattctgagtggtaaattgcagttaacattggtggatttcagccttcagtgaagtagcagctacccatccccacccactccatggcaggcagctgtggagacacaaccccacatttctgggtcagcttgctgcagccagggtggacaataatagccacttcctccaaatatcagggttctgattgcagatatctacttctgatcacagagaaagagcacacacgct

SEQ ID NO: 349337 - DNA, 465 bp, Homo Sapiens
cccatcctccccaaaatagccttgtgatttcggaagtatggactaaaatcacactcctccttaccttaccgcttggactctggtggctcccaactcgccgtcagaccccacctgccccggtggtggaaagcgcctggacagaccatgaccacagccaaggagccaagcgcttcggggaaatccgtgcagcagcaggaacagactcagtgagaagggagccatccacaagccaggaagtgagctctctgcaggaacagaagctgccggcaccctgacttggacttccagcctcagaactgtgaatgtctgttgtttaaactactcagccattggtatttcattacggcagctggagcagaccaacgcaagccttttattctccaaatgattctggtgacctctcaagacctttctctatgacgcccgccaactttgtaaataaatcctaccctttcatgaatggac

SEQ ID NO: 349338 - DNA, 894 bp, Homo Sapiens
  misc_feature (459)..(459): n is a, c, g, or t
  misc_feature (641)..(641): n is a, c, g, or t
  misc_feature (644)..(644): n is a, c, g, or t
atgagtcctgggaaaggcgcatgcgctctcattgcagcctcggcgtttgtagaagaggagcatctgctccagatggaaaatgggtaaggaacaatcaaattcaattcgggaagaatatagaggtggtaataattggtaaaagtctgcagggttttttttaaccaaaggaaactggtttgagaaaattgtgaaatcagcattgaaatttgttacctactccaatcaagatttgcaaactacaaaaaaatcattctgaagctttcacctataaatatataccaagataatttcagataagaatgtccagcaaggaagtgaagactgctctaaaaagtgctagagatgcaatcagaaacaaagaatacaaagaagctttgaaacactgtaagacagtgttaaagcaagagaaaaataactataatgcctgggtttttattggcgttgctgcagctgaactanaacaacctgatcaggcccagagtgcctataaaaaagctgctgaattagagccagaccaattactagcttggcagggggtagcaaacttgtatgagaaatataatcacataaatgctaaggatgacttgcctggtgtttaccaaaagctcctggatctttatgagagtgttgacaagcagagnggntgtgatgtctgcaagaaacttgtggaatctatattaccaaggaaaagaaacaccctagaggtggcctccgaacatgggccacaagtttgattaaaaacccgggcaggaaacccaaggtgcaagaaaaatggaaaggaggccttccttccaccttatgggataaaaaattggacctccaggttccctggggcttggaaagggtcccagagaggggacccccgaaattaatgtgagaaacccctcccgcccc

SEQ ID NO: 349339 - DNA, 751 bp, Homo Sapiens
gttgcagggtggttaaaagctttgccacattctctacatctgtagggtttctctccagtatgaattatcttatgtgtagtaaggttacaggactgcttataggctttaccacattcttcacatttatagcgtttctctccagcatcaattttcttatatgtagtacgggttgaagactggttaaaagttttcccatattctatacatttaaaagatttttttccagcatctcttatcttatgtttgtttgaatttgaaaatttatgcaagaatttcacatattcatcacattgaaatatttttctctgggtagttgccaaacattgtttaagtccattataacctcttttgtgcactggacactcatctacactttcacagcctttttttaactgtaaattgtcatgtctacatttttcatatcttcttaggatcactttttggaaagaatcttttatgctctgctctgaccaaaggtcttgggcaaaatgagaatacataactgaaagaaacaataaaaacacatgccttcaattgctagactcagataaatatacttcacaaatctaacctataaaattatacaaactacgtaagcaagatgacacagcaaaataccacaagctgtaatttcttcctggatatataactgtaacaaaaacatactgaccaaaatacatttgtaaaaaatttataaattagttaagtgtgtaaagggctccaggtgagcacaatgcaaagagccccatag

SEQ ID NO: 349340 - DNA, 3074 bp, Homo Sapiens
  misc_feature (1663)..(1663): n is a, c, g, or t
  misc_feature (2639)..(2639): n is a, c, g, or t
  misc_feature (2920)..(2920): n is a, c, g, or t
  misc_feature (2927)..(2927): n is a, c, g, or t
  misc_feature (2971)..(2971): n is a, c, g, or t
  misc_feature (2975)..(2975): n is a, c, g, or t
  misc_feature (3005)..(3005): n is a, c, g, or t
  misc_feature (3013)..(3016): n is a, c, g, or t
  misc_feature (3019)..(3019): n is a, c, g, or t
  misc_feature (3035)..(3036): n is a, c, g, or t
gtcggaggtcttacccaacagattgacgcggcgttagtattggccgtgtacccgaaaaactgattgactgggctggcgttaactgtgcggaggcagtgggccgtgtttacatcagtggttggagaccagacctaacagacaggtgtgtcctgtttgcaaagctggcatcagccgagacaaggtcatccccctctatggaaggggcagcactgggcaacaggaccccagagagaagacccctcctcgtcctcaaggacagaggccagagccggagaatagaggggtgaggaacattctaggagaagcttctacaaatgagctgatggctttagaagtttccttcttagccttacaatttttctccttgattataaaagtaaaggaaaacttgtaaaatacagaaaggaaaagagggggaaaaaaatcacttataaccacaccaatccagagggatttcaaggatttggatttggagatggtggcttccagatgtcttttggaattggggcatttccctttgggatatttgccacagcatttaatataaatgatgggcggcctcctccagctgtccctgggacaccccagtatgtggacgagcagttcctgtcacgcctcttcctatttgtggccctggtgatcatgttctggctcctgattgcctaatgctgggctcctgcctacatccgtggcagggctctggactggtgacgtgccaccccaactcctggtgtttggcttcctggctaatcttgactcctggaatcagtgggatcagtaacacatcaaggagtcttgtttcttcatcagagctttggaactcgagaccagttggcgatgacccctgaatatcgccaccgctgtaaacactctataacttcaggccttggcattgagtcatctctcatgggtgacaccatgaaatcttgtttcagccagttctgcaggtcctgactctgcagagggaagaggcagaaagagagaaactgtcagagtataatttcacctgagtttaatattacagaaacaaagggatgcaccaaatggtatttctggaaattttcatgtctttaaataccccttggtaagttgcttctgaagccagtgggggctcctcagatagagaggttcccctttcaaatcccagtgccgctctgttctctttccttcccctcccactccccctcttcttcctctgtagagatgcaagaaattgctgtcccataaaaatcataattgcagtagctaaagctggggtcacttcgtgaattcaccagagactcaaagatcttttattggctctgggctgtgctcagtgtctttggcctcagagaacaacttgaatgacttcctggtttcctggcataaattattcctggtgagacatgtggcttaactcacaggtttcccatcagctttctccctaaaactatgttcatctgcctctctctgccagagaacatacagccgagaatactgccgaagctgagactgactactgtgcattaggaaagacctggagtcaggactttggtgggatttggagctccgaggcagtaataactgaacaagcagccctgtcccctaggctgcagaagcttgaatgcatcctctcccagaacctgccacaggaaactgggggctttgtcagggtcagccaaanctgcaagcaaaaagaccacccatcctcaaaagccaaagttgttcttttatgaagaggcaaaggaaaaggggaaaacccaccatgtgacccctgattttggtatggcttgatagagttcctgaaaactccttgtatgtgtgctaaaaccagggaagcatgtgactgccaagcaggcaacccctgatgatttgtaaagccaggtggcagggccttggggagccccagcacaatgatattgtgtggtcttccctcctgtggaatcgaggggaaattattcttcccaataccttgatttgattttcagtttcataagcttcttcctctgaatcttattgagggactatggtaccaagcaggtaggactgttcacctggtggaacagttcttgctctgccttctaggcttcatcccagaaatccagcctctttctggagaccccaaagctggagggagatgggctttcctctgggcctctctcctactttgccatccacactgctcctggctaaccccagcaataaccaacaaatggtaggaagccccatctattgctttttctcaattatgactgcatagtttgtggaaacaaagatcttgaggaagatgagggaagccctcccctcttcatagtccccatctcttctcctttgtacctgtcaacaccagagttcagtgtttaaacagacaaaatataaagtattgagtaggtggttcatatgccgaatccacttggtaggaagaaaccaccagctttatagtgtgcctgatagattttaaacattcctgggcacccactcaagagtgctctttttatcaccttctggaaatccgcaaagttgcaggggcctctggagtgtctcttctctagagagaattggtgggacccccctcagtgcagtggccccaactagtggagggagagaggacttaagtcagatggactcaacagaaatgggtttccagaagaataatgaanaagttgtgggtaggaaaatgaatcattttggactcttcaatgaaatggagtgagcccaggaagagctcagccaacagaggcactctgggaaacctgttagtaaagccaggctggccaaatgccattttgattttggaacctcgtaggtcccccactcaccctctgccaggagctaagtaaggcaggagagctgacttgggactcctggttcggccccaacagggagcccccttcccaccatccctcggcaagctcaccacttctatctcttttgccaaggnagttttnctttcttttgtgtgttttctgtgttcttagcctccaccttcttnttgncacctttgtggactaggatcaggtcttgancccagtcnnnnaangatgatatgtacagtnncaccccccaaccactcccccactttcaccgctgtgaaa

SEQ ID NO: 349341 - DNA, 1450 bp, Homo Sapiens
  misc_feature (19)..(19): n is a, c, g, or t
  misc_feature (158)..(158): n is a, c, g, or t
  misc_feature (166)..(166): n is a, c, g, or t
  misc_feature (311)..(311): n is a, c, g, or t
ctctccagacctctccagnaatggggttgtcggtcagccacgggagcaaaggctccatcttaaaggctattgtcttatgaagggcagggaggggaaccctcatgggccctatttgggtaggcttatagagtccctgaaaactccttgtatggggctanaccagggnagcatggtgactgccaggcagccaaccctttatgatttgtaaggcagggtgcaagggcttgggaagcccagcacaatgatattgtgggtcttccatcctgggaatcgaggggaaattatcattccaaatacctgatttgatttcnagtttcataagcttcttctctgaatcttatttagggactatggtactagcaggtaggactgttcactggtggaacagtcttgctctgcttataggcttcatcccagaaatccagcctctttctggagactccaaagctggagggagatgggctttcctctgggcctctctcctactttgccatccacactgctcctggctaaccccagcaataaccaacaaatggtaggaagccccatctattgctttttctcaattatgactgcatagtttgtggaaacaaagatcttgaggaagatgaggaagccctcccctcttcatagtccccatctcttctcctttgtacctgtcaacaccagagttcagtgtttaaacagacaaaatataaagtattgagtaggtggttcatatgccgaatccacttggtaggaagaaaccaccagctttatagtgtgcctgatagattttaaacattcctgggcacccactcaagagtgctctttttatcaccttctggaaatccgcaaagttgcaggggcctctggagtgtctcttctctagagagaattggtgggacccccctcagtgcagtggccccaactagtggagggagagaggacttaagtcagatggactcaacagaaatgggtttccagaagaataatgaaaagttgtgggtaggaaaatgaatcatttggactcttcaatgaaatggagtgagcccaggagagctcagccaacagaggcactctgggaacctgttagtaaagccaggctggccaaatgccatttgattttgaacctcgtaggtccccactcaccctctgccaggagctaagtaaggcaggagagctgacttgggactcctggctcggccccaacagggagcccccttcccaccatccttcggcaagctcaccacctcatccttctgccaaggcagctttcctttcttttgtgtgttttctgtgttcttagcctccaccctcctcctgccacccttgtggactaggaccaggtcctgaccccagtcagaaaatgatgatatgtacagtggcacaccttaaccagtcactaattttcactgttgtgaaagtgatttgatttagaattaaacaaatggttttacattaaaaaaaa

SEQ ID NO: 349342 - DNA, 1055 bp, Homo Sapiens
  misc_feature (897)..(897): n is a, c, g, or t
taggtagcgaggcctgggtggcgaattcggcacgagggcggcgttagtattggccgtgtacccgaaaaactgattgactgggctggcgttaactgtgcggaggcaggatttccctggggaaagtcttcactcagagcttcgctgacagccaaggatggcaagcaaggggccctcggcctctgcatctcctgagaactccagtgcaggggggcccagtgggagcagcaatggcgctggcgagagcggagggcaggacagcactttcgagtgcaacatctgcttggacacagccaaggatgccgtcatcagcctgtgtggccacctcttctgttggccgtgtttacatcagtggttggagaccagacctaacagacaggtgtgtcctgtttgcaaagctggcatcagccgagacaaggtcatccccctctatggaaggggcagcactgggcaacaggaccccagagagaagacccctcctcgtcctcaaggacagaggccagagccggagaatagagggggatttcaaggatttggatttggagatggtggcttccagatgtcttttggaattggggcatttccctttgggatatttgccacagcatttaatataaatgatgggcggcctcctccagctgtccctgggacaccccagtatgtggacgagcagttcctgtcacgcctcttcctatttgtggccctggtgatcatgttctggctcctgattgcctaatgctggggctcctgcctacatccggtggcagggctctggaactggtgacgtgccaccccaaactcctggtgtttggcttcctggctaatcttgactcctggaatcagtgggatcagtaacacatcaagggagtcttgtttcttcatcagaagctttggaactcnagaccagttgggcgatgacccccggaatatccccacccggctgtaaacaactctataaacttcagggccttgggcatttgaagtcactcttctcatgggggtgaacacccatgaaaattcttggttttccaaccccaatttcctggcaagggtccttg

SEQ ID NO: 349343 - DNA, 2404 bp, Homo Sapiens
gactcaagcaagaccccacctcagccggccaccccctcaaggttgtttacagtatattctcgactgtaatggcattgcagtagggccaaaacaagtccaagcttcttaaaatgattggtggttaatttttcaaagcagaaattttaagccaaaaacaaacgaaaggaaagcggggaggggaaaacagaccctcccactggtgccgttgctgcgttctttcaatgctgactggactgtgtttttcctatgcagtgtcagctcctctgtctggttgtttacctgttcctgttcgtgcttgtaatgctcacttatgttttctctgtataacttgtgattccagggctgtttgtcaacagtatacaaaagaattgtgcctctcccaagtccagtgtgactttatcttctgggtggtttgatagtgtttttaaaagtaatatataatgtggggtgaaatgggagtaggggggtggacaggggagaaacgaaaaccacaaaaagaaaacccaactcctctcctccccccaagctcagttaaatcccccacctccaactttccctccaccagtgtgcttgggatcttcaatgaactgtgcttttcgctttctttctgcatgactattgtaactagatagaacattaagagattttcaagatcaaacttccatagcttcatccactgaatttgaaggcatccacctttttctccatttgctaaaatttggtgcagtttgagtttatgtgaataggctggctgtgcctgtagagctcttgtgtttttagtgatgacatgaaatacaaagaacaagctatttccaggaatgtgttctgtattttacatcccagtgtaccctttattttattattaactaattaactatgagatttttaaaaaatggggccgctgatgtgcaatatcaaagtgaacttgtgagtattttgtgtgtgttgatctcagttgtttcttcattgttgctgtttctggatccagccatgtgtgcgcttgtgtggacctgaggctgctttctgttcccaaagcttgacctgtgtacagagataattccttggcaatgttggacatagaatgcagggagctactgaaggtctgtcagggatttgtccattctgctcttggcctctcctgaggcctcataatgggagaccaaatcaaaaatgtcccatgtcacttgagtgggtacactgcctacagaaccttgaggttgactcctgcttcagttctcagctgtttaccacagccctccagggtccaaagattgaggagctttctctttcctgggaggaactgtctcagatttagcttgtgtgtgttttggacagaggctccacagcggtggctcttgaggaatcctcaccagtttgttctcttccctctgacaagcagcacctgagcagatgctgaggcagttcattaaaccaggcctcagcttcagtgcctcatcttgccatctcccggccaggctgggaacgggcaccaagcagccgcctctaacaaacaccatggtccgtggaagttcatgccagcagcttgcctttgagaagaaatgctgctggctctatttttacattcccttccacctctatactgtcatgtcaccgttctgaactcccagatctgagaaggaactagtgttggtggtatgtaacaagagttacgtatccaggggcttgtgccttggtttctcctttgattgctggtaaattctgaggccacagagaaatgcattgagtgtgaatgttgtcatctgtaatccctccctcagctgataatggtagttgatctgttgtaaatatatacatatatgcatatttgcacttccagatgggttgcataagaatcaggtccttaaatacctcccaatctgatgaaacgatagaataaagtaacatttcccagaatggaggaatacattattttatcgtatatttttgtccaagcgatgagctgacggtggtattgcttctctgcatgttatcagtgtgtacatctggtgcttttcatgtgtcatttgtgagccacaaatgcaaagttgccatttgaattcagtcaggctacagggtggtgtcagtcaaggtctttcaggtgggggagaaattggttagggctcccactgccaaatgcaagcagatagcataacctgactgttatgtgccctcaggcagcatgcttagggacaactctgtggcctgggggacatctgtgtcacagtataggattgccattcaggtgttttgtacctatttctttcctgacgttgtcccctttttttgtactgatccaactgggagaacctcagccaatgctggaagtatgattgaagtacctctcttttgtgactcttgtacagcttaatgtgcaataaaggaaaagttatatctgtaaaaaaaa

SEQ ID NO: 349344 - DNA, 930 bp, Homo Sapiens
agcggggaggcgcagcctgagcagcagagtgcagtggcagctgggagaggcgggagcatgctgtgtggcagcagagctggattggggtgttgagtccaggctgagtagggggcagcccactgctcttggtccctgtgccttgctgggtggtgcccttgccctgaactccatgtgcagcgtgggacagggcgaggtgccaccttagtctggctaggggagggcggacgatgaggagtgatggggcaggcatgcggccactccatcctctgcaggagccagcagtacccggcagcgcgaccggctgagccgcggggccagcaggtcttcctcaagccggacgagccgccgccgccgccgcagccatgcgccgacagcctgcaggacgccttgctgagtctgggctctgtcatcgacatttcaggcctgcaacgtgctgtcaagggggccctgtcagctgtgctcccccgagtggaaactgtctacacctacctactggatggtgagtcccagctggtgtgtgaggaccccccacatgagctgccccaggaggggaaagtccgggaggctatcatctcccagaagcggctgggctgcaatgggctgggcttctcagacctgccagggaagcccttggccaggctggtggctccactggctcctgatacccaagtgctggtcatgccgctagcggacaaagaggctggggccgtggcagctgtcatcttggtgcactgtggccagctgagtgataatgaggaatggagcctgcaggcggtggagaagcataccctggtcgccctgcggagggtgcaggtcctgcagcagcgcgggcccagggaggctccccgagccgtccagaaccccccggaggggacggcggaagaccacaagggcggagcggcgtacatttaccgggaccagaagaacctc

SEQ ID NO: 349345 - DNA, 225 bp, Homo Sapiens
tcgagctccgtacccccccgaccagcccgacagctccccgactagcccgacagccccgactagcccgacagcctgcagccagcctggacccccttgcaaaggagccaggacccccagggagtagagacgaccgactggaggacgccttgctgagtctgggctctgtcatcgacatttcaggcctgcaacgtgctgtcaagggaggccctgtcgggctagtcgggg

SEQ ID NO: 349346 - DNA, 3164 bp, Homo Sapiens
ccatataataaagtatttgttcactgacaacccactaacagttctttcactggacgatatacaaggtgtgcagtgcccttcgagccttcaggtgagcccccccaagggcctgctggtgccggggacaaatcagagacagcgatgtgacggcactggtcctttctggcaggaggactggtttaggagcagctgctgaaaacactcaacaggacagagagctgatgtcccaactgcccaataaatgagcctagcgactagacaggattcttgtagaaaacaggattgtcgctgtatacttatctgagtgctacacgggacacctttgccccaacacagtatggcctgctgacgtagatgctttatttcatcacgctaaatgtcctctaatggtgaattcttcaatccttcattctcttctagagacattcttcatcgctttcaagctacattgtcattaaaataagtcttgtgaaatttttgccaaaaataatcgtattacttcttcttaacagagattaattcttcattgactaaaattctgtgtggaagtttcaggccaagctcctttgtcttggtttaattcttgggtacagtcccagcaagttacgtggaacatatccctgcctgatcattaaggcgcgcccaccaccattcgatttcatcttcgtcttccctgtggatgattgtcatgcagtctccttctttcatgggcagctcatcatcattctgaggttcataatcccaaagcgcataaatgactcctttattcattatgcccatcttctcctgaactccataaagaaattgggagcactgagtgtagccttcctccatttcctcgcacttatctgcagcagtctgcatgtcactgtaggtcatggcaaacacagcggctcctgactccaccaaaaacttacacacttggacgttgttacatgaggcagcacaatgtaatggagtccatccatcactatcagcagcatttacatttacaccaaactgtaccaggaacttaacgatttctgtgtggcctgcacacacagcattgtgaagagccgtgatgccttcatcattggggaggcttgggtcatcaacctcataaataattctctgtacaaggtcaaattctccctccaaagacgaatctagcagtaaagcaagggggttgaatttcaccctcattccatgagcgatacgctctgagccagttttacgcaagtttgtccttttaccaggaggcagagagacctgcccggtgatttcaggcgggcgcatgctcaccgagtcttctccgggcccttcaggctccccagatgggtatggtgggggtgggtatggagggtactcctccaggtacacatcaagcacatgtggagcctctggatttggttcttctgggttattctggagatttgggctgttgtctgggactccctcaggctcataatcaaggcctggagaaggagctggcatgtcactgttctctgtactggcattccccacatcctctggggacaatgattcaggaaccagagagaccacctccttttcgggctccacatgtaaatatggattctggatttctactgggctttctgagctggcagtcacggaagctgacttggatgggtatgatgggacagagatggtctccatggccgctatggtggtcctctgatataaaagcttctgaatatttggcccattaggaccctctggctctgtaatagaactacgtttctttagaggccttggtgcgttagacagtttctttcgtaaggcttctaggtcagcatcactctggtttcggtaaggattagataagaaaggcagtaatttagttgggctgagtggccgaggaattctttcgttttcatggttctcctgaactgaagaaacaggctctgtttcaggttctggactgccaggcttgccctggctattggaataaatgttctctgggtgctgctgttgattctgggcagcagcaattacaggcttaccatatacacttgaaaagtgtggccctctggtatgagtcttggtcaacgcgctctgcacagcctgctggaagttttttcctggcgcctgctgttgcgtatacatggaatatattgaacttgctgccacggtctggggttttctgaagggtggaagtaaggtgtctttggaaggctggggagtaaagggccggacggcagcagcaggtggactttcttgcttagaacctggagaaagggtctggtcttggccaaccgaaggtatgctgggagatagcagcactctcggctgctgccctgctggttttggtttagttcccatggacggaacaactgttgacaactgctgagaacttccgtctggcttaatgtctgaaggtggctgattagtttgtccaaaataaggcaaattaatctgttttggttttgtaggaacaggaggtggtactttagccacatttttatttgcaacctgagcatcccgcaagatatcttcactgctctggttcttcctcagagtaccaaaggaaggtggggcattggactggtctactgcatcaaacattgagaacggacgcactttcttctctttctccctcagcggaacctctccatcatcaacttgatccagagcattcccagtgctttgaggtacagaagcagagccttggcttgggaaaagatctgcatttgaaggactccaatcagggccaactggatggattttagagcctttagtttgtgaagcagccccagatctcatgttgggcagtgtctgtattttcatcggcccctctgaagcctgaatgaccaaggaaccatccggcagggctggcttcaccagcaattcaggccttgagggcatccgaggcatagtagacgactggatatagggacctactgcagccacacggcttggggctgacgcggcttgctggggaagatttccatcagatgaaactttttaaaatgagcagtttcagaatctagccatagagtctacaaaaaacattccaaaataaacactccccaatgaactctcacccacactttattacaagtattagagacaaacagagctacacaggtaataacattaaaaagtaaaaaagcagcggattgtcttttaaggatccataaacagcatctgtttcgatcccggaa

SEQ ID NO: 349347 - DNA, 660 bp, Homo Sapiens
  misc_feature (287)..(287): n is a, c, g, or t
  misc_feature (319)..(319): n is a, c, g, or t
gtttaggaaaacagttctagccctcgtatcttgcttcacaggactccattacattgtgctgcctcatgtaacaacgtccaagtgtgtaagtttttggtggagtcaggagccgctgtgtttgccatgacctacagtgacatgcagactgctgcagataagtgcgaggaaatggaggaaggctacactcagtgctcccaatttctttatggtatgtgacaagtagaactaaatgtattgattactgcattcatttattctgtatctcccagggtataattcaataagtnatttttgtttggaaaaaatcttgtgttatccnatagtcttgggccttgaaaatacaacagccttggtcacagataatacagcttctgtttgtatgcttagaaacagctattgtcagggacttcttcaattacaaaagacagtgttgcagcatctgacctagtggtgttaatgactttgaccatcaaaagaccctctattaaggctttagtacttatagattgatggtgtatccttgcaaataagtaaacagacccccctctcctaacaacatgatcaagagaagtgaaggatcagtttaagaacccaaatggtccaagttttcctaaaaatcaaacttgtcataaagtgaaataaaggcaacatatattttgg

SEQ ID NO: 349348 - DNA, 663 bp, Homo Sapiens
  misc_feature (20)..(20): n is a, c, g, or t
  misc_feature (33)..(33): n is a, c, g, or t
  misc_feature (68)..(68): n is a, c, g, or t
tccgggaaaagaaccccccnaaaaagacctttnccctggggcaaaaaaccccttcaaaccccccttgnccctccccctacctcctgaataattaaccaaatccatggagccctttccaccatgccattgaactcctaaagaggtgggttcccccggatagcagaagtagataggaaggccatcattgaacatttacctgagatggattgaatcagagggtgtaaattctgctccatcaatgttgaaaaagactagcccaccccaaaggtttatcactgtcaccatgtctaatgtctattctggaagaagctgaagaagtctgcctttgtttagggaaccggttccagaatcagaggggttgaggatataaaagacccttgcacaagagttggtatttaccctgtcagatgctgctaccaagatttggattgtgtacagtcgaggattaaaaatgacttttaagatgcagtgtttcatctggtgacatttaatttgatattttaaaattggggagggtattttcagccatgggggtagggatgtgaaagaagaagaaagtaagaattggagtcagatgtggttttgagtcccatacatttattgtttaatattatatggtaagttctttaaaatggtaaatagtaaatacttgtgttattcacc

SEQ ID NO: 349349 - DNA, 445 bp, Homo Sapiens
  misc_feature (428)..(428): n is a, c, g, or t
cactttgaagcacaaaactatattatgaaagcatgtggcattcaatttctgacattcatcgccaaagaaggcaaagcacaacactaacacatctctgaaatgcaaattccattaagtgcaaatttctaaaacacaaggtcaacctagaaacacgttttaaatttcaacaagttctctttttaaattagtatgctcagtatataattttcaaacacaatctgaagtgattttctaacgtttgttctcagtctaacttttgctccctcataaaaatatactctcatgggtccattttcagtcttctaatttttggcaattattagctcaaaatatctaaccttttagggaacatcttttctttccacatttttcaaatatgaaaaaggctttgcttaagtcttaccgtagggacaccaccagtaatagcnttcccttcagtttgagg

SEQ ID NO: 349350 - DNA, 984 bp, Homo Sapiens
  misc_feature (220)..(220): n is a, c, g, or t
tctaattcagcagtgtactgcattcttgcttgatgctctgaagaataatcgcccatctgaaggtcctttacagacgcggttacttgagatgaaccttatgcatgcgcctcaagttgcagatgctattctaggcaatcagatgttcacacattatgaccgggctcatattgctcaactgtgtgaaaaggctggcctactgcagcgtgcattagaacatttnactgatttatatgatataaaacgtgcagtggttcacacccatcttcttaaccctgagtggttagtcaactactttggttccttatcagtagaagactccctagaatgtctcagagccatgctgtctgccaacatccgtcagaatctgcagatttgtgttcaggtggcttctaaatatcatgaacaactgtcaactcagtctctgattgaactttttgaatctttcaagagttttgaaggtctcttttattttctgggatccattgttaactttagccaggacccagatgtgcactttaaatatattcaggcagcttgcaagactgggcaaatcaaagaagtagaaagaatctgtagagaaagcaactgctacgatcctgagcgagtcaagaattttcttaaggaagcaaaactaacagatcagctaccacttatcattgtgtgtgatcgatttgactttgtccatgatttggtgctctatttatatagaaataatcttcaaaagtatatagagagatatatacagaaggtgaatccaagtcgacttcctgtagttattggaggattacttgatgttgactgttctgaagatgtcataaaaaacttgattcttgtgtaagaggtcaattctctactgatgagcttgttgctgaggttgaaaaaagaaacagattgaaactgcttctgccttggctagaggccagaattcatgagggctgtgaggagcctgctactcacaatgccttagccaaccgtggactagtg

SEQ ID NO: 349351 - DNA, 778 bp, Homo Sapiens
  misc_feature (744)..(744): n is a, c, g, or t
tgaggccgggcttcgctgccccatcatcctcctttccaccatggggctgcgggacattatgtgtctctgtggccgggggctcctgtctggcaaactggggggctggggagccggggccttctccccaaaatgtcgtctctctagcatggggctcctctccatctggctggtgccccctggcgcctggatcccaaaaggcctggccgtcctgttgaccactgatgggggcttggccagtgtgaagtggacctcactgtagaccttggtgggcgtggtggcagctgctcgcccagacatctcttgatctgctgacaccactagggtgttgggctggatgtcaatgagcagggagctggacatgaaatctgaggctgggggcctggagctggggatgagcgtagcttctctggagaaggtgctggtggtggtagctggagttgataccttgtcaattaggagtgtgctgcatctcacctcctcagccggtgcctggggttgcccatcagcacacagggtgctgggtttgaaagaagaccctgtgccattagatgggagttgggcctctgaggaattctgttggatgctagaaagtggcaggctctgtgggacaacagttgccggtgggttctgattgacatcggtggctggcggattgtggctgctgttagaagttggtgtggtgagcgtggcactgggcgaggcaaggttttggttgacatctgcagctgggctgtggacctcagnctggaggcctagtgccgaaaactgggctcgtagg

SEQ ID NO: 349352 - DNA, 846 bp, Homo Sapiens
gtcatctgtggaggagaaaagtcacatccagcgtccttcatgttgctgccgatgtgggattttcctggcttcgtcagccaagcaattggctgcctttgccggaggctttgagaaccaaggcttgaaggccggcaggagcatccagggggaagcttggcttcagggaggacctagcagacgttgggccggagcactagcctcacggagaaggatctgaaagaagccaaggcgcggagccagcagattgcagcccagctgaccacccctcccagctccaattcccgtggcgtccagctcttcaacaggcgccggcagagggtgaacgagttcaccttggagagccacggccagaggggacagaagcccagccaggagtccctcagagtgctcccttcaagcctcccaggccatgcaccggggctcagcctgagttccacctcgctgccggagccaggccctccacggcaccccagtccccagagccccgacagaggggtccctggccacagcatggaggggtactcagaggaggctagcttgctgcggcacctggagaaggtggccagtgaggaggaagaggtaccactggtggtttactctaaaggagaaatgcagcactgctgacagccaatgggctgcacctgtcccaaaaccgagaggcccagcagtcctcaccggcccaacatccagctgaggtccacagcccagctgcagatgtcaaccaaaaccttgcctcgcccagttgccacgctcaccaacaccaacttcgtaacagcagccacaatccgccagccaccgatgtcaatcagaacccaccggcaactgtagtcccacagaacctgccac

SEQ ID NO: 349353 - DNA, 2332 bp, Homo Sapiens
  misc_feature (241)..(249): n is a, c, g, or t
  misc_feature (337)..(337): n is a, c, g, or t
  misc_feature (361)..(361): n is a, c, g, or t
  misc_feature (522)..(522): n is a, c, g, or t
  misc_feature (535)..(535): n is a, c, g, or t
gttgggttaatacttttaattacatgattgtaattatacaatttccactattcgatattttgtataaaaccagttacaacccacaagattttcaaatgtgacaatatgtatcaaactacatacatatgcaaagtttacacgccattaggaagctttatcttaaaaataccttcaggaaaataaacattcattcaaccagttctcttggctttaaaaaatatgattagaaatatacgctgtnnnnnnnnntcaagacaatgattgatcaatactgatcagttacattttaaaacttttaataatctgtacatgagtgcaggttagataaaagtctgcnaattattaatagaaaactgcagtnctatcatcggatgaacatgtctgctgacaattctaccaggtaattaaggaggtaatttcctacacagtataggtgaattgtccagtctttaaacacatctggagtgatctccactgagtgacatggagaataacctgatgtgggtgaatggaagagcagcngatagcctctccngggcagtttcagcgggagagaacatttaaaggaacaataaaataggttttaaaagttgcttttgatgagcactgctttccaaaatgcaataatgattttttttaatgtagaaagagaagctgtgttacagaacagacatccaaatgagtgcactgcttctgtggctccaaaggtgactgggaaaagagaaggccccaggagagccctcaggccacacacaagcccaggccatccgcgcccagcccagcgagcacactggcatcataacaatgcttgggaactcctctaaaacttgcctaggcccaagaaaacagagaggtagcaatcacccctgtgagagggctagagaggaggggaggaagtaggtaggggacaggctaggggcatcaagctcagaacaggggaattctggaggccgcagagctgcgtgctgccgggaagcactggccacgccaggccattctgctctcacgaggcgctgctcctcaccaaattctacaaaaagctaagtccgtctatacttctaggaacccagttttgcagacgctcttcctccggactgtccctgacttttgataattttgagtccccagaaagcttcaagagcacctaaaaatattcacttccaattttaattccatcgcaaaccgtcccagtgtactttcagggctatttaaggctcttaggttaaggggatctctccatctgacacacagtttcatgttccatagcaacaaggtcttctataacaacgactctaagtcagaattccagaagattctggttgtttgtggtttcagttgggggtgaggggaagagtccactctcattcatagcaggaagaactttccatccctcagacccagagacttcctggatgctagagacagtcctcataagtgtaacactgcccttgctatgcacaccatcccaagtcatttggttattacaaggaatgcctcttcaccaaatcacaagttttctatgactaatttcagtgaaccagttaaatagaaagatttttagaaagagccacagtgatagcaattctaggtggaaacttgagcaggcaacatgaagaggcagtttataaaatgaaaaagggctgtggttccagtgacaccctttcttttcttggacgaaacaccaggaggctcattcaccgtgagggagacagtactcacaagagctgtggcgcctacgtttacttgttctgatgggatgaaaagccaaactaagaagggatcagatagaagcacgattttcacaactacctggattattattaatggaggggatggccttaaaaggggtaaggggaagaagaggtgccctgagaattcaatgctttatgcatggcacagtttgaatatttatattgtctcagctcaaaatagcaaaaggaatgttcctcctcccacccaaatcttattgaagagtagtctgcccacagccaagtgggtctttgtgcctattcatttccagggacagaaaaccactgtttttctgtgatccagtccccagtgtttaaaagctggcctgaccccacccgacagtgcctggcggggaaagagttgcttgtttggctgagaacacggcatcttccgtctctcatgatgccggtcaattttatactttcttccaagaaagtacaccaaaatggagcactgcctttcaattactttttgcattaaagacttttaacttgtttattccaaccgcttttatttcttccagttttgtgaaaaaggcagcttcttaaaatggagttgcctactaatctggcgcacgccttgt

SEQ ID NO: 349354 - DNA, 527 bp, Homo Sapiens
catggcctgagagtagagtatctgtctactcatgtttaattaaggaaaaacacttatttttagggctttagtcatcacttcataaattgtataagcacattaaatagcgttctagtcctgaaaaagtccaagattcttagaaaattgtgcatatttttattatgacagatgtttgaagataattccccagaatggatttgatactttagatttcaattttgtggcttttgtctattattctgtactctgccatcagcatatggaaagcttcatttactcatcatgacttgtgccatataaaaattgatatttcggaatagtctaaaggactttttgtacttgaatttaatcatgttgtttctaatattcttaaaagcttgaagactaaagcatatcctttcaacaaagcatagtaaggtaataagaaagtgtagtttgtacaagtgttaaaaaaataaagtagacaatgttacagtgggacttattatttcaagttttacaattttctccatgtgaattttttaaaa

SEQ ID NO: 349355 - DNA, 1364 bp, Homo Sapiens
taaaggtggagaaacaggtgaatgatgccgtttctaaaggtgccaccgttgtgacaggtggaaaacgacaccaacttggaaaaaatttctttgagcctaccctgctgtgcaatgtcacccaggacatgctgtgcactcatgaagagactttcgggcctctggcaccagttatcaagttcgatacagaggaggaggctatagcaatcgctaacgcagctgatgttgggttagcaggttatttttactctcaagacccagcccagatctggagagtggcagagcagctggaagtgggcatggttggcgtcaacgaaggattaatttcctctgtggagtgcccttttggtggagtgaagcagtccggccttgggcgagaggggtccaagtatggcattgatgagtatctggaactcaagtatgtgtgttacgggggcttgtaggattctttggttctttaaaaaaatttaaaaggagacttatctacatatataggtacatgccatccattattttaaataaactaataggttttcagaattatgaatttttcagaactcatccagtccttgtaatcttaaacagatgcaaatcctacccctgcccttaatgtaactagggaccaatatgtgccacgtgcctgtggctgcagactcccagagaaccagcactgggtttacagaatgaggccctggctccccaccacagccccagctgcctcagagcaggcacagcacaaggcaggcccagccccatgggccgtcacaaaggcttgatcactgcctgggcagtggcacaaccatcccccatgtcgctacagaacatgggcccagagcaccttgaaggagacccttgactgtgactggcaggcaggtgaggggcacagcacccctccccggcatctgccagctcagcacagaagacaccgaatgtgcatctggaggtgttgcggcagaggtttgagtgaaccctctttcaaagacaataaatagcacagaattgtccgtgcttctgtgaggcacgaaggagcacctctccctattcctgaaccatattttaattgatgcctttattgtcccaaatttacccacttaaagaattcctattttcatttctgtccctgtttgcccacttcatttcatttccttgagtaaatgagctgaagtgtaaagcaaagaatagcagaagcagcttggtaggatggaaggcacgcagtggcatggcctggctccttccctgagtggccttgttgccttgggcgtgtgttcagcacctcccatcccatggatacagtggagattccatacaggccttacttagctccttgcgatactgtgagccagagagaaagtaaaagcacttcacaa

SEQ ID NO: 349356 - DNA, 407 bp, Homo Sapiens
ccgtgcaatgggcctttcagagaagagaggaaaatggtacaggaagatgaaaaaattggcttcgaaatttctgaaaaccagaagaggcaggctgcaatgactgtgagaaaagtccctaagcaaaaaggtgtcaactctgcccgctcagttcctccttcctacccaccaccgcaggacccgttaaaccacggccagtacctggtcccccgacggcatcgctcagtcgcaggtctttgagttcaccgaacccaagcgcagccagtcaccattctggcaaaacttcagcaggttaacccccttcaaaaaatgatacctacagggaggcagatcaatcttacaataacaagtcacataaaattatatttatcgatggaccttctcttcggagaagcactgttgaaatttat

SEQ ID NO: 349357 - DNA, 814 bp, Homo Sapiens
ctggaccggtccggaattcccgggatggcagcggtgccggcggccccgcgggccgggggctgagcggcgcccgctggggtcgctcgggctccgcaggccacgagaagctgccggtgcacgtagaagacgccctcacctatctggaccaggtgaagatccgctttggcagcgaccctgccacctacaacggcttcctggagatcatgaaggagttcaaaagccagagcatcgatactcctggagtcatcagacgtgtctcgcagctcttccacgagcaccctgacctcattgttggattcaacgcttttcttcccctcggatatagaatagacattcccaagaatggcaagttaaacatacagtcgcctctgacaagccaggagaattcgcacaaccacggggacggtgcagaggacttcaagcagcaggtgccgtataaagaggacaaaccccaggtgcccctggagtccgattccgtggaattcaacaacgccatcagctatgtgaataagattaaaacccgcttcctagaccacccagaaatctacaggtcattcctggagatcctgcacacgtaccagaaggagcagctgaacacgaggggccggccattccgaggcatgtctgaagaggaggtgttcaccgaggtggccaacctcttccggggccaggaggacctgctctcagagtttggacagttcctgcccgaagccaagcggtctctgttcacaggaaacgggccgtgcgagatgcacagcgtgcagaagaacgagcacgacaagaccccggagcacagcaggaaagcgctccggcc

SEQ ID NO: 349358 - DNA, 1866 bp, Homo Sapiens
  misc_feature (1587)..(1690): n is a, c, g, or t
  misc_feature (1707)..(1770): n is a, c, g, or t
ggcaccggtccggaattcccgggatgtgactggctcttccctgaatgaatgacccgaggtgaacaaagaggagactttgctggatctggactttgatcctttcaagcccgaggtgacacctgcaggttctgctggagtgacccactcacccatgtctcagacattgccctgggacctatggacgacaagcactgatttggtacagccggcttctggtggttcatttaatggattcacacagccccaggatacttcattattcacaatgcagacagaccagagtatgatctgcaacttggctgaatctgaacaggctccacccacagagccaaaagcagaggagcctctggctgctgtcacacctgccgttggtctggaccttggaaatggacactcgggctgaggagccagtggaggaggcagtgatcatacctggagctgatgctgatgcagctgttggaaccttggtgtcagcagctgagggggccccaggagaggaagcagaggcggagaaggccactgtccctgccggggaaggagtaagtttagaggaggccaaaattggaactgaaaccactgagggtgcagagagtgcccaacctgaagcagaggagctcgaagcaacagtgcctcaggagaaggtcattccttcggtggtcatagagcctgcctccaaccatgaagaggaaggagaaaacgaaataactataggtgcagagcccaaggagaccaccgaggacgcggctcctccgggccccaccagcgagacaccggagctggctacggagcagaagcctatccaggaccctcagcccacgccttctgcaccagccatgggggctgctgaccagctagcatctgcaagggaggcctctcaggaattgcctcctggctttctctacaaggtggaaacactgcatgattttgaggcagcaaattctgatgaacttaccttacaaaggggtgatgtggtgctggtggtcccctcagattcagaagctgatcaggatgcaggctggctggtgggagtgaaggaatcagactggcttcagtacagagaccttgccacctacaaaggcctctttccagagaacttcacccgacgcttagattagggcaacaagtactgcaagaaggagctcagttacggggtttttaaaccttcatgaaaacctgaagagttcacttttgttattatgctcttaatgatttacagactgatgccagacaaaccttgggaagatgtatcaatggagcatgtgtgcaaaaaaatgtaagaggaaaaaaagtaaattaaggaaaaaatcctcactcattcccatgttgtcaataacaggtttgtttgtgctttgtccaagctgtggagactcttgtacttgatcccctcccaccaattctcaaagtaggctttctccagatcagactttaatttctctgcatcaggtgtatcgtattgagtggctgccctgcagaagatgtgatgaattatcctgtagtacaagattatcttattcccctgcccaggtgtgagcacgtgctctcgctccctttcaggtttactatgtttaaaactaaactgctgtaaannnnnnnnnnnnnnnnnnnnnnnnnnnnnnnnnnnnnnnnnnnnnnnnnnnnnnnnnnnnnnnnnnnnnnnnnnnnnnnnnnnnnnnnnnnnnnnnnnnnnnnnaacttataacttataannnnnnnnnnnnnnnnnnnnnnnnnnnnnnnnnnnnnnnnnnnnnnnnnnnnnnnnnnnnnnnnaatattctattttatctcttctgttatttcttttctttttgttatatatctcataatctattattaattaatattaaacttacttataaaattctt

SEQ ID NO: 349359 - DNA, 863 bp, Homo Sapiens
  misc_feature (555)..(595): n is a, c, g, or t
agcgaaggagtaagtttagaggaggccaaaattggaactgaaaccactgagggtgcagagagtgccaaacctgaagcagagaagcctatccaggaccctcagcccacaccttctgcaccagccatgggggctgctgaccagctagcatctgcaagggaggcctctcaggaattgcctcctggctttctctacaaggtggaaacactgcatgattttgaggcagcaaattctgatgaacttaccttacaaaggggtgatgtggtgctggtggtcccctcagattcagaagctgatcaggatgcaggctggctggtgggagtgaaggaatcagactggcttcagtacagagaccttgccacctacaaaggcctctttccagagaacttcacccgacgcttagattagggcaacaagtactgcaagaaggagctcagttacggggtttttaaaccttcatgaaaacctgaagagttcacttttgttattatgctcttaatgatttacagactgatgccagacaaaccttgggaagatgtatcaatggagcatgtgtgnnnnnnnnnnnnnnnnnnnnnnnnnnnnnnnnnnnnnnnnntcctcactcattcccatgttgtcaataacaggtttgtttgtgctttgtccaagctgtggagactcttgtacttgatcccctcccaccaattctaaaagtagctttctccagatcagactttaatttctctgcatcaggtgtaatcgtattgagtgggtgccctgccgacagatgtggatgaattatcctgtagtacaagaattatcttattcgcctgcccaaggtgtgacccggtgccctcggcccccttcaggttactatgtttaaa

SEQ ID NO: 349360 - DNA, 538 bp, Homo Sapiens
  misc_feature (390)..(430): n is a, c, g, or t
caggagttgcctcctggctttctctacaaggtggaaacactgcatgattttaaggcagcaaattctgatgaacttaccttacaaaggggtgatgtggtgctggtggtcccctcagattcagaagctgatcaggatgcaggctggctggtgggagtgaaggaatcagactggcttcagtacagagaccttgccacctacaaaggcctctttccagagaacttcacccgacgcttagattagggcaacaagtactgcaagaaggagctcagttacggggtttttaaaccttcatgaaaacctgaagagttcacttttgttattatgctcttaatgatttacagactgatgccagacaaaccttgggaagatgtatcaatggagcatgtgtgnnnnnnnnnnnnnnnnnnnnnnnnnnnnnnnnnnnnnnnnntcctcactcattcccatgttgtcaataacaggtttgtttgtgctttgtccaagctgtggagactcttgtacttgatcccctcccaccaattctaaagtagctttctcc

SEQ ID NO: 349361 - DNA, 2182 bp, Homo Sapiens
acaacagttatcttcttcacacatctgctcaacatcagtgaagccctgcagcagtgtgtgacctctcccagctctggttccgagaattcttcctggagttaaccatgggccgacgaatccagttccccatcgagatgtccatgcactggattctaacggaccatatcctggaaaccaaagaaccttccatgatggagtatgtgctctaccctctggatctgtacaacgacagcgcctactatgctctgaccaagtttaaaaagcagttcctgtatgatgagatagaagctgaggtgaacctgtgttttgatcagtttgtctacaagctggcagaccagatctttgcttactacaaagccatggctggcagtgtcctgttggataaacgttttcgagctgagtgtaagaattatggcgtcatcattccgtatccaccgtccaatcgctatgaaacactgctgaagcagagacacgtccagctgttgggtagatcaattgacttgaacagactcattacccagcgcatctctgccgccatgtataaatccttggaccaagctatcagccgctttgagagtgaggacctgacctccattgtggagctggagtggctgctggagattaaccggctcacgcatcggctgctctgtaagcatatgacgctggacagcttcgatgccatgttccgagaggccaatcacaatgtgtccgccccctatggccgtatcaccctgcatgtcttctgggaactgaactttgactttctccccaactactgctacaatgggtccactaaccgttttgtgcggactgccattcctttcacccaagaaccacaacgagacaaacctgccaacgtccagccttattacctctatggatccaagcctctcaacattgcctacagccacatctacagctcctacaggaatttcgtggggccacctcatttcaagactatctgcagactcctgggttatcagggcatcgctgtggtcatggaggaactgctaaagattgtgaagagcttgctccaaggaaccattctccagtatgtgaaaacactgatagaggtgatgcccaagatatgccgcttgccccgacatgagtatggctccccagggatcctggagttcttccaccaccagctgaaggacatcattgagtacgcagagctcaaaacagacgtgttccagagcctgagggaagtgggcaatgccatcctcttctgcctcctcatagagcaagctctgtctcaggaggaggtctgcgatttgctccatgccgcacccttccaaaacatcttgcctagagtctacatcaaagagggggagcgcctggaggtccggatgaaacgtctggaagccaagtatgccccgctccacctggtccctctgatcgagcggctggggaccctcagcaaatcgccattgctcgcgagggtgacctcctgaccaaggagcggctgtgctgtggcctgtccatgttcgaggtcatcctgacccgcattcggagctacctgcaggaccccatctggcggggcccaccgcccaccaatggcgtcatgcacgtcgatgagtgtgtggagttccaccggctgtggagcgccatgcagttcgtgtactgcatccctgtgggaaccaacgagttcacagctgagcagtgtttcggcgatggcttgaactgggctggttgctccatcattgtcctgctgggccagcagcgtcgctttgacctgttcgacttctgttaccacctgctaaaagtgcagaggcaggacgggaaggatgaaatcattaagaatgtgcccctgaagaagatggccgaccggatcaggaagtatcagatcttgaacaatgaggtttttgccatcctgaacaaatacatgaagtccgtggagacagacagttccactgtggagcatgtgcgctgcttccagccacccatccaccagtccttggccaccacttgctaagcagaagatcctgcagacccttatctggaggaggaagagaagcaggagagagaaagccacagccagcctgccataggatccaactggacaacgtgtgggatggacctggaaacaagcacctccccaaacacatcaccactccctagggcggggcctgtgcatgctctcccatgacatctccatgctggtttctccatagcataaatg

SEQ ID NO: 349362 - DNA, 514 bp, Homo Sapiens
tacggtctgttaccgcgggaggatggagcaagtggagatcctgaggaaattcatccagagggtccaggccatgaagagtcctgaccacaatggggaggacaacttcgcccgggacttcatgcggttaagaagattgtctaccaaatatagaacagaaaagatatatcccacagccactggagaaaaagaagaaaatgttaaaaagaacagatacaaggacatactgccatttgatcacagccgagttaaattgacattaaagactccttcacaagattcagactatatcaatgcaaattttataaagggcgtctatgggccaaaagcatatgtagcaactcaaggacctttaacaaatacagtaatagatttttggaggatgatatgggagtataatgtagtgatcattgtaatggcctgccgagaatttgagatgggaaggaaagaatgtgagcgctattggcctttgtatggagaagaccccataacgtttgcaccatttaaaatttctagt

SEQ ID NO: 349363 - DNA, 3005 bp, Homo Sapiens
gttctggttctgccacacacccaccggccttgaatttctctggtggtctcaagacaagaacaagagctgactctagaatcttctgcctggctgacctctgagcccatgatccctggcttgctgtgcttctcttggatttgaggagagtttatgaatccatccccctgttttcagggacctctgccttctcccacaccccttacactagtgaggactccttcggcctcttgtgtttccttccttttgtgaccattacgccccctccctgtttcttatcaccagcccatcagcccactgactcccatatggtagaaaaggtaccgtggctgctgcagggcacatggagggacctaccctctgggaaagcccttgtgtccctcccagagtccttcaggtaggccctcgcagatgctgcttgctcagaaacaacccgtgcatccctgcccatggattctgcaggacctagaagagtggcattggttctaggaacctgagagtggagtgaggccagcatgcaggaaggagtttggagagagtgtttgctgtgatccattgaaagctccacattaaaccccagccctgtctggccagggagatccatgtgctcaatgttgctgggggacctacaaaagtcaaacattgctcagtaaaatgcctttggctggtcgccagctgtgcatgactgcagttcctagactctaacttaaccccaactttgcagtttctagagctttttgtctgtaatggtgattgggtctccactgtagatgcatgcagtgttcactccaacctcagaggctttcttgcttctggggaaatggcaggtggttgaaaccctgcacatcctcccagggccagccccagaatgggcctttctctgcctgccctgcccttggggccacctctgcctccagcaggcttgagcttgccccaggccttgggcataattatttccccccaaaaaaggcacaaaaataggttttggatcaaagaagtgtttctcagtgaaatgaaaacagtctttttatagcctttagcttgtgagtttggaagtttggggggtcttatgtttgttttgcctcttctgtttcttggaggagagttgaggcttttcttaggtgcatacacagacccaggtgaacacgctgactgtgaacctgccctgtatccggagctgtgctgggcactgaggggatgcaacaaaattaggagaggatccttgctcccaacgtctacttctcctacctcaacaggggtccagggtgcagtgaactcagttcttggcccttgggtgaggattcatggatgaatgaaagctagacctgatggggaggcattatgactaaataggcccagcctccttcccttccagctctgtcctaggagcataggcgggaaatctgagtagagtctgactgcagtttttgcttatgatttgtaaaagccgtcatggggtcaataagaaaataggggtgatggagggggagaagcccaggactgggagaatcgcacatgccccaggggttttcaccaaggattttcaagacaaactggagtaagaattaaagccccagaggatttaattatcctggtttgcaaaagagcctcccatgccagtaccgcccagccttggaggccggaatgctcatggcccctgtggtctgcttgtccttcagcccatgcccagcagatacctctctgactggagacgggctcaaagctggattagaaaggggagaggcacttgtgactttgtttgactctgtgactcacttcctcgctcacaccttgtttgaactactggactttcaactggctttccttaggtcaggcaagcagacagctccccactgaagaggtctgtacagtgacaacccgggccggcagcaaggacacagatgcagccacagtaaggctccatcaggactgggtcagtgatggcaacaggatggccaaggatggctctagaacactctgtccatgcgtcactccccccagttttatttttagctttggcttcagggagtgacagccatcacaaatagccacattctgctctactctccaacataccagattctacactgttgttatttcatgagacgtgaatgttgcagagagtggggggattctggttgttaaggaacttacactggggagctttactcttccgtgtcaacaatgtgactacatgttctccagattagccacacatgcaaacatcagtgtccttctagctttagccgagaaagaaaccagtcccagggaatgaatggtggtctccccactcccggcagcactttaggcagcccataagctatgcgagaatgtgaacgctcaccttgctccgtcacggttctgacctaccacataaacaggaagaagccagtgaccggaacagctctaggaataacaagtcagaatagaagtgtcctttatattaccagaaaatatgggcttggcctaagtcgctgtctcctaacctgccggggtcattccccaccaaacaccccatactaaggagccatgagccacctggacattcaccttttctttgaccatctggagtctggggcaacttaaggaggcaccacacagtggtgcaggcacatttccaagcgtaggtgtccctggcttttgtggccaaagctagtgttatggtcaacaacaggccagggtctgtggggcactgaccttgaaagtggcaaaatggaggtttcacaggctgtgcgggagcaggacggcttgcttcatctaacaatctcagtttcctttaaaaaaagaaagaaaggaaaagatttcataagcaggtgtcagtggacagtttaagcacttaaccatttctctttcttcttatggatgtgaactgtgctgtggataaatcatttgtatttcttgaatgttctctatgactaacagttattaagtcggttgtgtatatgtgtaactaatgtaactgccttttaaaatttcattacaataaaaatgactttgctctgaacaac

SEQ ID NO: 349364 - DNA, 300 bp, Homo Sapiens
  misc_feature (81)..(81): n is a, c, g, or t
  misc_feature (101)..(147): n is a, c, g, or t
  misc_feature (157)..(157): n is a, c, g, or t
  misc_feature (167)..(167): n is a, c, g, or t
  misc_feature (220)..(220): n is a, c, g, or t
  misc_feature (258)..(258): n is a, c, g, or t
cccagaaatgcagtcagaaggaccctgctccaacctggggggactgggagtgtgagtgtgcatggcatgtgtgtggcacanatggctgggacgggtgacannnnnnnnnnnnnnnnnnnnnnnnnnnnnnnnnnnnnnnnnnnnnnngcatgcgctnacaaatgtgnccttgatccacactgcccctggcagagtgagtcacccaaaggcccttcggccnccttgtagctgttttctttccttttgttgttggttttnaaatacattcacacacaaatacaaattgacaggtcaaaatcc

SEQ ID NO: 349365 - DNA, 2227 bp, Homo Sapiens
  misc_feature (175)..(215): n is a, c, g, or t
acatcgcctgagcagtgtgagctcatctcaccagatgagaagaggccctgtgcatttcttttgtttgtttgttgctgttttcccccacccatccagttctcctcagcaaagcaaattcctgaacacctttggtggagaatttcttacccagacttggggctgtgatgcccttcannnnnnnnnnnnnnnnnnnnnnnnnnnnnnnnnnnnnnnnnaacctgggggccatcctggtggcctgggagcgtgaggagaggccccctgtgtgctgggtgagtggtgggtgtggggtcaatgcagtgaggctctctgggtgaggctcccaacctggcagtccccagcctcccagcatctgtgagcgtctgttggactttacagaagagcctcatcccgtctgcccctcactctgccctggaatcaacatcttccgagtccttcttgggggaaatagcagagccccacttaactccataaactgcttcccattccgcagcccagttctgattgttgaggtgtcgcgtcgttccaggtcccccagtcccctctttctcctgtcctctctctgtccttcacctccccactccagccccggctcagttcagggaaatgctgttccacatcagccctctgctctctgaggcagccgcgcctctgactcggagctacttgaaacttctgctcttgctaggattggagtctacctatctcttccatttgtcccagctggagttctggaactttcctcctcggggtgggggtgggggttgttaaggatgctggggggcctggggaaggaaggagttcagaggaagggtgtcccctgtcctcttgatgtcaccctccgctcctgggacacgtgctctctctgtctctgggtcttctggctgtgcacgtttgtgtgtccttgtaaatatgttttaggaagaaagcaaaagggactgaactagcctctggtaggattgcaggggtccagccttgcctgtttccgaagcccccacactgcctttcgccccactgagactggtcccctcaaaaggtagacaaaacagcagctccctgtggagctgaagggcggcctcaaagtggctttttgttagacaaggttaaggtttcctcatgagcaaggttgcagatcggtccttcctcagctccttgatttgtgaccttgaccaaggggcctgccacccagcccctccagtgccctctcctcgatgcctcgctccttcctgcccccactcccctggcttaggcaggtaggggaattagggccatgctggaagaagcttaaccatgtgttcaaagaacggtttcttgcttgcttggtcctggaactccccttggctgccccaggcctccttggcccatgggtgctgggggaggtggatgtcagatctggtaggttgcagcagagaaaataaatgtgccttgagagaccactcagagagggtccaagggtgatggagaaggaagcatggcctgggagcttggaagggaggggtggtgggtggcggcatcttgactgccccctgttgtcccacacgtggggggtggtcaccccccttcactccagcccgcctgccttcagccttccatgagcttcacctgcttccaacttcactttggagggggtggggtccgttggcatcaacacggggaccctctgcttcaccaaagcccgagccctcagcccctggggagaacaaatggctgagctttgatacctggggtcgtcgagaggctgcgggctggcggcagtcccaggggagagacaccacagaaggagacccagacatcccgaggaagttcccagcagagcaaactgctttccagcctgaagcctgcttaaactgtgtgatgtgcaataactgagcttagagttaggaattgtgttcaagtgcttggatttccgtctgtagatttaactgctgaaattgtatctctcagtaattttagatgtcttttaaaaaattgaaaaacaaagtgttagactgtgtgcgtgtgcgttgatgggcactcaagagtcccgtgagtcatccagccctgcctttcccctgcgcccccatcctctcacgtcccgccccgcctccacttggggaccctgcctcgtgtcgtctttatctgcctattactcagcctaaggaaacaagtacactccacacatgcataaaggaaatcaaatgttatttttaagaaaatggaaaataaaaactttataaacaccaaaaag

SEQ ID NO: 349366 - DNA, 1748 bp, Homo Sapiens
  misc_feature (1622)..(1668): n is a, c, g, or t
cgactgacaggttgggagcctcacccagagagcctcactgcattgagcccacacccaccactcacccagcacacagggggcctctcctcacgctcccaggccacccaggatggcccccaggttcacacacaggcacacgcacacacgctgcactcaccacgcactgaagggcatcacagccccaagtctgggtaagaaattctccaccaaaggtgttaaggaatttgctttgctgaggagaactggatgggtgggggaaaacagcaacaaacaaacaaaagaaatgcacagggcctcttctcatctggtgagatgagctcacactgctcaggggatgttggggaacagcgaggtgtgaggtgtggcctcagagcccggctgcacctgtcctgttccctctgacttctcacttttccacattgcaggcttcaaaacagagcttggggaagcccctctgcggggcagccctagggaatcctcagaggggccagaaggaaaccctgggggctgagggaagtggggctggacatggcctgtgggtggctctcccctggcaggaggaagatcatggtctcagagtgcggaaaggctgcagctttcggcagctgcttctctccggggtctcagggacagctctctctgttggtctgggcaggacaggagtgttaagggtaagggaggaggtgggcacacacccccttagcctagacccaggctccttgcctgctgctcctggccctcaggcgccctcaagtggatgaggggaccccagcaagggggatggaggcaggaagttgcaccaagggggagccaggcagaggtcaactgtgtaaccaccacccagtgtccccaagagagcagcccagatcatggctccaccacgagacccagagaaaagggacaggctattccagggtctaggattcagagctgccccatctcaacacctaaaagctcctccaggctctgcagccacagcctcctcctgttgagccgaccccctctcctcaccctgttctacctgcaccacctgggccacctgggacagacctcagacagcttggcgaggcaccctgtccctggcctctcagctgctgccctcctcctctgccgccaccaccttcattctccgccttgggttaggagagcttctctagtgtttggggatccggcaaagggacagggcttgctgtggctgggcgtcctggcccgtctcatctgaggctggtggggatgtcacaccacatcggcccagttttgggaggacctcagctggtagacagctccctgcccctccctcccctttgcaatggggacaggctcgcaggccagagcttgacctcagaagcaagagggagaagggcagacaggggtcggttgagccagggtagaaaccaaggggagccagggtagaaaccaaggggtcagggctgggctggaggacacggctgggggatctcatttcatggattttgacctgtcaatttgtatttgtgtgtgaatgtattttaaaaccaacaacaaaaggaaagaaaacagctacaaggaggccgaaggggcctttgggttactcactctgccaggagcagtgtggatcaaggacacatttgtcagcgcatgcnnnnnnnnnnnnnnnnnnnnnnnnnnnnnnnnnnnnnnnnnnnnnnntgtcacccgtcccagccatctgtgccacacaccgacgcgtggtcgacgatatcccggaactccggaccggacatggcgca

SEQ ID NO: 349367 - DNA, 402 bp, Homo Sapiens
  misc_feature (213)..(273): n is a, c, g, or t
  misc_feature (363)..(363): n is a, c, g, or t
gcggaatgggaagcagtttatggagttaagtggggctctgctatttcccccaagaaggactcggaagatgttgattccagggcagagtgaggggcagacaggatgaggctcttctgtaaagtccaacagacgctcacagatgctgggaggctggggactgccaggttgggagcctcacccagagagcctcactgcattgaccccacacccacnnnnnnnnnnnnnnnnnnnnnnnnnnnnnnnnnnnnnnnnnnnnnnnnnnnnnnnnnnnnntgaagggcatcacagccccaagttctgggtaagaaattctccaccaaaggttttaaggaatttgctttgctgaggagaactggatgggtngggggaaaacagcaacaaacaaacaaaagaattgcacag

SEQ ID NO: 349368 - DNA, 1925 bp, Homo Sapiens
  misc_feature (1457)..(1517): n is a, c, g, or t
  misc_feature (1725)..(1771): n is a, c, g, or t
aaacgtgatgctgatgctacagttacagcccctgctggcgcagcctctctgattctctctccctctccgcgtccagtgctgggctttttcagacaagtgcatctcctaaccaggtcacatttcagccgcgacccactctccgccagtcaccggaggcagaccgcgggaggagagctgaggacagccgcgtgcgcttcgccagcagcggggtgggaggaaggacattaaaatactgcagaagtcaagaccccccaggtcgaacccagaccacgatgcgcgccccgggctgcgggcggctggtgctgccgctgctgctcctggccgcggcagccctggccgaaggcgacgccaaggggctcaaggagggcgagacccccggcaatttcatggaggacgagcaatggctgtcgtccatctcgcagtacagcggcaagatcaagcactggaaccgcttccgagacgaagtggaggatgactatatcaagagctgggaggacaatcagcaaggagatgaagccctggataccaccaaggacccctgccagaaggtgaagtgcagccgccacaaggtgtgcattgcccagggctaccagcgggccatgtgcatcagtcgcaagaagctggagcacaggatcaagcagccgaccgtgaaactccatggaaacaaagactccatctgcaagccctgccacatggcccagcttgcctctgtctgcggctcagatggccacacttacagctctgtgtgtaagctggagcaacaggcgtgcctgagcagcaagcagctggcggtgcgatgcgagggcccctgcccctgccccacggagcaggctgccacctccaccgccgatggcaaaccagagacttgcaccggtcaggacctggctgacctgggagatcggctgcgggactggttccagctccttcatgagaactccaagcagaatggctcagccagcagtgtagccggcccggccagcgggctggacaagagcctgggggccagctgcaaggactccattggctggatgttctccaagctggacaccagtgctgacctcttcctggaccagacggagctggccgccatcaacctggacaagtacgaggtctgcatccgtcccttcttcaactcctgtgacacctacaaggatggccgggtctctactgctgagtggtgcttctgcttctggagggagaagcccccctgcctggcagagctggagcgcatccagatccaggaggccgccaagaagaagccaggcatcttcatcccgagctgcgacgaggatggctactaccggaagaagcaaggggaccagaccaacggggactgctggtgggtggaccaacttgggcctggagctgacgggcacgcgcacgcatgggagccccgactgcgatgacatcgtgggcttctcgggggactttggaagcggtgtcggcttggaggatgnnnnnnnnnnnnnnnnnnnnnnnnnnnnnnnnnnnnnnnnnnnnnnnnnnnnnnnnnnnnncgaggctgacgacgggggctacatctggtagacgccctcagaagccggctgccgggggggactcaacagcagagctctgagcagcagcaggcaacttcgagaacggatccagaaatgcagtcagaaggaccctgctccacctgggggggactgggagtgtgagtgtgcatggcatgtgtgtggcacagatggctgggacgggtgacannnnnnnnnnnnnnnnnnnnnnnnnnnnnnnnnnnnnnnnnnnnnnngcatgcgctgacaaatgtgtccttgatccacactgctcctggcagagtgagtcacccaaaaggcccttcggcctccttgtagctgttttctttccttttgttgttggttttaaaatacattcacacacaaatacaaattgacaggtcaaaatcc

SEQ ID NO: 349369 - DNA, 923 bp, Homo Sapiens
tgcttatcggggccacgatgcaggtcacctccgagggcggcccccagcctcagtccaacatccttttctccatcagcaatgagagcgttgcgctggtgagcgctgctgggctggtacagggcctcgccatcgggaacggcactgtgtctgggctcgtgcaggcagtggatgcagagaccggcaaggtggtcatcatctctcaggacctcgtgcaggtggaagtgctgctgctaagggccgtgaggatccgcgcccccatcatgcggatgaggacgggcacccagatgcccatctatgtcaccggcatcaccaaccaccagaaccctttctcctttggcaatgccgtgccaggcctgaccttccactggtctgtcaccaagcgggacgtcctggacctccgagggcggcaccacgaggcgtcgatccgactcccgtcacagtacaactttgccatgaacgtgctcggccgggtaaaaggccggaccgggctgagggtggtggtcaaggctgtggaccccacatcggggcagctgtatggcctggccagagaactctcggatgagatccaagtccaggtgtttgagaagctgcagctgctcaaccctgaaatagaagcagaacaaatattaatgtcgcccaactcatatataaagctgcagacaaacagggatggtgcagcctctctgagctaccgcgtcctggatggacccgaaaaggttccagttgtgcatgttgatgagaaaaggctttctagcatcagggtctatgatcgggacatccacccatcgaagtgattggcacaagagccccttttggggcccaacccaacccattcattgtttgctggaaaaaggtattccccctggttttccctaaccctgaaggggtttttccattgaaacccccttggtccccttggcccc

SEQ ID NO: 349370 - DNA, 516 bp, Homo Sapiens
  misc_feature (160)..(160): n is a, c, g, or t
tgtctttctgtagcctctgcatactactggctgtcatcacaccagcgtaccagtagctaaatttttggtgcaatttatagcaaaatggataatgttcccttttgaacttttacattttggcatgacatttcagagtattgtgggaccatgagacaaaatnaagtacgatcacattctttatttctcattttaaagaaatgatgttggtttaccttttcctagttgaagatagtaattaggtttctaagctgtatactgtgtttattggtggcagtgacaccaaagatagaggcaatggatagaaatttttaaactggaaagaaaacctgaattacactacattttcgaagtctcttgtaattatttgggatatcaacaaaatttgattcgtctgtctaatcccttgctagtattttaaatatgtctttaacacattgtatcctttaattcttcattaaaatggaaataagtagatgtttcaaagtaatttacattcctggctttgcttaacgtttt

SEQ ID NO: 349371 - DNA, 1262 bp, Homo Sapiens
  misc_feature (46)..(46): n is a, c, g, or t
gctaaccggggtgcctggggtaagaccggttagccaaggggccttnccaggttctccattttccccataagagaactttgggcacctggtgaagccccaacaaaaggaatttggctcctgatggcaagcgggaaaaaggccctggcctttggggtctgaccaccccagggtcttggtcgtggggcccattgttgacctgctgggtgactttataagtcatttccccattgcaaccctcagttctgtcatttgtcaaagggggacactaatccctaccctgcctggctcacaaattgaatgggaaaagggtgtgcaagagctttgtagagaatcatggggaaggcaaggggtcattatggccttggagagcaatcctctgaattccctgaagacaagagggtgggaagggaagagacagaaaggagccgggccgctcgctgtcctcgtcgggtgaggcaggcttccggggctgctgagggaagagggggtgggacgaaagagggatcactgcagcctgcagtccagcacttacactgtggtaccttcagtgatgctgagagctccaggcgggagtgctgagatgtcctggcagcccccttcacaggggaaaagtccaagttctaagtctagctgggatcccgcttcccctcttgcttcctggtccactgagatggagcccctgccaaccccagggagtctgtagtcttcacccagctgaggggaagcctggctcctggggtggcagggaaaggggctgccggcagggggtctccagaagctggggacttttattagcatgaggtcaggaggttagaggttggcttccagttctcgaggtggtaggcgggggtcctcaggctggcccccactcctgtcctggctctgtctctggggtcactggtaagggagaagttaagggatgagtagaaacgacggagagatcggcttagaaaacagcccagctggggagctaacagttcttggggctgttgcgcaagtttttcagttccagctggagctgccgaatgcggatgtccttctgggccagctcctctttcaaccgtcgaatctcatcctgctgccggaagaacattcgaaggagctcattctctgtcctgggtgggacattttctaataaatctattccgttgaccacaacactcttcttttctttgatgggagccttagataccattttagaggacttcttatagccttctttcaaagacatcagcacgggatctcggttgatgcctcccagc

SEQ ID NO: 349372 - DNA, 1194 bp, Homo Sapiens
  misc_feature (365)..(393): n is a, c, g, or t
  misc_feature (946)..(1151): n is a, c, g, or t
cttagagtcaggcatctgctgcttcggtgggggcccaacgcgcatgctgggcgcccgggtgattgagatccaaagagaagggcactgtaagacaggccagatgaactggctcctcgtcatgggactggtacctcagatctgagcatggcccttgtttttggcacgtagcagagaaaggattgatttgaacttaaccttgcaaagcaagttgcctgttttagcagtagtttgttgtaggtttcagggatgacagatttggatgcactcatttaaaacgttttggtcacatatcagctcttgatgcctttcttttaaattaattatagacagagagaggcatttagctgatctcttacccctggtannnnnnnnnnnnnnnnnnnnnnnnnnnnnaaatcacaagtagattgccagcgtaatggagaggaaaccagattggatatggactcttttttatgcctattctggtgttgcgtttgtatatccaaatggacgttatcctctcagattcttatctggcactaatttataactattatattatcagagactatgtagcaatatatcagtgcacaggcgcatcccaggcctgtacagatgtatgtctacacgtaagtataaatgaatttgcataccaggttttacacttgcatctctaatagagattaaaaacaacaaattggcctcttcctaagtatattaatatcatttatccttacattttatgcctccccctaaattaatgactgagttggtggaaagcggctaggttttattcatactgttttttgttctcaacttcaaaagtaatctacctctgaaaaatttgtagtttaatatttgtttggtgaatttgtgccactttaatccttccactatcattcccattttgttacatttctgttatggggactttatgttgaaatattgtataaagcatttgtannnnnnnnnnnnnnnnnnnnnnnnnnnnnnnnnnnnnnnnnnnnnnnnnnnnnnnnnnnnnnnnnnnnnnnnnnnnnnnnnnnnnnnnnnnnnnnnnnnnnnnnnnnnnnnnnnnnnnnnnnnnnnnnnnnnnnnnnnnnnnnnnnnnnnnnnnnnnnnnnnnnnnnnnnnnnnnnnnnnnnnnnnnnnnnnnnnnnnnnnnnnnncgggcgcggacacgaatgccctttcccacaagtgcgcggctgt

SEQ ID NO: 349373 - DNA, 197 bp, Homo Sapiens
gagccgcaagctcagggtgagctggcacattaagatttcaaaacacaaaagggaaactcacacataagttagccaataaactcaagagataggaggaaaataagggagaaatctgagagcatctttgaaatcagtatgtttaagatctaagaggaaaagaaggaataacatatacacacaaaaaaacaatgaagaca

SEQ ID NO: 349374 - DNA, 2419 bp, Homo Sapiens
  misc_feature (1145)..(1145): n is a, c, g, or t
  misc_feature (1501)..(1501): n is a, c, g, or t
  misc_feature (1591)..(1591): n is a, c, g, or t
  misc_feature (2209)..(2209): n is a, c, g, or t
  misc_feature (2212)..(2365): n is a, c, g, or t
agcgtgggacaacatggcggccttcatgctgggctcgctgctgcggacgttcaagcaggtcaggcctctacttttatccacaccgctacccctcaccgctgaatctcataacccacgggtcccccacggctctgccacctgtagtgctcgatggttccttcatcagcttcaggccaagttcgaagtcactatgtagactggagaatgtggcgcgatgtgaagagacgaaaaatggcctatgaatacgcagatgagaggctacgtattaattcactcaggaagaataccattttgccaaaaattcttcaggatgtggctgatgaagaaattgctgccctcccccgggatagctgtcctgttagaatcagaaatcggtgtgttatgacgtcccgtccgcgtggtgtgaagcggcgctggaggcttagtcgtatagtcttccgtcacttagctgaccatgggcaactttctgggatccagcgagcgacatggtaaatgagctccagaacctattgagcttgcagggaagccaagcttgcagttccagcaagcaaagattttttttaatagaccaaaccctaatctctacaggggcccagtacagttgtttggcctacctgatgctatctctaaactacttttaaaatgaagacatttgggtgtttcatgtcagtgaattatcttttctcttggacttaacaaacatactgttcccatacatagtacaaagagtagcataataaatattttctgtgaatgttttttataccctccttttaagtttaatcttttagtaacatataggggtttttgtattaagagcattatttcataaaatgctatcttatacataatccaactaattgacatgtagctcatgtatggcagtttgtaatcctggactagctttgctgacctgcagagctccccttaactattattgttagataaacagattggatagcaaggctgctgttctggattatctaatgctccacttcttcttgtgatggctgaacaaaagaaccactaagtgttttcttgtccatccttaagggactttaaaacaaattatgcctctttaagtccttgaaagtctccatctaaagaggaaaagttttttggaacagtatatattccctattttncatggttatttaatccataacagaaatgagtaagggtagcacaaagttctcattcagtaactcaacagtgtgatcatcagcccagtgataaaaatatacatactgaatggaagtacctacttaacatcaggaaaatattcctggagaacttaataaatcaggaggtgaggggtgagatttttttctgcacacagagggaacaaaagcacaaagaagcaaaggcactctgtagcatcagagaaccacagtcacttcagtagatcagaaatatgaagcacaagacaaggcccgtattgtggaggatctcacaaatcatgtgaaggaattaagactgacataccaggtattacagagtnttaagcacaggaatgacatcatcagtttgtaatacaggtaagtgacagctgtgtggcagatggccatgagaggaaaaagctacaggcaanacaaccagttaggaggatgtcttagttgttgaggaagatgaaggcctgaactaacattgtggtattagtagaggagagaggacagatttttaaagttttaggaaagaaaattgggcaagacttacaagactgattatatctaagaggtaaagatggttctctgggttcctgataaaagtgtctagatagatggtagagggcaattccaagagggcaactccaagatagaaaatttggaaaaagaacaaatttaggggaaacagaagataagcgagttcaggttccagtcatgcggtgttggagatgcctgtgtcatctgatgaagactagtacgcagctggatagcagagtccgaaactcaggtggaggtgaagttatgagggaattatcacaatctagtttggattcatatttcttaaatatgtatgacaacttaccaactggaatgttctagctaatatctcaacttagaatccatctcactaccaatgggcaaacacttgtgttctaaagttacttgcaagtagtttatactgccaacttgatatatatacatgctatagtttgaacattttgtgtacttccaaaattcacattaaaatctaatccacaaaaaanaannnnnnnnnnnnnnnnnnnnnnnnnnnnnnnnnnnnnnnnnnnnnnnnnnnnnnnnnnnnnnnnnnnnnnnnnnnnnnnnnnnnnnnnnnnnnnnnnnnnnnnnnnnnnnnnnnnnnnnnnnnnnnnnnnnnnnnnnnnnnnnnnnnnnnnnnnccaaatggcaaattgtagcgttaataatttgtattcgccgtattttttgttccg

SEQ ID NO: 349375 - DNA, 854 bp, Homo Sapiens
agcggggtttgtagtttgtagcggacaacatggcggccttcatgctgggctcgctgctgcggacgttcaagcagatggttccttcatcagcttcaggccaagttcgaagtcactatgtagactggagaatgtggcgcgatgtgaagagacgaaaaatggcctatgaatacgcagatgagaggctacgtattaattcactcaggaagaataccattttgccaaaaattcttcaggatgtggctgatgaagaaattgctgccctcccccgggatagctgtcctgttagaatcagaaatcggtgtgttatgacgtcccgtccgcgtggtgtgaagcggcgctggaggcttagtcgtatagtcttccgtcacttagctgaccatgggcaactttctgggatccagcgagcgacatggtaaatgagctccagaacctattgagcttgcagggaagccaagcttgcagttccagcaagcaaagattttttttaatagaccaaaccctaatctctacaggggcccagtacagttgtttggcctacctgatgctatctctaaactacttttaaaatgaagacatttgggtgtttcatgtcagtgaattatcttttctcttggacttaacaaacatactgttcccatacatagtacaaagagtagcataataaatattttctgtgaatgttttttataccctccttttaagtttaatcttttagtaacatattaagggggtatagtaattaagagcatatatttcataaaatgctatcttatacataattccaactaattgacatgtagctcatgtatggcagtttgtaatcctggactagctttgctgacctgcagagttcc

SEQ ID NO: 349376 - DNA, 1135 bp, Homo Sapiens
  misc_feature (13)..(13): n is a, c, g, or t
  misc_feature (329)..(338): n is a, c, g, or t
  misc_feature (932)..(940): n is a, c, g, or t
ccaactggactgnaaaaccaggaattggggatgttaaacagttgcagtggaagtcatgaggttgcttgatacccagccttggttctgtgccaagcattactgcaggatctccagccagttcagcacgtttacctaggacagctggatctgggggctcatccagaaagagctttattggaagagagaaaggaaatattttggtcttttaagttgaatgatacagtaaaccacttgattcaataacactggttttaagtcattgagagttgtctccaaggaaccactttaaaatccaaatcagctttcagtctaaacataacttgattagnnnnnnnnnncagagggtcagtacaggatgaattaaaaacctaaaaatatggttcataaatgtaagctagataaattttgtttacattttttcaatatcttaggttcgatatacctttggaatatttaattatattttggatataaattggacttcatttagggtgagggcaaacttaagctgagaaaatggttaagaaatctgagtttatttaatttatatgtaaccttttatagtggtgggactgtttgggtacagagatgttttatatttatttgcagggtatatccgaatattttaaaaattaattgaataaccagtacttctaggatgataagtttgtcagcatgagcagaaatgagaagttcaggattacttacaattgacgacaacctggagtaggtgaatgaacatggattcagtggcacttttgcagatccgcttgggaggggctgcttgcatccgccttttcagtagagctgaatgcctgttgttttaatgatgatgactactgtaccctgtgtacctgttcccggagcgcctcctgaattaattactcctctgcacctttccccgtcatcttaagttacttgaggggcctcannnnnnnnnacctgatttaagtatctggtggcttttttaagggttgtggggcattgtttttaccccgtcctgtggggaaggtggtcctgctttgccgggcaaggaagtggtttgaagccgcgttgttcctaattaggggctctgcttgcttgagcttcccctgtacgtttcccgcaaagtgtgcagccccggcactattgaatt

SEQ ID NO: 349377 - DNA, 940 bp, Homo Sapiens
cacctagcacagtgtgtatattctattcatcagggagagttgggtgaggacgtggtgatggggccaatgctgcggtggccccttggatggtcctgggtgaattcagggactcggcattcagacccctgtccccacctcctggggcccagtcctcagctccgtacctgcttcactggttttctacagggacagggtggggaagagggggacataggtggggtaagaaacccccatgatccccatcttgtgaagatgagaagtccagggagggaatacacacagacggctgagtagttccaggggttggagaaaacaccatagaccctggtgtcccaccactggccgctggggtcagggagcaggaagacgtcttgcagcctgttagaagttcttgtaggtggcagcatcactgcataccagcatggctttcagaaaagtgttccacttggagactgacagtgaactttccccaccctggtcccccctgcacaactgggccacacgggacacattgagaggagcctcaggattcttgtcaggattgtcctctcggaagaagtagtagatcttgtcatcgtaagcctggtcttggtgcacgatggtggtttgatgaactgtgggttctgcatgacagtatcactggtgtacagctcactctcgccccggatgcggcggaaccgagggatcttcccattgtattcctgcttccggatggtggaatacacctcgtccccttcaaacagaaccagggagttctcgtccgggctgaagggggcatagcctctcatctcgccaagtggcaccacagtgccattcaccaggttccagcagctggggtgccgggcgttggtgccacaggccagcagcccctcactccgcctctccaggagagtgatgtagttctcgcagtcccgcttatccgacgacagggaaactctag

SEQ ID NO: 349378 - DNA, 183 bp, Homo Sapiens
accaccaaatcctctgcgtccctgaaggaggagtggggatcccaacactcctccctgtggaggaggcagttagggaaactaggatccagccaaggcccggggggagacccgcatgttgcttggtctgctcaagtcggagtcaggtttcagtgtcttttccctccctcagcccaaccctccaag

SEQ ID NO: 349379 - DNA, 863 bp, Homo Sapiens
  misc_feature (744)..(798): n is a, c, g, or t
gtgattagaggattccagacctaaccccacatatgtgtgtacacgcgcacgcctgtatgtgcgctgccctcagacatgcaagtgaaaggaggaggcttctgtgtaaatgcactttcttcctcccctctttctccataagaccccaggcagaggtgggtgcctcccctcccctctttgtcactttggtttcctataaatatgtatgtatcgtatgtgcatctttgctattgtaaataactttgaccttttttgttcctgttcctgaagtgctggaggcagttatggaaggagctgcttagggaagaggggtttcacttgtatctccttagttaacaacccagttccaggatcgagcctaaagcgggagccaggcctgagtgttcctgtccctgtgagtgggaaggtcttctggctccccatcccacctggctccagagcctgccctccacagcttgctgccaagctactccctccctccctggacttctcatcttcacaagatggggatcatgggggtttcttaccccacctatgtccccctcttccccaccctgtccctgtagaaaaccagtgaagcaggtacggagctgaggactgggccccaggaggtggggacaggggtctgaatgccgagtccctgaattcacccaggaccatccaaggggccaccgcagcattggccccatcaccacgtcctcacccaactctccctgatgaatagaatatacacactgtgctaggtgnnnnnnnnnnnnnnnnnnnnnnnnnnnnnnnnnnnnnnnnnnnnnnnnnnnnnnnggaaatgactgttctgctgttaagataatgtatactcttttattttcttcctttcatggttaaga

SEQ ID NO: 349380 - DNA, 437 bp, Homo Sapiens
  misc_feature (62)..(62): n is a, c, g, or t
aaccaccaaatcctctgcgtccctgaaggaggagtggggatcccaacactcctccctgtggnggagcacagttagggaaactaggatccagccaaggcccggggggagacccgcatgttgcttggtctgctcaagtcggagtcaggtttcagtgtcttttccctcccttagcccaaccctccaaggcctcatgtctcctaagcatgctgactgcatccgaaaggcccccactcaccatggtctgccctcaccccacatatgtgtgtacacgcgcacgcctgtatgtgcgctgccctcagacatgcaagtgaaaggaggaggcttctgtgtaaatgcactttcttcctcccctctttctccataagaccccaggcagaggtgggtgcctcccctcccctctttgtcactttggtttcctataaatatgtatgtatcgt

SEQ ID NO: 349381 - DNA, 1008 bp, Homo Sapiens
tcacgccatgtcacaaacaagaacagttgaaacttttctgtgaaacatgtgatagattgacatgtagagactgtcagctattggaacacaaagaacatagttggtgtaatacggggcccagtatgccgccaagaatgcagacagatagaccttgtggataattatttggtgaaagacacatctgaagctcctagcagttctgatgaaaaatcagaacaggtatgtactagttgtgaagacaatgcaagtgcagtgggctttggtgtagaatgtggagagtggctatgtaagacatgtatcgaagcacatcaaagagtaaaatttactaaagatcacttgatcaggaagaaagaagatgtctcagagtctgttggagcatctggtcaacgccctgttttctgccctgtacacaaacaagaacagttgaaacttttctgtgaaacatgtgatagattgacatgtagagactgtcagctattggaacacaaagaacataggtatcagtttttggaagaagcttttcaaaatcagaagggtgcaattgagaatctactggcgaaacttcttgagaagaagaattatgttcattttgcagctactcaggtgcagaataggataaaagaagtaaatgagactaacaaacgagtagaacaggaaattaaagtggccattttcacccttatcaatgaaattaataagaaaggaaaatctctcttacaacagctagagaatgttacaaaggaaagacagatgaagttactacagcagcagaatgacatcacaggcctttcccggcaggtgaagcatgttatgaactttcacaagttgggcaattgcaagtggcagcagcacagcactactatacagcaagcgactgattacttttcagttgcgtcataatttgaaagcaccggtgtgatcctgtccccgctgctaatgggaccatacgtttccattgggatcccacctttccggggcaaagaaatgtaatcaattttagggtaatca

SEQ ID NO: 349382 - DNA, 1326 bp, Homo Sapiens
  misc_feature (27)..(27): n is a, c, g, or t
  misc_feature (64)..(64): n is a, c, g, or t
  misc_feature (68)..(68): n is a, c, g, or t
  misc_feature (147)..(147): n is a, c, g, or t
  misc_feature (573)..(608): n is a, c, g, or t
  misc_feature (804)..(825): n is a, c, g, or t
cagaacttaagtatcagtgcaaatttntcaacctttctgggttagacaaagatccctttttgtntgtncttttcaccacccctttggctcaccttgtatcagcaaacaaagtacttcttcagggaaaccgtgaaatttctaatgccnttgaaaagcatattacaaaagtaatgctaccttttgggaaacaaactgccccgttaactccagatcattgcactggaatgtaatcaagaaagttagtcatgttttatgtaccatgttttcacacgtgtctcttctcttcgacttcctgaaagcgaaagctttacctcctgcaaatgtcagcacatgtagtaggacaccagtatcctaggacagagagccataagtagccctttggaggactgatggtgtcaaccaaaggcatgtgattgattaatgattcccccttagaaagcaagtgttaccaaagttgtgttatcttgaaagcattacaggtaagggcatgttatggttatttatcattgtttaatgaatagtagaggtgtcaagggactatgtatacatgattagggtaagatagaatgtatnnnnnnnnnnnnnnnnnnnnnnnnnnnnnnnnnnnngctgaatctttggtgtattgaaataggcagcactctgaaagacagaagcttcgtccagccactcttcagcacattcctttactaagcagtttaaagccgtcctagtggagcaagccctaaagcagatttaatttttgccattttccaagaatgacggtggtggcttttagtcagaaaatggccttctgtgctttcnnnnnnnnnnnnnnnnnnnnnnccacacacacacataaaaaacccaacgggtgcaaaataacaagtggaacctggagttacatttaatttaaactataacatggcatttggagaacagtgttaagaccaatttagtcaatcgtcatctgtcatggtacggtaaaataagcgggggtctatttcccacggtgttaattttctactcagttctaccaaataggatgtcatgttcgacattttggataagtgactggggggacatatacacgtgaaagcaccttaaaactgtactataagaaaaacattgcccccctagtggtactaactcatttgacctgtggcaggtgaatagggaagatagattatattaagtccaggacaaatacctctatataaggagacgtacctgaacaatgttaaacagggggaacacaagcagcaactaccacaatgaggctgagaaacaataatttatggcccaaaatgcaaacacccttggaaaaaaaggggggtgtcgcccacg

SEQ ID NO: 349383 - DNA, 826 bp, Homo Sapiens
  misc_feature (207)..(207): n is a, c, g, or t
  misc_feature (482)..(504): n is a, c, g, or t
  misc_feature (700)..(735): n is a, c, g, or t
aaactcctacctaactaaagaaatattaaacctaaatgttatcttcctggagaaccctttttcagaggttattttgggcataataaatttaccaggcaatttaagtagctagatttcccttctaattttaagaagtcctatatagagaatgactgaattataattaataagcaataaacatcccattcatataattatacatagggnaaatgttttcttatagtacagttctaaggtgctttcagtgaagaagaccccaaagtcactatcaaaaatgtcaaacatgacatcctatttggtagaactgagtagaaaattaaacagtggaaatagaccacagcttattttacagtaccaatgacagatgaacgattgactaaattgttcttaacatttctcaaaatgcatttatatttaaattaaatgtaactcaagttcaacttttattttgacctgttgggttttttatgtgtgtgtgtggnnnnnnnnnnnnnnnnnnnnnnngaaagcacagaaggccattttctgactaaaagccaccaccgtcattcttggaaaatggcaaaaattaaatctgctttagggcttgctccactaggacggctttaaactgcttagtaaaggaatgtgctgaagagtggctggacgaagcttctgtctttcagagtgctgcctatttcaatacaccaaagattcagcnnnnnnnnnnnnnnnnnnnnnnnnnnnnnnnnnnnnatacattctatcttaccctaatcatgtatacatagtcccttgacacctctactattcattaaacaatgataaataaccataacatgccctt

SEQ ID NO: 349384 - DNA, 800 bp, Homo Sapiens
atccgttttattgtcttgtaatatgaagttagagtgcctttttatatttgtatattctgaaaatgttctgtggaatgttttgtattttttcatttgagtgttatcagagcaatatgataccagtgagttttcatttcaacttttctttgaatgtataaagtgtcttttttcctatttccccttgtacttgcattgaaatgaatatgaaaatgcttaagttttctataggaattgtttgattttgcagtgctaaaatgctttcgtcttacgaaactataaaccataggtcagtattataggggaaaagcattttaagatagtgacaatctgagtgtttgtataaaatgtaattctatgcgtttcttatgtgatctaaaaattcaatgcaaatatcttttatttggtagttttgtctacatattttatgctctagcatgtgccaatatatctttgtaaagcacggatgatacgaaatctggtgccagtgttatattttgcataacatatttgtaacagcataaaatattgtttgatgatttcagtgggattttgtctataatgttttcttatgtaaattggagttgaatgactctggtaaatgtcatgactgtaaaaatggggaaaatgacttttagttcagtgaatgactttgaaacaatctgaatcttctcaagcacagtttaatacttttgcaactactgaatgctctaataacgtaatgaagtacttaactgtaatatactatggaaatgcattcagatggttatttttacaaataaaaacggtacaaatattgttgg

SEQ ID NO: 349385 - DNA, 1053 bp, Homo Sapiens
aagtgaccatccgctgcatcctgggacagccatcccactggaacgggcccctgcccgtgtgtaaagtagcagaagcggcagcagagacgtcgctggaaggggggaacatggccctggctatcttcatcccggtcctcatcatctccttactgctgggaggagcctacatttacatcacaagatgtcgctactattccaacctccgcctgcctctgatgtactcccacccctacagccagatcaccgtggaaaccgagtttgacaaccccatttacgagacaggggaaaccagagagtatgaggtttctatctaaagagagctacacttgagaaggggacttgtgaactcaaccacaatctcctcgagacattcatccagagaccatgtggcacttgattgaaaccccagaatgtcgactgtcttttgtttagactctttatcaaaggtttactgttttcttccctgtatttattatatttaaaagtgaaataggtgtgggtttggatgtttcgcggcctcagccaaattcatgttacagcctcaattctgaaggcaggtggaagacttgcaaaatggcaaaccgcggcagcaaaaacacaaaacagcagatggagtttctcccatcagcaatgccatgctaaggctgcattgaattgcatgcatctttgggaaccatgcccatgatgttttcagtacaaatctaagtcccaagattaggttggaaagggtatttcttgttggcttagtttgggttggaatttagcatgggtacttaaacccatttggagagctgtgctcctaaacaaattctgtgtcctctcttcccattttgccagcttctgaaaggtttttccacagcccctccctctcacggttcttctgaaggtagcaaaggtgttatataaacattgtcttttaccactctggcctcgctggacagtgacaaaacaagaaaacgttttctttctagaaaggtgataaacgaccaaaggcaatttttcagagacaaatgagagatttgagagttccaatgaagaattgggtgagggggt

SEQ ID NO: 349386 - DNA, 481 bp, Homo Sapiens
ccccatcccaatacacctgcaaccccggttttgtgcttgaagggagttctcttctgacctgctacagccgtgaaacagggactcccatctggacgtctcgcctgccccactgcgtttcggaggagtccctggcatgtgacaacccagggctgcctgaaaatggataccaaatcctgtacaagcgactctacctgccaagagagtccctcaccttcatgtgctacgaaggctttgaactcatggctcaagtgaccatccgctgcatcctgggacagccatcacactggaacgggcccctgcccgtgtgtaaagttaatcaagacagttcttgaacatgctttagaagtagcagaagcggcagcagagacgtcgctggaagggggtaacacgcccctggctatcttcatcccagtcctcatcatctccttactgctgggaggagcctacatctacatcagcagagtcgctactattccgtaga

SEQ ID NO: 349387 - DNA, 575 bp, Homo Sapiens
  misc_feature (561)..(561): n is a, c, g, or t
ctacttgaggaagaaagagtgaaatttggtagaagacttagagcaacgcgtgataaatttactgtaaatgttatagtatgtgtgctcccaatcagtgttaggtactgttttgtcatagtaatgataataaaagcccctatcgaaaagcagaaggcctcctagcagcccagccttccatcatgaacaagagaaagtgaatctgcttctacctactgggggcccaattcattaaacaggactcacaaacgcagtggggcaggcgagacgtccagatgggagtccctgtttcacggctgtagcaggtcagaagagaactcccttcaagcacaaaaccggggttgcaggtgtattggatggtggtccccaccagcagcacaggatccgaaattaagcgggtcgagtgatccacctctccggggtcggtgcagtacataattttctcacaaaatggggggtcgctgctccagctgaggtcccactggcaggtgagggtgtcactccccacgatgtcatagccggggtcacactggtaggtgattctggctccccgcaccaactccnccctgtggaaagta

SEQ ID NO: 349388 - DNA, 773 bp, Homo Sapiens
ctgcctcagccaagctgagcctctcaactggtgtggggaaatcctgtctttccaaaagtccaaggagcgcgggtcggaggagtcaaactctttgtaaataaccctttcaagactttcttttctgccgttaaatgtgcgtatttattttggtcatttttacgagaagcactttattccctctccctctcactgatcacaaatggaatcccctccctgggcagcgagacgcagttgctctgggaagatgccacagtgaccagggccatggccggtccctctggggagatgggacacggctcctggcagcacccaggagccccccaggctgcctgcctgcgtgcagaggcaggagaggaccgtggagcgtttccgggactgcattttagacggagtgaaatgtacatgaatttggcttttgctagagtctgtgtatggttttttaaggtcctttttccctttctgtttgtaaggtaaaagcttctgttcgtgtgcagggaaagcagctcacagacgccgttaaaaccagcttcatctttccttcaggatcatccttttgtacttgatgctggaagctcttggagaaaaagcttaaacatttcaccagaaatcttaattgagcagcagtcatatcgccacagctttgtgagtacacagctaacagatgcgtcgagacctgagatggctcgtttttattcctcctctcccagattggctccagcagaaaagtccctcgtgcacaggcagctcttgtgccggcactacttgaaaacatg

SEQ ID NO: 349389 - DNA, 458 bp, Homo Sapiens
cccaaaacaacagcagatgatatcttccaagtgtctgctcgggacacggcttcagccctctgtggtcccctctccccggggggctttgggattcttgtcaagctccttcaagagcctgcaagcacttaaccagccacccagagttccctcactgaagatctgagcatgacccgggacgaggcactgccggactctcattctgcacaggacttctatgagaattatgagcccaaagagatcctgggcaggggcgttagcagtgtggtcaggcgacgcatccacaagcccacgagccaggagtacgccgtgaaggtcatcgacgtcaccggtggaggcagcttcagcccggaggaggtgcgggagctgcgagaagccacgctgaaggaggtggacatcctgcgcaaggtctcagggcaccccaacatcatacagctgaaggacacttatgagaccaacac

SEQ ID NO: 349390 - DNA, 689 bp, Homo Sapiens
acgatgcctggtacaggtccggaattctcgggatatcgtcgacccacgcgtccgggcagcatcgacctcagtgaattccagtttgcccctactcagactaaggagctggaagagaaggtggcagagctgcacaaaacccacaggggcttatcgccagcacaagctgattcccagttcttagaaaatgcaaagaggctttccatgtatggtgttgacctacatcatgccaaggactcagaaggtgtggacatcaagctgggcgtgtgtgctaatggacttctcatttacaaagacagactgcgaatcaatcgttttgcttggccgaaaatcttaaaaatttcctataaacgcagtaacttctacattaaagtcagaccggcagagctggaacagtttgagagtaccattggattcaaactgccaaaccaccgggcagcgaaaagactatggaaagtgtgcgtggagcatcatactttctacaggcttgtttctccagagcagccaccaaaagccaagttcctgaccttggggtccaaatttcgctatagtggccgcacccaagcacagacccgccaggccagcaccctcatagataggccagcaccacactttgagcgcacttctagtaaacgggtctccaggagtctagatggagctccgattggtgtcatggaccaaagtcttatgaa

SEQ ID NO: 349391 - DNA, 2963 bp, Homo Sapiens
  misc_feature (3)..(3): n is a, c, g, or t
  misc_feature (5)..(5): n is a, c, g, or t
  misc_feature (7)..(7): n is a, c, g, or t
  misc_feature (9)..(9): n is a, c, g, or t
  misc_feature (32)..(32): n is a, c, g, or t
  misc_feature (53)..(53): n is a, c, g, or t
  misc_feature (58)..(58): n is a, c, g, or t
  misc_feature (63)..(63): n is a, c, g, or t
  misc_feature (70)..(70): n is a, c, g, or t
  misc_feature (72)..(74): n is a, c, g, or t
  misc_feature (80)..(80): n is a, c, g, or t
  misc_feature (82)..(82): n is a, c, g, or t
  misc_feature (108)..(109): n is a, c, g, or t
  misc_feature (124)..(124): n is a, c, g, or t
  misc_feature (135)..(135): n is a, c, g, or t
  misc_feature (139)..(139): n is a, c, g, or t
  misc_feature (2177)..(2193): n is a, c, g, or t
tcncnananacacactgctaccctgccctgangaccccgcctggactccccanccttnccacnccacacntnnntcccgncnttgctgcccttcttgacacactgtgnnctctctctctctcanttgtttggtcnctgngggtttgtttgtgttttcatcaatgtctttgtaaagcacaaattatctgccttaaaggggctctgggtcggggaatcctgagccttgggtcccctccctctcttcttccctccttccccgctccctgtgcagaagggctgacatcaaaccaaaaactagagggggcagggccagggcagggaggcttccagcctgtgttcccctcacttggaggaaccagcactctccatcctttcagaaagtctccaagccaagttcaggctcactgacctggctctgacgaggaccccaggccactctgagaagaccttggagtagggacaaggctgcagggcctctttcgggtttccttggacagtgccatggttccagtgctctggtgtcacccaggacacagccactcggggccccgctgccccagctgatccccactcattccacacctcttctcatcctcagtgatgtgaaggtgggaaggaaaggagcttggcattgggagcccttcaagaaggtaccagaaggaaccctccagtcctgctctctggccacacctgtgcaggcagctgagaggcagcgtgcagccctactgtcccttactggggcagcagagggcttcggaggcagaagtgaggcctggggtttggggggaaaggtcagctcagtgctgttccaccttttagggaggatactgaggggaccaggatgggagaatgaggagtaaaatgctcacggcaaagtcagcagcactggtaagccaagactgagaaatacaaggttgcttgtctgaccccaatctgcttgaaacctgactctgcttctctcatttgtcttcctaccctactcacataattcactcattgactcactcattcaccagatatttattgacctgctattataagctttacatcctcccatgttgtcctggcatgtgcagtatacacggtctaactcatctctccccagatctctcagaaccttgagcttgggaattgaactggggtcacctgtgtcctttcttatggactcgcaggattttagaaccctaatgcaccctggagggtagctgggccagacttctcatttcacaggtgaggagactggtgccccacagggattaagtgccttgcccaaggtcaggcttatctccagagggaggtgccctggactggggcccagatgttcagggaccctgcctacacctcatttccagtgtgggctgccttagttagttatgagaacagggaagggctgggaagagacagcctccaaggtcaacacttggagagggtttcacttgctctgaagaccctggtccaggattcgccctctcccatgccttcaagtcagcatcaggcttagggcaaagaccaggcctctgaagctgcctcttgtaattcatgcaggaagatgtcaaagtcagccccatcttggctgatcagggtgttcagccttaaccccacctgtgttctgaagtctcttaccctacctgctcaggactgagacagttattcactgaacatatttattaagcacttgctgtaggccaacagttaagaatccaataatgaaatggacagattcatggaacttagagtccaataggaaagtgagacccagacaatgacaatgagataaatgttaggaagggggaggtatggggtgacttccctgcagtcctgggggcctagatgggcccaagactgggtgagagtcttggcagagcctttgcaacaccttaagtggacaggactgggaggtcttggtggttggagccaacgtgggttccctgcggctccttagtcacctctgatagcagattgagggaggaaaacaggtaaggcatgaggaaatggccaggttgggttaacccactggtttcaaccagttcaggaatgaggttatttggccatgactggctgatcttgagctcaaggatctgcttcaaatgcacacaggcctagttgaagtttaaaccccagcaaaacattcctccctgtaaatggaaaatcctacttctacccccaccctgccctgnnnnnnnnnnnnnnnnnccccaagatcattagatgtcctcacccctcctcactgcctctcctctctgggacaggctgggacctttgaggaagataaagccttccttgactacccatcatattcagtgtccctgttcctcactcagagaggaaggcagaaccagtcaggcttatctcaggtaagttccacaggttctacaagactgcaggaattctccttaagggaggagagcaagcaggtgtggccccagcttctggaaatggcagaagagagggttttctcattgaatgggggtgggggctcgtgtgtcctgggaaaccccatcagtcccttcatttcttgagactcaactcctgggaggagagggtctcaagagttgtccctggaaggagggcgggggcagtctgcatctatttcaggttgtggctcttggttctaggactcttacttctctggctaagggctcagcttcttgggacttcaaccatcttctttctgaaagaccaaatctaatgtaaccagtaacgtgaggactgccaagtatggctttgtccctatgactcagaggagggtttgtcgggcaaattcaggtggatgaagtatgtgtgtgcgtgtgcatgggagtgtgcgtggactgggatatcatctctacagcctgcaaataaaccagacaaacttaccaacgtcttgattggtgtattttggggctggttctgggctcagcaaattgcgaactagctaatatagtaagagattaaatgagcatgtcctgtgccttttgtctgag

SEQ ID NO: 349392 - DNA, 993 bp, Homo Sapiens
  misc_feature (635)..(648): n is a, c, g, or t
  misc_feature (869)..(869): n is a, c, g, or t
  misc_feature (874)..(874): n is a, c, g, or t
  misc_feature (912)..(912): n is a, c, g, or t
  misc_feature (932)..(932): n is a, c, g, or t
  misc_feature (939)..(939): n is a, c, g, or t
  misc_feature (957)..(957): n is a, c, g, or t
  misc_feature (974)..(974): n is a, c, g, or t
agcggacacgcagctagccggagcccggaccaggcgcctgtgcctcctcctcgtccctcgccgcgtccgcgaagcctggagccggcgggagccccgcgctcgccatgtcgggcgagctcagcaacaggttccaaggagggaaggcgttcggcttgctcaaagcccggcaggagaggaggctggccgagatcaaccgggagtttctgtgtgaccagaagtacagtgatgaagagaaccttccagaaaagctcacagccttcaaagagaagtacatggagtttgacctgaacaatgaaggcgagattgacctgatgtctttaaagaggatgatggagaagcttggtgtccccaagacccacctggagatgaagaagatgatctcagaggtgacaggaggggtcagtgacactatatcctaccgagactttgtgaacatgatgctggggaaacggtcggctgtcctcaagttagtcatgatgtttgaaggaaaagccaacgagagcagccccaagccagttggcccccctccagagagagacattgctagcctgccctgaggaccccgcctggactccccagccttcccaccccatacctccctcccgatcttgctgcccttcttgacacactgtgannnnnnnnnnnnnnatttgtttggtcattgagggtttgtttgtgttttcatcaatgtctttgtaaagcacaaattatctgccttaaaggggctctgggtcgggggaatcctgagccttgggtcccctccctctcttcttccctccttccccgctccctgtggcagaagggctgaatatcaaacccaaaaactagagggtgcagggcagggcagggaggcttccagctgtgttccngtcanttggaggaaccagcactctccatcctttggagaaagtntccaagccaagttcaggctnagtgganctgggtcttgacgaggancccaggccagtttgagnagagttgggagtagggaga

SEQ ID NO: 349393 - DNA, 644 bp, Homo Sapiens
aatccttagggcccatgcccaaatctttccattgcttctcaggttagaatgaccttcacctccaacatgagcttggaggtgatgaggcagtggctctgtgccagctgccacaatgtgactttgatgtccacctgtaccacctctcactgggctctagcaccaccctcccctccccgcacaccaactgaacacagctctgagaagcaaagtgtgtggacccaaaactgccaagcctgagtctgtcccgtgcttctgctgctccatcctttgagttctgcattgccatcctgacgtcggccacaggaggcctgctttcttccagctgttgttctcaagttccctgcccctccacatcgcccgccagtggtgttgggttttcgttctgcttccaacctgagtaaagtgtgtgtgctgagttcatcccatgttctcccatggtcatggcttcccggccccatggggacccctctcccatcccagcagtgactggtgacagtgtgcaggtgcagtgctagctcttcgttccctctaaagggtgtgcactctttttattcctactcttgcaaaaacagatacgattatgatttcccatggaaattgaaaagtctatttaaataatttaactattaaacactttcactggt

SEQ ID NO: 349394 - DNA, 1539 bp, Homo Sapiens
cccctcgacactccagctggtagcccttggcagctagaacctggtacaggtccgtggtcacctggatgcggtcggggacccccgtgctgtccatacgactagagacattcactgtgttcccccagatgtcatactgtggcttccgagccccgatgacacctgccacgactgggcccatgttcagcccaatcttcatctggaaattgttgaaggagtgctcattgatgtgcttcatctgctccatgagccgcatggcgtagtcagccagggcagtgatgtgggagcggcccacctgatcgtaggtgctggcgttcagccctgaggcagccatgtaggtgctaccaatcgtcttgatcttttccagctgccggaaccgctcctcgctgataatctcatcaaagtcagcgatgatctcgttgagcagccgcaggcactcgacaccctcattgtttgcctccagctccacatagaactcagagaagttggcaatggaggcaaacataacagccacacactcacacgactgatagtagagctcatcattgcgccgctcccgggccaggaagtgagccgccacgtccttgggcaggatgttgtgcagcagccgccggttgtaggcctgcagctcctccatctcctctttctcctctgtggcctgcagtttccagaggaagtcgaggcgggcagtggactccacctgctgggcgtgcaggtacagggccagcacaaagactgagatgatgatgggcgtcaccaccttcaatgccaccttggttgcatgctcagggcactgggaggtcccgttgttgaagaagtctatggcgttggcggtgaccagcaggtcggcgttgtcgaagagcgtgacacctggcacctccacgatgagcacgtagatgagctcgatggccagcatgagcaccagcttcccgatgcagctgatctgcaggaacacggagcaggccagcaggctgagcagcacgctgtaggtgaagtactcggggaagttgcagttgggccaggggctgccacagaagccctgctcatcgcccaggctgtagttgacggccgactccgccacgtgacacgcgttgacctggctcgcgctgatgttgtgctcctgtgccaagcagcccagcaggtccctggagttgcacgtgaacatgttgacaaaagccgcccaggaacaccagggtgatggtgaacaccccaaccagggtgctgttcatcttggaccgcacgatcttcctggagagggtctgcagtggggaggggaagagctttacgcaggagtagatcacagacacaaacaccaccaaggtcagcagcagggaacaggtcaggtagaagctgagcatgaatatggagtggggcacgatggtgatctggacaaagcagatgaagaggaagacgagcgaggcacacgccacataggcaccaaatcggtcgtctacctgcttggagtacttcttctctaagtcaggctccctgaaggtcaggaggaacttgcggacgtgctcagaccgaagcctatcaatgctc

SEQ ID NO: 349395 - DNA, 227 bp, Homo Sapiens
tgtcaccagtcactgctgggatgggagaggggtccccatggggccgggaagccatgaccatgggagaacatgggatgaactcagcacacacactttactcaggttggaagcagaacgaaaacccaacaccactggcgggcgatgtggaggggcagggaaggaggaaggtgctggggccaggcctgcggggacaaggtgatcagcaaaaaacagcagggagggcagga

SEQ ID NO: 349396 - DNA, 1301 bp, Homo Sapiens
  misc_feature (49)..(99): n is a, c, g, or t
  misc_feature (1046)..(1046): n is a, c, g, or t
  misc_feature (1146)..(1155): n is a, c, g, or t
  misc_feature (1213)..(1221): n is a, c, g, or t
  misc_feature (1225)..(1225): n is a, c, g, or t
tcccattagcattacgcaaacccccgaccccgcccggaattcccgggannnnnnnnnnnnnnnnnnnnnnnnnnnnnnnnnnnnnnnnnnnnnnnnnnnctggggcgggtttctcaacagcagcactattaacaatttgggacagagaatcttgtggagtggtctgtcctgtgcattgtgggaggtttgccagcaacaccccactcaccccctcccaccaatccccatgtgacaaccgaaaatgtcccacgatttttaggtctcccttgggtctagaagctgcacttaggcattttcccacctgacacttgagttcatctctgctttggtccacataaggccactttaaaaaaatgttgcttctttaaagattctaaccatcttttaaacaaatccattttcttcctctatttctgcattcagttaatccttccaaaccctttgcttagtatatcttgaaatgtatcaattcctgttctacgtaattacacatatgtggacttgcatgatatctgctatggacccctactagagctctggattcctttaccacaggcaatgcggtcctcgactctggtcctgggatgatgtaaaccaattcattttacttttacttagtctgggatgatcgctccctccattttggaaagatgtaaaatgtgggaatatggccctgggcattaactaacctggtgttttactttcggttagacttccccctgaacgtttttcgttggcggtggcccttgcctgccacaagtccaacattaccctgggccaatggggaatgtgggttttccctttttggtctcaaaagtctacctcgcgccaaaactgtgagcaaaaatattggggaccaccacctttgatgtttggccttccacacttcgacttgaggccgcacccaacacaacgggggcatgtttgtgtgcgggattcacgcctacaaaggctttataactcttacgccctaaaatatagggccccttctggtcaaacggggcatataagcggcaacggcgccccaaccactctttcgctacttnttttcccgcaaagaagccctaccccccataatagtgcagcacagtgcttcttctttctgcccagacgggcggttttctccccccccgggagggtagaccnnnnnnnnnncaaatgtggggacaaaacattccctcccacgccgcccccacgggtgtgcccaaattannnnnnnnnctcngaagaacacccttttcggcggcggccaaaaataaacacaaaaaacaccccgcccctggggagccgtcccccggccg

SEQ ID NO: 349397 - DNA, 666 bp, Homo Sapiens
gggggcacaaggtaggctaggtacgggccgggtggtgaatcaggccgaggcatagatggggctggaactccttcgacctctcgtccctgtcaagtacagtgacaactggggaagccatcactgggacgggggacccggagcactacctcatcaatgtctgcaagtctctggccccgcaggctggcactgagccgtgccctccagaagcagccgcgtgtctgctgggtggctccaagcccgtgaacctcggcagggtaagggacggacctcagtggagagatggcataattgtcctgaaatacgttgatggcgacttatgtccagatgggattcggaaaaagtcaaccaccatccgattcacctgcagcgagagccaagtgaactccaggcccatgttcatcagcgccgtggaggactgtgagtacacctttgcctggcccacagccacagcctgtcccatgaagagcaacgagcatgatgactgccaggtcaccaacccaagcacaggacacctgtttgatctgagctccttaagtggcagggcaggattcacagctgcttacagcgagaaggggttggtttacatgagcatctgtggggagaatgaaaactgccctcctggcgtgggggcctgctttgggacagaccaggattagcgtgggcaag

SEQ ID NO: 349398 - DNA, 160 bp, Homo Sapiens
ttctagaggatcaccccgggtctagccaggaatggtcatcgttgggcgaatctggccaggaactgtggtgccagcttctgacacccgagtaggctggatggggcctagggttggggttgagggcactgtaggctgtggatgggagctagctagacccagg

SEQ ID NO: 349399 - DNA, 2418 bp, Homo Sapiens
  misc_feature (1896)..(1985): n is a, c, g, or t
  misc_feature (1990)..(1998): n is a, c, g, or t
  misc_feature (2005)..(2060): n is a, c, g, or t
gtagcgaggcctgggtggcgaattcggcacgaggcagactcggaggcggagcgggagacgccgcgggtcacggcagtggcggtgatggcggcggagcccgggcacatggacatgggcgccgaggccctgcccggccccgacgaggccgccgctgccgcagccttcgcagaggtgaccacagtgacagtggccaacgtgggggctgctgcagacaatgtcttcaccacgtctgtggcgaacgcggcatccatctcaggacatgttctgtctggtaggacggcccttcagatcggggacagcctgaacaccgaaaaagcgacactgattgtcgtccacacagatgggagcatcgtggagaccaccgggctgaaaggcccggcagctcccctcaccccaggtcctcagtctcctccaacccctctggctcccggccaagaaaaaggtggaactaaatacaactgggacccttctgtgtacgacagtgagctgcccgtacggtgccggaacatcagcggcactctgtacaagaacaggctcggctcaggcggccggggacggtgcatcaagcagggggagaactggtacagtcccaccgagtttgaggccatggcaggaagagccagcagtaaggactggaaaagaagcattcgctacgcgggccgacccttgcagtgcctcatccaggatgggatcttaaaccctcacgctgcctcttgcacctgtgctgcctgctgcgacgacatgaccttaagtggcccagtcaggctttttgtgccttacaaaaggcgcaagaaggagaatgaactgcccacaactcccgtgaagaaggactcccccaagaacatcacattgcttccagccaccgcggctaccaccttcaccgtgaccccctcgggacagatcacgacctcgggggcactgacctttgaccgagcgtccacggtagaggccactgctgtcatatcagagagtccggcccagggcgacgtcttcgcaggggccacagtccaagaggccagcgtgcagcccccatgcagggccagccaccctgagcctcactaccccggctatcaggacagctgccagatcgcaccgtttccagaagctgcgttgccaacgtcacatcccaaaatagtgttgacatccctgcctgcgctggcggtcccacccccgactcccaccaaagcggcacctcccgcgttggtcaatgggctggagctgtcagagccgcggagctggctgtacctagaagagatggtcaactccttgctcaacacagcgcagcagctgaagacgctgtttgagcaagccaagcatgccagcacctaccgagaagctgccacaaaccaggccaagatccacgctgacgcagagcggaaggagcagtcctgcgttaactgcggccgggaggctatgagcgagtgcaccggctgccacaaggtcaactactgctccaccttctgccaacgcaaggactggaaggatcaccagcacatatgcggccagtcagcagctgtcaccgtccaggcagacgaagtccacgtggctgaaagcgtgatggagaaggtgaccgtgtgaggctccatcggccgccctgggagctggggcccctcgcactcctgtgaggcttttgcaggtcgaaggcccccctgaggactctggggggacgttgagaagaggggtgtgggaaggtaaagaaacttgctggacaagtcattaacacactttaagcgaatggtgccctgggaagcgcactccccctgcccgggccccctgcccgctcgcggacagattttttatccctgggatcatgagcgtccggtcttgcccacagggcctgtgctgcgacgcacatacatacgtgttgtgtctgtcaataaagtgtaaataaggtcnnnnnnnnnnnnnnnnnnnnnnnnnnnnnnnnnnnnnnnnnnnnnnnnnnnnnnnnnnnnnnnnnnnnnnnnnnnnnnnnnnnnnnnnnncaacnnnnnnnnnaacacannnnnnnnnnnnnnnnnnnnnnnnnnnnnnnnnnnnnnnnnnnnnnnnnnnnnnnntacaaacaaaaactcccccgcggggggcgccccactcttgcgagccctctcttcttttttcacacaaccaagttccttccttcgaacgacgcccgtttcaataaaccgattccccgcgggcgtcccttttttcacccctccgcggggtctataaaaccaagctgcaccccaaggccgctccacttttgagaagaccccaccctcttcttgtgggcgggggcagccactatcgtcggcgacacgacatcccccatacgaaagaatatcacccccctcccgggaaaaacaagcagtcctctctctccccggggggctggttttaataaaaccaacgccgttccctcgcgctgccctttat

SEQ ID NO: 349400 - DNA, 711 bp, Homo Sapiens
agcggcgaggcggaggagccggtgctgagcagggacgaggactcggaggaggacgcagactcggaggcggagcgggagacgccgcgggtcacggcagtggcggtgatggcggcggagcccgggcacatggacatgggcgccgaggccctgcccggccccgacgaggccgccgctgccgcagccttcgcagaggtgaccacagtgacagtggccaacgtgggggctgctgcagacaatgtcttcaccacgtctgtggcgaacgcggcatccatctcaggacatgttctgtctggtaggacggcccttcagatcggggacagcctgaacaccgaaaaagcgacactgattgtcgtccacacagatgggagcatcgtggagaccaccgggctgaaaggcccggcagctcccctcaccccaggtcctcagtctcctccaacccctctggctcccggccaagaaaaaggtggaactaaatacaactgggacccttctgtgtacgacagtgagctgcccgtacggtgccggaacatcagcggcactctgtacaagaacaggctcggctcaggcggccggggacggtgcatcaagcagggggagaactggtacagtcccaccgagtttgaggccatggcaggaagagccagcagtaaggactggaaaagaagcattcgctacgcgggccgacccttgcagtgcctcatccaggatggg

SEQ ID NO: 349401 - DNA, 2625 bp, Homo Sapiens
  misc_feature (29)..(29): n is a, c, g, or t
  misc_feature (36)..(36): n is a, c, g, or t
  misc_feature (356)..(471): n is a, c, g, or t
  misc_feature (2147)..(2147): n is a, c, g, or t
  misc_feature (2189)..(2190): n is a, c, g, or t
cggtacatctcggcactctagctgcagcngggagangccttgccgccaccgctgtcgcccaagcctccactgccgctgccacctcagcgccggcctctgcatccccagctccagctccgctctgcgccgctgctgccatcgccgctgccacctccgcagcccgggcctccgccgccgccactcaagcatccgtgagtcattttctgcccatctctggtcgcgcggtctccctggtagagtttgtaggcttgcaagatggcagaagcagattttaaaatggtctcggaacctgtcgcccatggggttgccgaagaggagatggctagctcgactagtgattctggggaagaatctgnnnnnnnnnnnnnnnnnnnnnnnnnnnnnnnnnnnnnnnnnnnnnnnnnnnnnnnnnnnnnnnnnnnnnnnnnnnnnnnnnnnnnnnnnnnnnnnnnnnnnnnnnnnnnnnnnnnncgcttgtatagaaagaagagggtacctgagccttccagaagggcgcggcgggccccgttgggaacaaatttcgtggataggctgcctcaggcagttagaaatcgtgtgcaagcgcttagaaacattcaagatgaatgtgacaaggtagataccctgttcttaaaagcaattcatgatcttgaaagaaaatatgctgaactcaacaagcctctgtatgataggcggcttcaaatcatcaatgcagaatacgagcctacagaagaagaatgtgaatggaattcagaggatgaggagttcagcagtgatgaggaggtgcaggataacacccctagtgaaatgcctcccttagagggtgaggaagaagaaaaccctaaagaaaacccagaggtgaaagctgaagagaaggaagttcctaaagaaattcctgaggtgaaggatgaagaaaaggaagttcctaaagaaattcctgaggtaaaggctgaagaaaaagcagattctaaagactgtatggaggcaacccctgaagtaaaagaagatcctaaagaagtcccccaggtaaaggcagatgataaagaacagcctaaagcaacagaggctaaggcaagggctgcagtaagagagactcataaaagagttcctgaggaaaggcttcaggacagtgtagatcttaaaagagctaggaagggaaagcctaaaagagaagaccctaaaggcattcctgactattggctgattgttttaaagaatgttgacaagctcgggcctatgattcagaagtatgatgagcccattctgaagttcttgtcggatgttagcctgaagttctcaaaacctggccagcctgtaagttacacctttgaatttcattttctacccaacccatacttcagaaatgaggtgctggtgaagacatatataataaaggcaaaaccagatcacaatgatcccttcttttcttggggatgggaaattgaagattgcaaaggctgcaagatagactggagaagaggaaaagatgttactgtgacaactacccagagtcgcacaactgctactggagaaattgaaatccagccaagagtggttcctaatgcatcattcttcaacttctttagtcctcctgagattcctatgattgggaagctggaaccacgagaagatgctatcctggatgaggactttgaaattgggcagattttacatgataatgtcatcctgaaatcaatctattactatactggagaagtcaatggtacctactatcaatttggcaaacattatggaaacaagaaatacagaaaataagtcaatctgaaagatttttcaagaatcttaaaatctcaagaagtgaagcagattcatacagccttgaaaaaagtaaaaccctgacctgtaacctgaacactattattccttatagtcaagtttttgtggtttcttggtagtctatattttaaaaatagtcctaaaaagtgtctaagtgccagtttattctatctaggctgttgtagtataatattcttcaaaatatgtaagctgttgtcaattatctaaagcatgttagtttggtgctacacagtgttgatttttgtgatgtcctttggtcatgtttctgttagactgtagctgtgaaactgtcagaattgttaactgaaacaaatatttgcttgaaaaanaaagttcatgaagtaccaatgcaagtggggcacggttctccnncccccagcccataagactaagggtttaaatctgcttgcactagctgtgccttcattagtttgctatagaaatccagtacttatagtaaataaaacagtgtattttgaagtttgactgcttgaaaaagattagcatacatctaatgtgaaaagaccacatttgattcaactgagaccttgtgtatgtgacatatagtggcctataaatttaatcataatgatgttattgtttaccactgaggtgttaatataacatagtatttttgaaaaagtttcttcatcttatattgtgtaattgtaaactaaagataccgtgttttctttgtattgtgttctaccttccctttcactgaaaatgatcacttcatttgatactgtttttcatgttcttgtattgcaaccctaaacataaataaacattaaacgtgtggtacac

SEQ ID NO: 349402 - DNA, 919 bp, Homo Sapiens
  misc_feature (427)..(436): n is a, c, g, or t
  misc_feature (461)..(479): n is a, c, g, or t
aaggcgaattgtaccgccattcaattgcgcaaacttatggaaccaagaaatcagaaaattagtcaatctgaagatttttcaagaattttaaaatctcaaaaagtgaagcagattcatacagcccttaaaaaagtaaaaccttgacctgtaacctgaacactattattccttatagtcaagtttttgtggtttcttggtagtctatattttaaaaaaagtcctaaaaagtgtctaagtgccagtttattctatctaggctggtgtagtataatattcttcaaaatatgtaaactgttgtcaattatctaaagcatgttagtttggtgctacacagtgttgatttttgtgatgtcctttggtcatgtttctggttagactgtagctgtgaaactgtcaaaattgttaactgaaacaaatatttgcttgnnnnnnnnnngttcatgaagtaccaatgcaagtgnnnnnnnnnnnnnnnnnnnccagcccataagactaagggtttaaatctgcttgcactagctgtgccttcattagtttgctatagaaatccagtacttatagtaaataaaacagtgtattttgaagtttgactgcttgaaaaagattagcatacatctaatgtgaaaagaccacatttgattcaactgagaccttgtgtatgtgacatatagtggcctataaatttaatcataatgatgttattgtttaccactgaggtgttaatataacatagtatttttgaaaaagtttcttcatcttatattgtgtaattgtaaactaaagataccgtgttttctttgtattgtgttctaccttccctttcactgaaaatgatcacttcatttgatactgtttttcatgttcttgtattgcaacctaaaataaataaatattaaagtgtgttatactataaaaaaaa

SEQ ID NO: 349403 - DNA, 1029 bp, Homo Sapiens
  misc_feature (455)..(570): n is a, c, g, or t
  misc_feature (863)..(863): n is a, c, g, or t
  misc_feature (893)..(893): n is a, c, g, or t
  misc_feature (917)..(917): n is a, c, g, or t
  misc_feature (919)..(919): n is a, c, g, or t
  misc_feature (924)..(924): n is a, c, g, or t
  misc_feature (929)..(929): n is a, c, g, or t
  misc_feature (954)..(954): n is a, c, g, or t
  misc_feature (959)..(959): n is a, c, g, or t
  misc_feature (963)..(963): n is a, c, g, or t
  misc_feature (977)..(977): n is a, c, g, or t
  misc_feature (991)..(991): n is a, c, g, or t
  misc_feature (994)..(994): n is a, c, g, or t
  misc_feature (1005)..(1005): n is a, c, g, or t
  misc_feature (1017)..(1017): n is a, c, g, or t
  misc_feature (1020)..(1020): n is a, c, g, or t
  misc_feature (1025)..(1025): n is a, c, g, or t
ctgggaacgaaattaacgggaggtctgactgcaaggggagggggctcgcgatctaaaacgagaagagatctcggggtctcatactgcgccattcggctgcggtacatctcggcactctagctgcagccgggagaggccttgccgccaccgctgtcgcccaagcctccactgccgctgccacctcagcgccggcctctgcatccccagctccagctccgctctgcgccgctgctgccatcgccgctgccacctccgcagcccgggcctccgccgccgccactcaagcatccgtgagtcattttctgcccatctctggtcgcgcggtctccctggtagagtttgtaggcttgcaagatggcagaagcagattttaaaatggtctcggaacctgtcgcccatggggttgccgaagaggagatggctagctcgactagtgattctggggaagaatctgnnnnnnnnnnnnnnnnnnnnnnnnnnnnnnnnnnnnnnnnnnnnnnnnnnnnnnnnnnnnnnnnnnnnnnnnnnnnnnnnnnnnnnnnnnnnnnnnnnnnnnnnnnnnnnnnnnnncgcttgtatagaaagaagagggtacctgagccttccagaagggcgcggcgggccccgttgggaacaaatttcgtggataggctgcctcaggcagttagaaatcgtgtgcaagcgcttagaaacattcaagatgaatgtgacaaggtagataccctgttcttaaaagcaattcatgatcttgaaagaaaatatgctgaactcaacaagcctctgtatgataggcggtttcaaatcatcaatgcagaatacgagcctacagaagaagaatgtgaatggaattcagaggatgaggngttcagcagtgatgaggaggtgcaggatanacccctagtgaaatgcctccttananggtgnagaanaagaaaccctaaagaaacccagagngaaantganagaaggagttcctnaagaattctggggngangatgagaaagnagtcctaaaaantcngaggnagag

SEQ ID NO: 349404 - DNA, 1047 bp, Homo Sapiens
  misc_feature (364)..(479): n is a, c, g, or t
  misc_feature (543)..(543): n is a, c, g, or t
  misc_feature (990)..(990): n is a, c, g, or t
  misc_feature (995)..(995): n is a, c, g, or t
  misc_feature (1013)..(1013): n is a, c, g, or t
  misc_feature (1017)..(1017): n is a, c, g, or t
  misc_feature (1021)..(1021): n is a, c, g, or t
  misc_feature (1030)..(1030): n is a, c, g, or t
  misc_feature (1044)..(1044): n is a, c, g, or t
ttcggctgcggtacatctcggcactctagctgcagccgggagaggccttgccgccaccgctgtcgcccaagcctccactgccgctgccacctcagcgccggcctctgcatccccagctccagctccgctctgcgccgctgctgccatcgccgctgccacctccgcagcccgggaatccgccgccgccactcaagaatccgtgagtcattttctgcccatctctggtcgcgcggtctccctggtagagtttgtaggcttgcaagatggcagaagcagattttaaaatggtctcggaacctgtcgcccatggggttgccgaagaggagatggctagctcgactagtgattctggggaagaatctgnnnnnnnnnnnnnnnnnnnnnnnnnnnnnnnnnnnnnnnnnnnnnnnnnnnnnnnnnnnnnnnnnnnnnnnnnnnnnnnnnnnnnnnnnnnnnnnnnnnnnnnnnnnnnnnnnnnncgcttgtatagaaagaagagggtacctgagccttccagaagggcgcggcgggccccgttggganacaaatttcgtggataggctgcctcaggaagtaagaaatcgtgtgcaagcgcttagaaacattcaagatgaatgtgacaaggtagataccctgttcttaaaagcaattcatgatcttgaaagaaaatatgctgaactcaacaagcctctgtatgataggcggtttcaaatcatcaatgcagaatacgagcctacagaagaagaatgtgaatggaattcagaggatgaggagttcagcagtgatgaggaggtgcaggataacacccctagtgaaatgcctcccttagagggtgaggaagaagaaaaccctaaagaaaacccagaggtgaaagctgaagagaaggaagttcctaaagaaattcctgaggtgaaggatgaagaaaaggaagttcctaaagaaattcctgaggtaaaggctgtagaaaaagcagattctaaagactgtatnggggnacccctgaagtaaagaanatcntaanaagtccccnggtaaggggggtgntaa

SEQ ID NO: 349405 - DNA, 1280 bp, Homo Sapiens
  misc_feature (44)..(44): n is a, c, g, or t
  misc_feature (52)..(52): n is a, c, g, or t
  misc_feature (54)..(54): n is a, c, g, or t
  misc_feature (196)..(196): n is a, c, g, or t
  misc_feature (304)..(304): n is a, c, g, or t
  misc_feature (307)..(307): n is a, c, g, or t
  misc_feature (366)..(479): n is a, c, g, or t
  misc_feature (1070)..(1070): n is a, c, g, or t
  misc_feature (1120)..(1120): n is a, c, g, or t
  misc_feature (1134)..(1134): n is a, c, g, or t
  misc_feature (1146)..(1146): n is a, c, g, or t
  misc_feature (1166)..(1166): n is a, c, g, or t
  misc_feature (1216)..(1216): n is a, c, g, or t
  misc_feature (1223)..(1223): n is a, c, g, or t
  misc_feature (1238)..(1238): n is a, c, g, or t
ttcggctgcggtacatctcggcactctagctgcagccgggagangccttgcngncaccgctgtcgcccaagcctccactgccgctgccacctcgagcgccggcctctgcatccccagctccagctccgctctggcgccgctgctgccatcgccgctgccacctccgcagcccgggcctccgccgccgccactcaancatccgtgagtcattttctgcccatctctggtcgcgcggtctccctggtagagtttgtaggcttgcaagatggcagaagcagattttaaaatggtctcgtaacctgtngtncatggggttgccgaagaggagatggctagctcgactagtgattctggggaagaatctgnnnnnnnnnnnnnnnnnnnnnnnnnnnnnnnnnnnnnnnnnnnnnnnnnnnnnnnnnnnnnnnnnnnnnnnnnnnnnnnnnnnnnnnnnnnnnnnnnnnnnnnnnnnnnnnnnncgcttgtatagaaagaagagggtacctgagccttccagaagggcgcggcgggccccgttgggaacaaatttcgtggataggctgcctcaggcagttagaaatcgtgtgcaagcgcttagaaacattcaagatgaatgtgacaaggtagataccctgttcttaaaagcaattcatgatcttgaaagaaaatatgctgaactcaacaagcctctgtatgataggcggtttcaaatcatcaatgcagaatacgagcctacagaagaagaatgtgaatggaattcagaggatgaggagttcagcagtgatgaggaggtgcaggataacacccctagtgaaatgcctcccttagagggtgaggaagaagaaaaccctaaagaaaacccagaggtgaaagatgaagaaaaggaagttcctaaagaaattcctgaggtaaaggctgaagaaaaagcagattctaaagactgtatggaggcaacccctgaagtaaaagaagatcctaaagaagtcccttaggtaaaggcagatgataaagaacagcctaaagcaacagaggctaaggcaagggctgcagtaagagagactcataaaagngttcctgaggaaaggcttcaggacagtgtagatcttaaaagagctaggangggaaagcctaaangagaagaccctnaaaggcattcctgactattnggctgattgttttaaaggatgtttgacaagctcgggcctttggttccagnagtattnatggagccccttctngaagttgcttgttccggatgtttaggcctggaatttctccaa

SEQ ID NO: 349406 - DNA, 807 bp, Homo Sapiens
  misc_feature (429)..(544): n is a, c, g, or t
agcggaggggagggggctcgcgatctaaaacgagaagagatctcggggtctcatactgcgccattcggctgcggtacatctcggcactctagctgcagccgggagaggccttgccgccaccgctgtcgcccaagcctccactgccgctgccacctcagcgccggcctctgcatccccagctccagctccgctctgcgccgcttgctgccatcgccgctgccacctccgcagcccgggcctccgccgccgccactcaagcatccgtgagtcattttctgccatctctggtcgcgcggtctccctggtagagtatgtaggcttgcaagatggcagaagcagattttacaaatggtctcggaacctgtcgcccatggggttgccgaagaggagatggctagctcgacctagtgattctggggaagaatctgnnnnnnnnnnnnnnnnnnnnnnnnnnnnnnnnnnnnnnnnnnnnnnnnnnnnnnnnnnnnnnnnnnnnnnnnnnnnnnnnnnnnnnnnnnnnnnnnnnnnnnnnnnnnnnnnnnnncgcttgtatagaaagaagagggtacctgagccttccagaagggcgcggcgggccccgttgggaacaaatttcgtggataggctgctcaggcagttagaaatcgtgtgcaagcgcttagaaaacattcaagatgaatgtgacaaggtagataccctgtttcttaaaaagcaattcatgatcttgaaagacaatatgctgaatcaaaaggctctgtatgatagggggttcacatcattcatggggaatagaggctaagaagaaga

SEQ ID NO: 349407 - DNA, 417 bp, Homo Sapiens
  misc_feature (42)..(42): n is a, c, g, or t
gttaaaaccggcctggcacctagctgtgccctccataagttngccatagaaaccccaggacctatagtaaataaaacagtgtattttgaagtttgactgcttgaaaaagattagcatacatcctaatgtgaaaagaccacatttgattcactgagaccttgtgtatgtgacatatagtggcctataaatttaatcataatgatgttattgtttaccactgaggtgttaatataacatagtatttttgaaaaagtttcttcatcttatattgtgtaattgtaaactaaagataccgtgttttctttgtattgtgttctaccttccccttcactgaaaatgatcacttcatttgatactgtttttcatgttcttgtattgcaacctaaaataaataaatattaaagtgtgttatactat

SEQ ID NO: 349408 - DNA, 461 bp, Homo Sapiens
  misc_feature (21)..(21): n is a, c, g, or t
  misc_feature (27)..(27): n is a, c, g, or t
  misc_feature (66)..(66): n is a, c, g, or t
ccccagccccaaaagaccaangggttnaaaacccgccttggcacctagctgtgccctcataagttngccaatagaaaccccagtaccttaatagtaaataaaacagtgtattttgaaagtttgaccgccttgaaaaaagattagccatacatcctaatgtgaaaagacccacatttgattcaactgagaccttgtgtatgtgacatatagtggccctataaatttaatccataatgatgttattgtttacccactgaggtgttaatataacatagtatttttgaaaaagtttcttcatcttatattgtgtaattgtaaactaaagataccgtgttttctttgtattgtgttctaccttccccttcactgaaaatgatcacttcatttgatactgtttttcatgttcttgtattgcaacctaaaataaataaatattaaagtgtgttatactataaaaaaaa

SEQ ID NO: 349409 - DNA, 919 bp, Homo Sapiens
  misc_feature (28)..(28): n is a, c, g, or t
  misc_feature (199)..(251): n is a, c, g, or t
  misc_feature (781)..(781): n is a, c, g, or t
aggtcaaagaattagaagagcaactagnaaaatgaaacactccacaaagaaaacacaacctcaaacagcaactggagcttctagaggaagataaaaaggaattggaattgaaatatcagaattctgaagagaaagccagaaatttaaagcactctgttgatgaactccagaaacgagtgaaccagtctgagaattcagnnnnnnnnnnnnnnnnnnnnnnnnnnnnnnnnnnnnnnnnnnnnnnnnnnnnnatccgatccctcatgtccatgatccggaaacgatcccaccccagtggcagtggtgctaagaaagaaaaggcaactcaaccagaaacaactgaagaagtcacagatctaaagaggcaagcagttgaagagatgatggatagaattaaaaagggagttcatcttagacccgttaatcagacagccagaccgaagacaaagccagaatcttcgaaaggctgcgaaagtgcagtggatgaactaaaaggaatactggcctcccagtagcattggatgcaggaaaaaatacattgacggtgaaaaacaagccgaaccagttgtagttttagatcctgtttctacacatgaaccccaaaccaaagaccaggttgctgaaaaagatccaactcaacacaaggaggatgaaggcgaaattcaaccagaaaacaaagaagacagcattgaaaacgtgagagagacagacagctccaactgctgatccataaaccagaaacctgacatggttgggaaggccttttcaataagcacatganttagtggtgttatattggcaagggctggagacattctgctctggtcactggattcagaaaacaggttcttttctggtggcacttttgaaaggagcaactataaacataagtaagctgtttagcaaaacaacattctta

SEQ ID NO: 349410 - DNA, 1994 bp, Homo Sapiens
  misc_feature (1336)..(1336): n is a, c, g, or t
  misc_feature (1909)..(1909): n is a, c, g, or t
  misc_feature (1911)..(1911): n is a, c, g, or t
aacaaaaacagccttgaacaaaaaaactctggaggcagaattcaacagcccgtcccccccaacacctgagccaggtgaagggccccgtaaattggaaggatgcacaagttccaaggttacgtttcagcctcccagtagcattggatgcaggaaaaaatacattgacggtgaaaaacaagccgaaccagttgtagttttagatcctgtttctacacatgaaccccaaaccaaagaccaggttgctgaaaaagatccaactcaacacaaggaggatgaaggcgaaattcaaccagaaaacaaagaagacagcattgaaaacgtgagagagacagacagctccaactgctgatccataaaccagaagcctgacatgtttggaagtccttttcaataagcacatgattagtgttgttatattggcaagggctgtagacattctgctctggtcactgtattcagaatacaggttcttttctggtgtcacttttgtaagtagcaactataaacataagtaagctgtttagcaaaacacacattcctagtaggttttggttttttgatctttataaagatgaggtttttttcctagttactgtattaagtatgacttcttttagaaggttacaaaaaaattcagatgttgatacctttttaggaaatgtgcataccactcatcaaatggaatgctgaaagtttgaggtgcttgtatataatcggataaacaaaactgatcaacccaatgtgattttaaaagcccccaaagaagcttctgttttgggtctgatcctcttgatggagaaactgcagcagcatggaaattgttgggtactgtggcatacaagttattttctacagtagactgagataaactgaaaactcaggagctggcatcaaactcgtagtcccatagtcagtgttaattacacacattgttaactattggatgaaaaatacatgctattgattgtgtccaaagcctcccgaggacctccgtggggatgctctggtagcctgaatacagaactgaggtgaaagtccaaaccttgaattttacagtagtaagttggtaaaccatgtgctctgtgctatgagttaattatgttttcccaaatactaatgtggcacaagtaccatattttatcagagttcttatgtacagtatggtgaagataagtgacaagcacacatttttcttgcttcactgctgttctatattacacaggtttgttgttgttttttttaaaaaagaaattaagcagtagttagtctctaaaaatacaatgtttcaggctaccacagtgaataaatagaaatgtaatcagggattccccccccnccttatgcagcttttcaaagttgattgtttcaaaattggtgtttatttaaaataagtggtaatgtacttgaatgcactttttatgacaatgattcagtaatggtaattttactattaaagaaagtgaaaggtttagttttgttagcatggctcagcatgtagctgtcaggtgtttttcacctaagggcaaaagaaaatgatagtaataattgcagtagttgtattgtattgtatttttgcacgtgtggtaagcataggcttgaagaggtgggtaggcaggtacatgtacttcctaaatttggagataattatctttctgtaagttcgttatgcttgactgtttccatgttctcccaataatgattttatagttacttatcactttactcatggagaattaaaacgtaatgtttttcaactgtatctttctttaactggataatactgctatatgatatgcttactacagactgcattaattcacgaaacgaattctgttatgctgtaatttgaactctcctcaccacaacttattaaaaaggcaccaatagtttcccattaagggtcagttgngntattattaacgttctgtttagcccccaagttgcatctttaatatgaaaattgatatgatttgcaactttatttatttttaata

SEQ ID NO: 349411 - DNA, 666 bp, Homo Sapiens
  misc_feature (509)..(509): n is a, c, g, or t
  misc_feature (513)..(513): n is a, c, g, or t
  misc_feature (517)..(517): n is a, c, g, or t
  misc_feature (639)..(639): n is a, c, g, or t
aggcttcagaagtttccaaccatcttctaccatcacaaaagcaacccctcgcaactgaaaacgaaattcccttttttctgcactgaggaattcatatatgctccttaagacttttgctctagtttttaccatttcttcatccaacgtcgttatgttgcatatgtttctgcagttattgattaccttatcaaagaggaggacccaggttaacattaagcatatttaaaacttgctcaagctgttcttgtggaccaaggtcactaccttcttgttctttaatgcttaagggtgtagctttctctggaagaatagggcaggatgtccataacagctggagtacatcacattgcttgaattttggatttacctgtgctccattgaactttataagaggaagtgttccatttacctcttgatattgaggatgaaatctaatgaattccgcgggggcccgctcaggacataagaatggtattaaagatagttctttcagaaaatttccagataanaaanccantcgttcttggaatatatgatgcagaaggatatcaactgtattttgcaatgtttctttggaccagttttctgtattagccctcacactgatttccttagcaaactgtaacaactgctgctganaaagtatgtattttagtccaatatttc

SEQ ID NO: 349412 - DNA, 520 bp, Homo Sapiens
gccgactggggccaggctcaggggcagaggctgggacacaaggggctggcgagggctgcgaggccagggaagccctgagtttctggcggggctgagcagtgggggagcattgtgttgtgggtgtctgtgtgtgaggtcaccctcaaactgcaccgccggccagataccctcctgaccccgaggacttggtctggtctctctggtggctacaaccccagagttttaaggacttggaaaggaaagcacaatcagagaagaaaacagcccccgaaccagcaggagtggcctggcacatggaccggcctgagcgatgtgcactccacccaagccaggctcccagggggcctgatttctctctcactgtctctttttttaaaatggttgcacggctctgccccatggggggccttttttacacactgcgaggcccagctttctaggggacttttgcacatgtcatgcagctcagctgggagctgcttaggtggaaaactccaaataaagtgcggctgtcgcagaa

SEQ ID NO: 349413 - DNA, 1594 bp, Homo Sapiens
agcgggggcgggcgcgccgggagggcgcgaggtcaggtggctggggacgcgcgtggggatcgctacccggctcggccactgctgggcggacacctgggcgcgccgccgcgggaggagcccggactcgggccgaggctgcccaggcaatgcgttcactcggcgcaaacatggctgcggccctgcgcgccgcgggcgtcctgctccgcgatccgctggcatccagcagctggagggtctgtcagccatggaggtggaagtcaggtgcagctgcagcggccgtcaccacagaaacagcccagcatgcccagggtgcaaaacctcaagttcaaccgcagaagaggaagccgaaaactggaatattaatgctaaacatgggaggccctgaaactcttggagatgttcacgacttccttctgagactcttcttggaccgagacctcatgacacttcctattcagaataagctggcaccattcatcgccaaacgccgaacccccaagattcaagagcagtaccgcaggattggaggcggatcccccatcaagatatggacttccaagcagggagagggcatggtgaagctgctggatgaattgtcccccaacacagcccctcacaaatactatattggatttcggtacgtccatcctttaacagaagaagcaattgaagagatggagagagatggcctagaaagggctattgctttcacacagtatccacagtacagctgctccaccacaggcagcagcttaaatgccatttacagatactataatcaagtgggacggaagcccacgatgaagtggagcactattgacaggtggcccacacatcacctcctcatccagtgctttgcagatcatattctaaaggaactggaccattttccacttgagaagagaagcgaggtggtcattctgttttctgctcactcactgccgatgtctgtggtcaacagaggcgacccatatcctcaggaggtaagcgccactgtccaaaaagtcatggaaaggctggagtactgcaacccctaccgactggtgtggcaatccaaggttggtccgatgccctggttgggtcctcaaacagacgaatctatcaaagggctttgtgagagggggaggaagaatatcctcttggttccgatagcatttaccagtggaccatattgaaacgctgtatggagctggacatcgagtactctcaagttttagccaaggagtgtggagttgaaaacatcagaagagctgagtctcttaatggaaatccattgttctctaaggccctggccgacttggtgcattcacacatccagtcaaacgagctgtgttccaagcagctgaccctgagctgtccgctctgtgtcaatcctgtctgcagggagactaaatccttcttcaccagccagcagctgtgacccccgccggtggaccccgtggcgttaggcaaatgcccaacctccagatacctccgatgtggagagggtgttatttaaagatcaaggaaggaagtcatcctttcttgatatatataccagcctttggggtacaaattgtggtggtttcttgaaggatggggactcttgatggga

SEQ ID NO: 349414 - DNA, 1322 bp, Homo Sapiens
  misc_feature (163)..(163): n is a, c, g, or t
  misc_feature (355)..(378): n is a, c, g, or t
  misc_feature (778)..(800): n is a, c, g, or t
  misc_feature (1140)..(1206): n is a, c, g, or t
  misc_feature (1238)..(1249): n is a, c, g, or t
ccttaaatagagataaccagtaaacaattttcagaacttggaagtttaaaaacgtgcatataaaaatgggcattatatactttttattgaatgtggattgactgcagtctgctaagaaaaatggggtgtgggagctgaagaaaaaggaagttgtctttttttnttttaaggcttgcttgtgaaaggaacagttgtaaaaacaaaattgcttgaagcagggtcagcttagtgcttcacagtttgactgcttctctaagaggagcccttcctgcgcacgtgcattcaaaaatcacaaaaaagtacaaagacaaacacctaaaacacactgcgtcaagtgcagcaccgactttggtcnnnnnnnnnnnnnnnnnnnnnnnnttaataattgctaagcttttctacatgatataagcaggtattgcatattttcatatatctgggggaaaataaaggaagactccaaataaattgtaaaatgcagcaacatccaaaatactgatattctaagcatctacagatctcagaatagcactgccaccgaccgtacaggacaataaagactactcctatctgcggaacaactagctttctatttagttctagatgttgaaactgacgatggctgacataaaagtcacatttacaaaaagtgtctccaaatgcttgactagggaaaaacccctttcaatagaggagcatgtgcaacaattccacaaataatcgctatccagggcaaggcacattgatatggaatttttgttttcgtgcaaattaaggnnnnnnnnnnnnnnnnnnnnnnnttgtttcggggagaaagatgaggagcaaagtgtcttcccaagaatttcagttacttgattgtataggacagtagtagaacccttctgaagggctgaaaaacatagtttaaaggcaagtgcctagagtagggattacaatattgtgtcttaatgcactctactttatcctacattaactatataaaaattagttactaacactagaacatgcagagactttctctgatcagcagggcttgccaaccagaacgtatatatatgtatagtataggaaaccttcttgaagtcgcatgggaagcaaaggggtgcttcgctgtctggtagaaaaatcacttgcacnnnnnnnnnnnnnnnnnnnnnnnnnnnnnnnnnnnnnnnnnnnnnnnnnnnnnnnnnnnnnnnnnnncataagatacaggacgtttgggggtgcaaacnnnnnnnnnnnnccctaaccaagtaccccttgattctgaatgggcaccagcccatttgtgtcagatcccgaggaattccggaccg

SEQ ID NO: 349415 - DNA, 534 bp, Homo Sapiens
  misc_feature (276)..(293): n is a, c, g, or t
  misc_feature (372)..(372): n is a, c, g, or t
  misc_feature (465)..(465): n is a, c, g, or t
  misc_feature (518)..(518): n is a, c, g, or t
tatactatacatatatatacgtcctggttggcaagccctgctgatcagagaaagtctctgcatgtcctagtgttagtaactaatttttatatagttaatgtaggataaagtagagtgcattaagacacaatattgtaatccctactctaggcacttgcctttaaactatgtttttcagcccttcagaagggttctactactgtcctatacaatcaagtaactgaaattcttgggaagacactttgctcctcatctttctccccgaaacaatgttgnnnnnnnnnnnnnnnnnnccttaatttgcacggaaaacaaaaattccatatcaatgtgccttgcccgggagtaggcgattatttgtggagattgttngcacatgctcctctattgaaagggggtttttccctagtcaaggcatttgggaggacactttttggtaaaggtggacctttatggttcaggccntcgtcagttttccaacatctaggaactaaataggaaagctagttggtttccgncagatagggagtagtc

SEQ ID NO: 349416 - DNA, 1097 bp, Homo Sapiens
  misc_feature (245)..(245): n is a, c, g, or t
aaaggcccagcttgagtcttctgggatttggggcgtggtcccgttttcagagagtagtaggttaactcacaaggagcttgtttttcccagcttgctagtctctgatttgctgaaggcattgagtatcacgtcatcctttgagatagtcagaagtgatgtcgggagagaccacactggagcagaatcagagacaactcccatgtggaaccctttgtagcaccaactccggagcagatctactcctntaagcttgttgccatggtatttctgttcccattgggtggtgagaatgttgaaatatcgtggctgctcaaaaaagcggagatagcgagaggagatatgagaaggaaaaattcgttcaaactgaccacggcgagaaaactcatcttccatctcaaccagaatccgaacatcatctggtgtcaggacatccagcacagatgcatagaagtcctgatcaggaattttctgggtcagataataggctttcttcatcttctgtgcagtgacatgctctggagccattcgacatttgtccccaggggaggtgggcaggctggtggtggagctgctgcagctgctggggctggaaatgatatcctctgcattgggcaggacaaaacctgccagattcagaaggtcacgaatcatctggcctttgatgctgatatccagtggagagctggagtggaggcttggggaaatgttgacttccaggacccagggcttgaggttttcgtctagcatgatgtcaaaaccaaagagttcatggcagctatagggccgtcgcacatacatcttgagcaggctggtcacatagggctctgacgagatgatagttttgacaacaacatcctttatcttctcccagatggcgtcgctattgactcccttctggctcaggtagttccacaaagccttcagtgcccatttgtggccctggcaagccatttcatctgcattggcctggtactcggcattctttttattgacactgtagttggtcaggtgcatgaacttattgccaaggctcttcatggaaggcgaatacttgcaactggcaaagcggaccagtccatctgaaaagaggtaaatcc

SEQ ID NO: 349417 - DNA, 774 bp, Homo Sapiens
  misc_feature (754)..(754): n is a, c, g, or t
gggataaaggatgttgttgtcaaaactatcatctcgtcagagccctatgtgaccagcctgctcaagatgtatgtgcgacggccctatagctgccatgaactctttggttttgacatcatgctagacgaaaacctcaagccctgggtcctggaagtcaacatttccccaagcctccactccagctctccactggatatcagcatcaaaggccagatgattcgtgaccttctgaatctggcaggttttgtcctgcccaatgcagaggatatcatttccagccccagcagctgcagcagctccaccaccagcctgcccacctcccctggggacaaatgtcgaatggctccagagcatgtcactgcacagaagatgaagaaagcctattatctgacccagaaaattcctgatcaggacttctatgcatctgtgctggatgtcctgacaccagatgatgttcggattctggttgagatggaagatgagttttctcgccgtggagtagatctgctccggagttggtgctacaaagggttccacatgggagttgtctctgattctgctccagtgtggtctctcccgacatcacttctgactatctcaaaggatgacgtgatactcaatgccttcagcaaatcagagactagcaagctgggaaaacaaagctcctgtgaggttagcctactactctctgaagacgggaccacgcccaaatccaagaagactcaagctggcctttccccttatccccagaaanccagttcctccgaggacgag

SEQ ID NO: 349418 - DNA, 507 bp, Homo Sapiens
gtctgccactgtgggctttaatttttcagtcagaattatgtaagcttaaccaattgagatgtctgtggtgttggctcttgtttgtgcggttaatcgtcagtcttcttcaattaggatacaaacaagatattttcctcacaaattgatgtggatggtctgccactgtgggctttatgtttgacatcgtcttgtcccttcttcaaatgagttatccatttgtaaactgcttattttggggggcagggggcattgtccccataaactattcataaagcatcaatgatttcaccattcttccacccaagcttcaccataaacttgaggtttgttcttgcctcaattttaacagaattcatgttgttctgatacgggctcttttcaaactgacgtcttatcccttccttagtgcctgcaaactgtatccctgttccagatacattataacaagttaatataagtttatgttggtgaaaaaaattgaaatcccagcgagacacagtggctcat

SEQ ID NO: 349419 - DNA, 1050 bp, Homo Sapiens
  misc_feature (273)..(273): n is a, c, g, or t
taggatttttagaataagtaggttccaccatgggaaccatttaatattttgaccaattattttaatttagtggccttctagttctctttcctctcaagatcggtctcttagtgaatgacttttcggattcatggaaagcaaaatgttaagaaggttttgtgcaagtgcaaaatgtttaatctggggttcagtcaactagtctctgatactaacttgcttagttaagccaagatcaagaagtatgagaaagaacttgaaatatgataaagaatntgaaacagaatatgggataagtagtcaatatcagaaatgtgagacaataaaaacaagatatattccaaagcctaatcctaaatttaaatgcgacacttcattcaactccgaacctgaccttgaaacatggaagaagttactttacctaagcacactgcaccagtgtaaaaccaatgccaattgttagctgctttatactgcttaatgtgtatatgtacacatgtattcttaaaatggtgattcttaaattgaagttctgaattcttttgagaatctaacagaggtcatgaaaacttgcttcagaaacacacatatgtaaagtacttttaagtgttgatcatgtactataaatcacagcattgtggatgcaatgggattagacatgaagaaaaattttatatttgttaataaagactggttactaaccttaaggaatatacttagactctgaaagtaaaaggaaagtgcaatgaccatatttgttcattcatctgcctattttcaaatctaatgatgatttggttgatgcaaatatgtccctaatctaggctataaatgataaaaacaaaaatgtttaagttctaacttttgttagcagtatacatctaagaattttcaagtattacaaaatacttggaaggaaagactttaatataccactttcaaaatcatatgtacccaaaccagcaatgaagtggtgggatatataacgttaccttgggcaaaatttaagacaataaagacacatagcgacgtcgtggttgacgatatcccggg

SEQ ID NO: 349420 - DNA, 742 bp, Homo Sapiens
  misc_feature (729)..(729): n is a, c, g, or t
atttctttcattcagtggcaaaaaacattttataactcctaagtttttggttaatcttccaacttataccttggtgtgaactctctttttacaccattttcaacactggataaaactttaatgttgactttttgctaaagaactttaatttttccaagaatctagattaacataagatgttgatatttaaggaacttggaagagtaagtggtgaggctgtatgtatattttttaagagattaccttttaggaaattagtgaacaaacttaaccagtgttctgccttctttgactttgttactggaggatgataatctatttctattagattcgaagtattttggaaaatatttcaagtatatctgaactacttataattcttaaaacagaagtagtcagacaatatttgtatcctaagtgagatatggaaaattactctgtatactaaatgtcaggcaatgaaaatgtaagtttttgtgtagaaaacccattaagaagatgtgtttttctttctgaattagtttatttttccatcacataccaaaatataaaaatcagcctcacatttttcagcaagtttagcttatagccttgataaattcctctgtgcttctgagcagcatccttctgcctctgcttagcagctctgcatttgggtgggattgctgttgtgagtcattcatcccggcactggggccttttaaggctggaggattccaccccagtgtnctaaaagttgtcc

SEQ ID NO: 349421 - DNA, 414 bp, Homo Sapiens
  misc_feature (73)..(192): n is a, c, g, or t
atgagcatgagccactgtgcctggccaatacatacgtacatttaaatactagcaacctaatcagttattagcnnnnnnnnnnnnnnnnnnnnnnnnnnnnnnnnnnnnnnnnnnnnnnnnnnnnnnnnnnnnnnnnnnnnnnnnnnnnnnnnnnnnnnnnnnnnnnnnnnnnnnnnnnnnnnnnnnnnnnnnctgcctctacagttgtaactggttattactggaaagtttagacttctctgagtcccttgaggctatttgcttgaaaacaagcttctaagtatagacagtgatgaaccactgggggcagtgcttctttttccagaaagtacataagtagatataaaatttgtagcaaaaattcatagccctgtgttgtttcctaggatgatggcttggaacaaaagtccaatg

SEQ ID NO: 349422 - DNA, 1918 bp, Homo Sapiens
  misc_feature (611)..(623): n is a, c, g, or t
acatttacaacgtatcaataaacagtagtgatttaatagtcaataggctttaacatcactttctaaagagtagttcataaaaaaatcaacatactgataaaatgactttgtactccacaaaattatgactgaaaggtttattaaaatgattgtaatatatagaaagtatctgtgtttaagaagataattaaaggatgttatcataggctatatgtgttttacttattcagactgataatcatattagtgactatccccatgtaagagggcacttggcaattaaacatgctacacagcatggcatcacttttttttataactcattaaacacagtaaaattttaatcatttttgttttaaagttttctagcttgataagttatgtgctggccttggcctattggtgaaatggtataaaatatcatatgcagttttaaaactttttatatttttgcaataaagtacattttgactttgttggcataatgtcagtaacatacatattccagtggttttatggacaggcaatttagtcattatgataataaggaaaacagtgttttagatgagagatcattaatgcatttttccctcatcaagcatatatctgcnnnnnnnnnnnnngcaattctctgtattctatgtctttaaaaatttgatcttgacatttaatgtcacaaagttttgtttttttaaaaagtgatttaaacttaagatccgacattttttgtattctttaagattttacacctaaaaaatctctcctatcccaaaaataatgtgggatccttatcagcatgcccacagtttatttctttgttcttcactaggcctgcataatacagtcctatgtagacatctgttcccttgggtttccgttctttcttaggatggttgccaacccacaatctcattgatcagcagccaatatgggtttgtttggtttttttaattcttaaaaacatcctctagaggaatagaaacaaatttttatgagcataaccctatataaagacaaaatgaatttctgaccttaccatatataccattaggccttgccattgctttaatgtagactcatagttgaaattagtgcagaaagaactcagatgtactagattttcattgttcattgatatgctcagtatgctgccacataagatgaatttaattatattcaaccaaagcaatatactcttacatgatttctaggccccatgacccagtgtctagagacattaattctaaccagttgtttgcttttaaatgagtgatttcattttgggaaacaggtttcaaatgaatatatatacatgggtaaaattactctgtgctagtgtagtcttactagagaatgtttatggtcccacttgtatatgaaaatgtggttagaatgttaattggataatgtatatataagaagttaaagtatgtaaagtataacttcagccacatttttagaacactgtttaacatttttgcaaaaccttcttgtaggaaaagagagctctctacatgaagatgacttgttttatatttcagattttattttaaaagccatgtctgttaaacaagaaaaaacacaaaagaactccagattcctggttcatcattctgtattcttactcactttttcaagttatctattttgttgcataaactaattgttaactattcatggaacagcaaacgcctgtttaataaagaactttgaccaaggctataaatgccacgtacattattttcagtattgttggttatatttaaattttccttacaataaagcacacttttataataaatacatgaattattgtttttcatacttttttgcttgtttcttaaagttttctgacgtgcataatgcataattcattgaaagcatgatagcaatgtggcatgtggagcgacccccaggg

SEQ ID NO: 349423 - DNA, 460 bp, Homo Sapiens
  misc_feature (106)..(114): n is a, c, g, or t
ccctcaagctgacaagttgagtggtgcaccaatctctctaaaagaaactatattttagatactataggagtggtggaatgacaggagtggaggttgggcaaaatgnnnnnnnnntgttttgcaatgatgtatggtgtaatagtataggagagagtctaaataatttcttccatagtcattagaaattttaaatggacatttgtggctataagtttcactttctaatttatatagtgttagagaagcatattccaaaatccataggcacctgctcataattccttacacgtaagtaaaaggcatgaaacaaatgatccatctccattcttccttcccctttctattccctcgaagagtgtttaatcatacttaattgaaataccatgctactggcaaagccaggtctttctggcttcaagaccagggtcttttgagtcctatagctccgtccttcagtcat

SEQ ID NO: 349424 - DNA, 2819 bp, Homo Sapiens
  misc_feature (1935)..(1945): n is a, c, g, or t
gtcgaccgtggccgctggctggctggacaggcgggtgtgaggagttgcagacctaaccccacgtgcattttgggacaattgctttttaaaacgtttttatgccaaaaatccttcattgtgattttcagaaccacgtcagatataccaagtgactgtgtgtggggtttgacaactgtggaaaggcgagcagaaaactccggcggtctgaggccatggaggtggttgctgcatttgagagggagtagggggctagatgtggctcctagtgcaaaccggaaaccatggcaccttccagagccgtggtctcaaggagtcagagcagggctggccctcagtagctgcagggagctttgatgcaacttatttgtaagaaggatttttaaattttttatgggtagaattgtagtcaggaaaacagaaagggcttgaaatttaataagtgctgctggaaggggattttccaagcctggaagggtattcagcagctgtggtggggaaacatttctcctgaaagactgaacgtgtttcttcatgacagctgctcaaagcaggtttctgagatagctgaccgagctctggtaaatctctttgtcaaattacgaaaacttcagggtgaaatcctatgcttccatgtacattacatggcttaagattaaacaaaaacatttttcaagtctctaactagagtgaactctagagcacagtagttcagaaactatttagagcttccaggatatatttcacagcttcaggcatgtgatcagttagagccgatgaaacctatgcccgcctgtatatatattagcagcttagctagttcataacctgtatattctaaagactgctaaggttttgttttcattttaaatcctagctgattgttgtggtcaatgaaatacccagtttctggagggccaggtgggaaatgctttcactggaccaacacacaaatgatcatcctgaggatctgagcttccctagactccacacaataaccttggggcacccttttagagaagactgttgaaacccacagcactcgttggggtatgaggaaaccagggcttggcacaggaagttcccctttgtagctaaaagtccagaaagaaagggttcatctttttgacttccaactgatattgggaagtttggttgaggttcaagtgtgactccttccagagccacaggtaggggagtgtgaagttgagggggaggaaagctggaaggactctgccttgggagattcccagctctgctttccagcgcttggtggaatctgggctggggaaagacggcaccgggaaactctgcttccccattgtttccatctgatcagctgtggtgtgaggacttctcagacaaaggcaaggcctcgtgcccctgcccagcccattcatggagccctgggccttcttggcttccatagatcctaagctcttgactgtagtttagccagacttgttttgctatcttataagcagttcagaattagggaatgctggttttgaagagcaaaggacaggtagtctagagagggtcgtctggcctgcttgctgggtctttgtaacccagcacttcctcttgccctcctggctttatgtttatggggagaggactcaatagctccaccccttctggcaccagatggggcttggttagtttgcaataagcaccttgcagaggttaaagccagcgggtccctagtcttaggcccagcctgcttgtgtgggctctggcctggcctggtggctggcccagggggcagcagtgcttagagcttctgcagggcttctcttgtttacacagctgcatcagacaatgccatttctccccaccacggaaccttccatctaagatttcttccagggaatgccagcaatcaggcagcacccagctgtgggggcagtggggtgggggagacccacattgatgacnnnnnnnnnnncttttaatgaagaaacaccaaagaaagctgtggaaaggacctgccccacatgaaaaggataagccaagatggctgtaaacacagagcatttgagctgccactcttggagcacattgatttttcaaaagccagctctgtcaggaaaggaggtgctgttatgagcagctcttccagtgggcaaagaggacgcccataatttcttccattgctagctcatctgtgggaccaatttggtgtaagcaacctgtggcctgcacttgtggcctcgaaggaagcacaaaccctccatccacttcccatttcctctgcccttttccacctcccccttccatcccaccagctgccagtggctcccagaaagccttattgagccccttgttgacacttggggctgcggaggcctctccctactggtctggcctttcctgagaggcaggtcttccgtcctcagagcctttctggaacaaggagaatgcctgtgcaggtggacacacaggcctggcctgtcgctctcacttgtcttccagcggggagcttcacgttgccgagtggaagaaccatgacctccacttgcttccaaggtgctagggaagtttcagggtacgctggttcccctctccagctggaggccgagtttctggggactgcagatttttctactctgtgatcgattcaatgcccgatgcttctgtttcattcccgaccctttctactatgcattttccttttatcaggtgtataaagttaaatactgtgtatttatcactaaaaagtacatgaacttaagagacaactaagcctttcgtgtttttccacaggtgtttaagcttctctgtacagttgaaataaacagacagcaaaatggtaaaaaaaa

SEQ ID NO: 349425 - DNA, 423 bp, Homo Sapiens
  misc_feature (21)..(21): n is a, c, g, or t
  misc_feature (46)..(46): n is a, c, g, or t
ccctttctggaaacaaggagnaagccctgtgcaggtggaacaccanagccccggccctgtcgcctcctcaacttgtccttcccagcggggagcttcacgttgcccgagtggaagaacccatgaccctcccacttgccttcccaaggtgcctagggaagtttccagggtacgctggttcccctctccagctggaggccgagtttctggggactgcagatttttctactctgtgatcgattcaatgcccgatgcttctgtttcattcccgaccctttctactatgcattttccttttatcaggtgtataaagttaaatactgtgtatttatcactaaaaagtacatgaacttaagagacaactaagcctttcgtgtttttccacaggtgtttaagcttctctgtacagttgaaataaacagacag

SEQ ID NO: 349426 - DNA, 1619 bp, Homo Sapiens
cgaacattaagaattacggcagtcggccaaacgcaccctattgctggatggcatgggaaccctccttgggagccttctatgggccagccagcttcatcacttttgtaaactgcatgtactttctgagcatatttattcagttgaaaagacaccctgagcgcaaatatgagcttaaggagcccacggaggagcaacagagattggcagccaatgaaaatggcgaaataaatcatcaggattcaatgtctttgtctctgatttctacatcagccttggaaaatgagcacacttttcattctcagctcttgggggccagccttactttgctcttatatgttgcactgtggatgtttggggctttggctgtttctttgtattaccctttggacttggtttttagcttcgtttttggagccacaagtttaagcttcagtgcgttcttcgtggtccaccattgtgttaatagggaggatgttagacttgcgtggatcatgacttgctgcccaggacggagctcgtattcagtgcaagtcaacgtccagccccccaactctaatgggacgaatggagaggcacccaaatgccccaatagcagtgcggagtcttcatgcacaaacaaaagtgcttcaagcttcaaaaattcctcccagggctgcaaattaacaaacttgcaggcggctgcagctcagtgccatgccaattctttacctttgaactccacccctcagcttgataatagtctgacagaacattcaatggacaatgatattaaaaatgcacgtggcgccttttagaagtcagtttcgaacaaatgtgcactcaagccgccaccataaaaaacagaagtaaaggacaaccgggcaagccgactcacagtcctgagagaatatgcctacgatgtcccaacgagcgtggaaggaagcgtgcagaacggcttacctaaaagccgggctgggcaataacgaaggacactcgaggagccggaagagcttatttagcctacagagagagacagtacaaccccccccagcaagacagcagcgatgcttgtagcacacttcccaaaagtagcagaaattttgaaaagccagtttcaaccactagtaaaaaagatgcgttaaggaagccagctgtggttgaacttgaaaatcagcaaaaatcttatggcctcaacttggccattcagaatggaccaattaaaagcaatgggcaggagggacccttgctcggtaccgatagcactggcaatgttaggactggattatggaaacacgaaactactgtgtaacattgctgggcttcctaggcagaaattcatataaactgtgatactcacattccttgaagctatgagcatttaaaaactgtttacagccaccatagggattcaaaagaatttggaataaactttgaagttttggattttacttatttttatccccaaattgttgctattttttaggatctgaaacaaaatctttctaaaacattgttttagttgtcaaagcaccaacaggacattttgggatgtgaaatgtaatttcttggaatctgtaatttgtacttaatatttcaggcttgtatttaatataataaataggtgtttgttattgtgtcga

SEQ ID NO: 349427 - DNA, 345 bp, Homo Sapiens
  misc_feature (63)..(63): n is a, c, g, or t
tgtggtacattggctggcttcctagccagaaattcaaatataaactgtgaaactcacccatcncctgaagctatgagcatttaaaaactggttttacagcccaccataaggattcaaaagaatttggaataaacttttgaagttttggattttacttatttttatccccaaattgttgctattttttaggatctgaaacaaaatctttctaaaacattgttttagttgtcaaagcaccaacaggacattttgggatgtgaaatgtaatttcttggaatctgtaatttgtacttaatatttcaggcttgtatttaatataataaataggtgtttgttattgtgtcg

SEQ ID NO: 349428 - DNA, 1719 bp, Homo Sapiens
agtcattcaacttatgcttctacacttcccaggtccctgtcccaccaattttgggtttttatcaaatgaaggaggaagaagtacaactaagaataaccattaatttaaaacttcatgaaagtgtgaaaaataattttgaattctgtgaagcccatatacctttttacaatagaggtccaattacacatttggaatacaaaactagttttggccagcttgaagtatttcgagagaaaagcttattgatctggattattggccagaagttcccaaaatcaatggaaattagtctttctggaactgtaacttttggagccaagagccatgagaagcagccatttgacccaatttgtactggagaaacagcatatttaaagcttcattttaggatcttagattacacacttactggatgttatgcagatcagcattcagttcaagtttttgcatcaggaaaaccaaaaataagtgcacaccggaaactaatttcttctgattattacatctggaattctaaagcccctgctccagtaacatatggatcattattattgtaatagtctcatgtttaaatgggattatataatgataacagtttaaagaaaatcataatcttatatttttaatgtggatgcatataacctgtgagtgaaaaatcactgaatgatttaattgtaaaagtagtcttatgtggtgtttgtagtctgatagagcttgaaaggacattttaaaagctaatgtctccaattttgttaaccttcgattttatgccagtataattcagaacatagaaaagtaatgattcacttgggctcattttagactggtcctgggtcaccctgccacacttgtttcctagtgtttctgtggcagacattgctaatcaattacagcccttttctgtactgagccttggataaagggtcaggctcctttttagttcagagattcaggcagccactcccagtgggttgtagataatgtgcaagataaaaactattttctcttccaaatctaagtactaagctcctagtataaggtgttgttacagaataccagagaccatgttagagacaactacatctcttcaaaaaacagccaacagagacaaaggaaaagtgtttaaatagtaagctgttcttcttaatcagaactatcctattgactaataaataatctgcataattctacttaaggtgtgtaatctctgttctagagttagtttttaagtaagcttgttaatctgccactttgacattttgcttaggatgtcagtagccatattaagatgtgtagaataccttcagaagatgatcatagtgttttgtaatcatttaatgtctgcagccaaatttttaaaggtaatttagacctaatactgctcttgctgtgtcttattaagttaaaattaatgaatgaaatccgggtaaaaattccaaaaggcactctgtgagtagagagtatcatttaagccttattttagtcacatgtagtatatatctcccttaaagctgtcactctcactttccttacccattactcttgatttccttcagaaaccatctagtcatcatctttatactctacctgcttctgcaattatatatcatattatgttttcagagcagttcattgtcaagttggactttaagtgaccattcaagaaaagatgaaatctcacgaacctcaaaacttcattcatgtctttttacaaatgag

SEQ ID NO: 349429 - DNA, 1731 bp, Homo Sapiens
  misc_feature (744)..(754): n is a, c, g, or t
  misc_feature (1163)..(1191): n is a, c, g, or t
  misc_feature (1348)..(1369): n is a, c, g, or t
  misc_feature (1447)..(1466): n is a, c, g, or t
  misc_feature (1639)..(1659): n is a, c, g, or t
cgctccggacgtctcgggattgtctcacgaccccgacgaggggtgtgggttctcgcccaaaattttttgacgtgaaggcatcatgcgcttatctttgtgaagacgggggaagaggatcctgtgtaagatgtttaggtgactagatgaagaagggtccgtatttaaggtgggagaatacccaacataaattggttcatcattttcgcgcagttagggcggagcgctttggttaacaaacactcgttggcggtggcgacaacagaggcgccgcgcaacaaaggccatggcccactcaatagggtccttaatggggaaattggccaccacccaaggtattactctctttctcacgggggctacgggatacgaaggcgacaaatccgaaagaaaggggggcgcaattgtctctacgtgggggtgggacccgggcaaggtgaaaaattgaaaaaaccggaaacaaccccaccagtccaattaatagtggtaggggagaggtttaaacttcatttttaccagtttttttctaaggtactatatgcccatacgagagaaattctgtagaaagctattcttcgctacaaatgttgatagtttatttaagagtaggtggcttttcaagggggtttactttttttcttcctcatgcaaacaatctattactgatgtaactaacttgacgtacgagcacctctgtaaataagaaaaacacacacattctcacactacttatatttggttgcaagnnnnnnnnnnntccaagtcaaattgccttcaacaaaaaaggaatttattggctcacataagtgaaagctgagaaatagatctcaattcaggtccaatttgatccagaagttcccaagggctccaatagactccctctcaccctggtactgcctcaggctggttcctttatattagaaaaacgagctgcagcaagttcagaatgtgactcctcccagcacactatctccaacaagatgtcttcaattgctcctgaaaaagcctaggcaaacatctttatctcagtagtctggtctgggtcaggtgcctacccctgaaccattgctactggggaagtggggcactgctaaaaggtaactgggttaatctagaaagccgagggtgtgacaatgccacccaaaccacatgcacaattgtttgcnnnnnnnnnnnnnnnnnnnnnnnnnnnnnagaaggaagtaggtgctggatcgggcagccacagcacacacaaacaagaaattaaagtcagtcacaaacatatccaataaaatattaaaagtactcaagctcactagtaatcaaagaaacacaaaaaaaactacgtaatttgttgcttctccggttnnnnnnnnnnnnnnnnnnnnnngcaagaaataacctgcatgagaaacggtaaaggggacaagactgagaacaggcatgaacacacgactattcaaaatannnnnnnnnnnnnnnnnnnncttacattcattgaacagctttaactaaggggcacttaagcaaactttataccacaatcagaaacatgactgattcccaagtatgaaacaataagctagcaacaaaacagtaaaatgtaaagccccatcacagtagtcctccagcatgatagatgttcccaactgaggagagnnnnnnnnnnnnnnnnnnnnngacctgggtgattctatattccttagcccctagtcttgacttagctagcctgtctatgtctatttattctcg

SEQ ID NO: 349430 - DNA, 499 bp, Homo Sapiens
gatatgggcaagcttggcactactggcatctgctgtagtcctgggtagcacaggctgtatgaatgctgctgactgatgaatgagcaagctgtctttggtgttgttctttctgttgtacagtgtgcctgacgaggaggccaagacaaccaccacaaacactcaagtggaaggggatgatgaggccgcattcctggagcgcctggctcgccgtgaagaaaaaccgccaaaaacgccttaaggaggctctggagcggcagaaggaggtcgacccaacaataacagatgcaagtctgtcgctcccaagcagaagaatgcaaaatgacacagcagaaaatgaaactaccgagaaggaagaaaaaagtgaaagtcgccaagaaagatacgagatagaggaaacagaaacagtcaccaagtcctaccagaagaatgattggagggatgctgaagaaaacagaagaagacaagataaaggaggaggaggaagaggagaacttcaccc

SEQ ID NO: 349431 - DNA, 819 bp, Homo Sapiens
  misc_feature (693)..(732): n is a, c, g, or t
acctctccaccgtagatccgagtgcccccccgagcccggaatttcaagaatgccctcccttgcattgtattccgggtgccttccttgaagaattgaaagcagaaagatttgggagctgagagttaagctgaacaaaaggtatcattggaacatttcaagatcatcaaatcaaattccacagggattggtgaccaaccagaaggctcagacatctgattgctgacctgtccagacatcatctggtctccctgaacctgaaatcacaccatggatgattttgagcgtcgcagagaacttagaaggcaaaagagggaggagatgcgactcgaagcagaaagaatcgcctaccagaggaatgacgatgatgaagaggaggcaacccgggaacggcgccgccgagcccgacaggaacggctgcggcagaaccaagaggaaaaatccttgggacaggtgaccgaccaggtggaggtgaatgcccagaacagtgtgcctgacgaggaggccaagacaaccaccacaaacactcaagtggaaggggatgatgaggccgcattcctggagcgcctggctcggcgtgaggaaagacgccaaaaacgccttcaggaggctctggagcggcagaaggagttcgacccaacaataacagatgcaagtctgtcgctcccaagcagaagaatgcaaaatgacacagcnnnnnnnnnnnnnnnnnnnnnnnnnnnnnnnnnnnnnnnngtcgccccagaaggataccagatagaaggaaacaggaaacagtcacccaaagtcctacccagaagaattgatttgggagggatgctt

SEQ ID NO: 349432 - DNA, 494 bp, Homo Sapiens
ggactttaatatagcaacagacaaaattattgttaacatggatgttacagcccaaaagatttataaaagattttaacctattttctcccttattatccactgctaatgtggatgtatgttcaaacaccttttagtattgatagcttacatatggccaaaggaatacagtttatagcaaaacatgggtatgctgtagctaactttataaaagtgtaatataacaatgtaaaaaattatatatctgggaggattttttggttgcctaaagtggctatagttactgattttttattatgtaagcaaaaccaataaaaatttaagtttttttaacaactaccttatttttcactgtacagacactaattcattaaatactaattgattgtttaaaagaaatataaatgtgacaagtggacattatttatgttaaatatacaattatcaagcaagtatgaagttattcaattaaaatgccacatttctggtctctggaa

SEQ ID NO: 349433 - DNA, 1347 bp, Homo Sapiens
  misc_feature (33)..(33): n is a, c, g, or t
  misc_feature (91)..(91): n is a, c, g, or t
tagaaaaaactcctcccaaagaacagggattanaggggaaataaccctctctttcctcctacataattcaagaatttccatatacccttcncttctgttaaagtaagtcacatctttaaaatcaattctagcgcctttcttgttcatttttatcctcagagcaggagttgttgggggcaccctttcgagttctcaaggtaagctgagcttgctcctttcttggagggatgaggatcacagagttttgcattaatcttataaagctcgagggctttaatagctgctgcattattatccatacgaagaaaagttggacaggaagcacaaaactcattcgtgcaggcttcatttccacagcccctcagttaactggtggtagtagcgttctattagaagctttgcagctgctcgcttcattcggctagcttcaatgtcgtcagactgaggttctcctgatctggtctccaccagccttgtgggtaagtaccccaagattgcttccaaacttgtatctcccagacagaagagctaaaaattgatgataaccccatgtaccagctgactcatttgtgaaagtgcgaccctccagcatcagatgtcatactgtaaggaggcagagctggcttgcaaaacaaaaaataaacctgctggcacttttacaagctgtggccattcggtgacatcagggtgatcacagctttgagtcactgattaaaaacaggttgtcacaccagtctagctgctaccttgatctgagcgtaggcttaataactcatatttcgccaaacttctgaggagctggtgaattctaaaatcaggctcttacagatttttaacctgtcgtcgcccccgcgcctgggctgcggcggccgcctcactggtcgtagtcgccctcgcccgccgcctccgcccgccaccgcctcgttctctttcgctgccgccaccgccggggctcatgcgggacccgcgcttccttatccggaaaacgaggccgggaaagggagcgccggggccgccgaaatcccggcgttcgtcgccagccgccgctgcctgtccacaccggggggctgaggggccctcctgccaggggctacaggccgcgagctattccgaggaggagccgaaggaggcgccgccgcccgcagccgagcgcgccgggtcggcagaggtgaagcgtaagtaggcggcggatggcgggcgcccgcgctggcggatggctacgcggcggaggggtgcgcgagcgagcgaagcctggtgtgtcgggtcctggcgaagggaaaaggccccgtcgtctcctgtagtcaccccgagcccagcgccaccatcttgggagacaacggatctcgc

SEQ ID NO: 349434 - DNA, 1944 bp, Homo Sapiens
ccattgtagaagatggtggctttaacctgactgtctaaaaattcccagctaagccttttcctctactctcttccttgttctgaatcatttcttcttctcaggccaaagtagccatggtaaggaggcttcatggggcagaccctgaaagatcaaaactgcatttgcaaagccctcccctgtcccaggacaaagctgagactgacgggtgatgttgctcataggctccagctctgcataagaccttggcttggagacctccctctcagtcaacagctgaactctgagcttgtgcccagaaattaccccaagaccacaggaacccttcaagaagctcccatcacaagcttggcattgctctctgccacacgtgggcttcctcaggcttgtctgccacaagctacttctctgagctcagaaagtgccccttgatgagggaaaatgtcccactgcactgcgaatttctcagttccattttacctcccagtcctccttctaaaccagttaataaattcattccacaagtatttactgattacctgcttgtgccagggactattctcaggctgaagaaggtgggaggggagggcggaacctgaggagccacctgagccagctttatatttcaaccatggctggcccatctgagagcatctccccactctcgccaacctatcggggcatagcccagggatgcccccaggcggcccaggttagatgcgtccctttggcttgtcagtgatgacatacaccttagctgcttagctggtgctggcctgaggcagggcaggaaatcagaatagcatttgcttctctgggcaaatgggaagttcagcggggcagcagaatcagtggcattccccctggtgcaggccggtgggtccactccaactccccctgagtgtagcagcacactttccatacaccaggttctttctacaatcctggtggaaaagccacagaaccttcttcctgcccttcttgagagttccccctctttctgggtcaagagctggagtggtggctccatcctctctgggccacttcggtctaggaactcatctttgcaggaaccaggagtcctgagcacactgaacacacctcagagggaggatccttgttgtggattttgcacctggctttggggcaggggtgaagtgaccaggcttagcttgtggagtttatgggccaccagggtttggggaaatcaccatcccgcggatgctgtgacctcccttctacggagatgcaggcagtgccacgagggaggaggggacctgcaaagctagaatctagggcactgtttcctccccatccttctctttgtagagaatagagacgtttgtcttgtctgtcttcaacctacttttccttttctcttttttgtttctcatcctctctgtgccacctctccacccaggaggccatgtagcatagtggaaaaagtccctgagggcggttaggagttctgggtgaccatcctggctcagctcctaactcaccatgtgacatcaggctatccccattccccctcttgggcctcagtttcccgacttgcaaaataagcagaaagaaccagatgctctccagggtctttttctactttgctatctcatgggtcttcattttctcttattttgttttctctggatcttttccatctgagggtacaggaagtaccaggacctgtttcagtttttgaatcctgcaagcacattccaagactggcctgaaactgcatgagcaacatcactcgaaataattttttctttcaaaagcaccttaacaaccaattgcgatgctgtcctgttcctttttactcacacccttctctcctttctcgtccccatgctcccccacctcagtgctccgtgctgtatgcgtgtgctctctgttcttgtatactcaatataagtgaaataaatgtgttgatcgagctacggtacc

SEQ ID NO: 349435 - DNA, 710 bp, Homo Sapiens
agaagccttgccgagaaagtgaactgtcttactccttcaaaggaatcagatgttgctctagagaagactccaggcatctacctggttgagctcaaatgaggcaagtgggagaaaacctcttctcatcctctgattgaaagtgatacaatttgaaatattggtatattgtccattggtcagtaatggaaaaatgagattcccacccagtgggttactcttttccttgtcttggtttgctatgccttatcccagatcagtgttttgttccatccctatggtcatctctaaagccctgacaggagcatcccagactggagaaatgcagcgtatctgtggcccagaattttgtttgatactctaaacagcaatgcaaagactgcaaaatcacactattctaaacagttgttttcagctcattttgaagattgacctggaaaacatatagatacagaatatatacatttaatcgttgcttgtgattcattgtgtcaaaataacatttaattttcactctgattaatctttattttccatttaaaagattatttcaggctacttaaatacaagaccttgcattctaatttttgaaagcggttgttttccctgagctctctctcaactttgacagtttgtgaatgataaaaagttactaggtttgtcctttccttgatagatgtagagcagttcatctgttttgtaaaggtacagtt

SEQ ID NO: 349436 - DNA, 616 bp, Homo Sapiens
  misc_feature (411)..(553): n is a, c, g, or t
ggaattaaaagctaattagataaatcaagtcacagtttcatccttcagattaaggtgctccaatataatccataccacagcaaacaaaatcctgaagaattctgctgccaatcatcttgcctcttaacctcaatataacaagaacatacataaaagagattaccgatttagtaaatgctatcatctcataccccattcacaccactggcctgtgatattcttcccctgggagagatgtcaagatttaatgagattctatcataacctgtagaaaaaatgagcaacatggaaacattccaattccagtcttaggtgagttccaatgaaattacctgaagaactgaactagtgcttttagttaaggggaaaagtgccctagcttttaaaaaatatgtctataaatctagtttnnnnnnnnnnnnnnnnnnnnnnnnnnnnnnnnnnnnnnnnnnnnnnnnnnnnnnnnnnnnnnnnnnnnnnnnnnnnnnnnnnnnnnnnnnnnnnnnnnnnnnnnnnnnnnnnnnnnnnnnnnnnnnnnnnnnnnnnnnnnnnnattttaaaaagctgggcatggtggcatatacctgtggttccaggtacctggagggctgacgta

SEQ ID NO: 349437 - DNA, 1392 bp, Homo Sapiens
  misc_feature (46)..(46): n is a, c, g, or t
  misc_feature (1294)..(1331): n is a, c, g, or t
tagttctatgttgcactttagcaatgtggctaagcccgggtcgccnctgccaaattaggggtgtagctggttgctgtggagcgtaagtgttgtttttcttaataagaggatcctttactttctttggcttttctggaaccacacttttgccatcccatgcataacctctcttagtgaaatagtttactgtggcaaactcaatcagagctgagaacacaaaggcatagcacacggcaataaaccaatccatagctgttgcataagccaccttagggagggagtttctggcactgatgctcaatgttgtcatggtgagcacagttgttactccaaagacagttcttgctgctacagactctctgttgagccagaagcagacttgtgagagaatcactgtcattatgcatggcaggtatgtttgaataacaaagtagccaatctttctctgcaagtggaaatgagtggtcataacaacatattctcctgtacttgactggacaattccagagtctactgtttgtccaagaaggtcatactggtttagacgtgatccatcttctgctacaaccactgagcgtgctggctctctggtccattcataaacaacttctgctcttgtataagcataacttccaaattttagtgggcaagcatgggcatccatagggaagtcctccaaatgcatcggacattcagctctcactgtcagcctcatggtgtacagcaaggtgccatcctctgtgatccgcaggagtttgttgggcatggtcatgttgtgggccactgacttctttccattgtggaaaaatgtgtccggagtccagattttacttgccattaggttatttaaccggaggactgtcataggtcctttaaattttaacctttcatccttccagctttgacggaaaaatacatctattgtatattccatatcatggtctgaaacgggtccgaaactggtgacgaagatatcagtcttcacttcggttacacgctctcccaatcctggtctcaggcgattgtcataaccatctaggagtctgtccaaaatcctggtgaagacagtggtattgtctttaagttcatcttgtaatgacggctgtccatagcttcttccagtcagtgtgctcagaaggaggatccaggcccaaagacatgtcacgacagacctggacttttcctcatcgcgggcctggagcagcagctgtgggatcaggctcctgtcctgctcgctcccttgctcgcccgctccgctctcgacgaattcgagctcggccgatttggcctgatnnnnnnnnnnnnnnnnnnnnnnnnnnnnnnnnnnnnnncgccgccaccgcgtacagctccggttcgccctatagtgagtcgatacactcggtctgttta

SEQ ID NO: 349438 - DNA, 946 bp, Homo Sapiens
  misc_feature (26)..(26): n is a, c, g, or t
  misc_feature (893)..(893): n is a, c, g, or t
aacagaaaagccggagaagggggggngaaaagtagatgcggatttcgtcctgacttctaaaaattcctcctctccctctcccattttcctaatccgagaatgatggagctcgaggcaaaggaatgattccggaaatggagatatgattctcaaacctagaaatgatcggagtgatttattagttaaatattcttcgtccaggaacccagcacaattcagagctgcagattggatattgggaagcaaatttgggtgtgaaatcttcagcaaaggagcacgcagagtccatgatggctcagaccaagtgagtgagaggcagagcgaggacgcccctctgctctggcgcgcccggactcggactcgcagactcgcgctggctccagtctctccacgattctctctcccagacttttccccggtcttaagagatcctgtgtccagagggggccttagctgctccagcccgcgatgaggaaaagtccaggtctgtctgactgtctttgggcctggatcctccttctgagcacactgactggaagaagctatggacagccgtcattacaagatgaacttaaagacaataccactgtcttcaccaggattttggacagactcctagatggttatgacaatcgcctgagaccaggattgggagagcgtgtaaccgaagtgaagactgatatcttcgtcaccagtttcggacccgtttcagaccatgatatggaatatacaatagatgtatttttccgtcaaagctggaaggatgaaaggttaaaatttaaaggacctatgacagtcctccggttaaataacctaatggcaagtaaaatctggactccggacacatttttccacaatggaaagaagtcagtggcccacaacatgaccatgcncaacaaactcctgcggatcacagaggatggcaccttgctgtacaccatgaggc

SEQ ID NO: 349439 - DNA, 2157 bp, Homo Sapiens
  misc_feature (61)..(61): n is a, c, g, or t
taccatcagtgaagaggaagagggcttcgactgcctgtcgtccccagagcgggctgagccnccaggcggagggtggcgggggagcctgggggagccgccgccacctccacgggcctctctgagctcggacaccagcgccctgtcctatgactctgtcaagtacacgctggtggtagatgagcatgcacagctggagctggtgagcctgcggccgtgcttcggagactacagtgacgagagtgactctgccaccgtctatgacaactgtgcctccgtctcctcgccctatgagtcggccatcggagaggaatatgaggaggccccgcggccccagccccctgcctgcctctccgaggactccacgcctgatgaacccgacgtccatttctccaagaaattcctgaacgtcttcatgagtggccgctcccgctcctccagtgctgagtccttcgggctgttctcctgcatcatcaacggggaggagcaggagcagacccaccgggccatattcaggtttgtgcctcgacacgaagacgaacttgagctggaagtggatgaccctctgctagtggagctccaggctgaagactactggtacgaggcctacaacatgcgcactggtgcccggggtgtctttcctgcctattacgccatcgaggtcaccaaggagcccgagcacatggcagccctggccaaaaacagtgactgggtggaccagttccgggtgaagttcctgggctcagtccaggttccctatcacaagggcaatgacgtcctctgtgctgctatgcaaaagattgccaccacccgccggctcaccgtgcactttaacccgccctccagctgtgtcctggagatcagcgtgcggggtgtgaagataggcgtcaaggccgatgactcccaggaggccaaggggaataaatgtagccactttttccagttaaaaaacatctctttctgcggatatcatccaaagaacaacaagtactttgggttcatcaccaagcaccccgccgaccaccggtttgcctgccacgtctttgtgtctgaagactccaccaaagccctggcagagtccgtggggagagcattccagcagttctacaagcagtttgtggagtacacctgccccacagaagatatctacctggagtagctgtgcagccccgccctctgcgtcccccagccctcaggccagtgccaggacagctggctgctgacaggatgtggcactgcttgaggaggggcacctgccaccgccagaggacaaggaagtgggggccgctggcccagggtaggggagggtggggcaatggggagaggcaaatgcagtttattgtaatatatgggattagattcatctatggagggcagagtgggctgcctggggattgggagggacagggcttggggagcaggtctctggcagagaaggatgtccgttccaggagcacacggccctgccccatcctgggccttacctcccctgccagggctcgggcgctgtggctcctgccttgatgaagcccgtgtcctgccttgatgaagcctgtgccacctgcaagtgcccgccctgcccctgccccaacccccaccgaagagccctgagctcaggctgagcccagccacctcccaaggactttccagtgaggaaatggcaacacgtggaggtgaagtccctgttctcagctccgtcatctgcggggcttctgggtggctcctgccactgacctcaccggcatgctggcctgtggcaggcctaggacctcaggcggggaggaggagctgccgcaaggccctgtcccagcagaagagggaggcttcctgactgacacaggccagccccatcttggtcctgtcaccctggccccaactattaaagtgccatttcctcggcacgaggtgttttagttcttgggggaggccaccccaaaccccagccccaactccaggggcacctatgagatggccatgctcaacccccctcccagacaggccctccctgtctccagggcccccaccgaggttcccagggctggagacttcctctggtaaacattcctccagcctcccctcccctggggacgccaaggaggtgggccacacccaggaagggaaagcgggcagccccgttttggggacgtgaacgttttaata

SEQ ID NO: 349440 - DNA, 5166 bp, Homo Sapiens
  misc_feature (5108)..(5126): n is a, c, g, or t
atgggctggctgtggactgggtgggtggcaacctgtactggtgcgacaaaggccgggacaccatcgaggtgtccaagctcaatggggcctatcggacggtgctggtcagctctggcctccgtgagcccagggctctggtggtggatgtgcagaatgggtacctgtactggacagactggggtgaccattcactgatcggccgcatcggcatggatgggtccagccgcagcgtcatcgtggacaccaagatcacatggcccaatggcctgacgctggactatgtcactgagcgcatctactgggccgacgcccgcgaggactacattgaatttgccagcctggatggctccaatcgccacgttgtgctgagccaggacatcccgcacatctttgcactgaccctgtttgaggactacgtctactggaccgactgggaaacaaagtccattaaccgagcccacaagaccacaggcaccaacaaaacgctcctcatcagcacgctgcaccggcccatggacctgcatgtcttccatgccctgcgccagccagacgtgcccaatcacccctgcaaggtcaacaatggtggctgcagcaacctgtgcctgctgtcccccgggggagggcacaaatgtgcctgccccaccaacttctacctgggcagcgatgggcgcacctgtgtgtccaactgcacggctagccagtttgtatgcaagaacgacaagtgcatccccttctggtggaagtgtgacaccgaggacgactgcggggaccactcagacgagcccccggactgccctgagttcaagtgccggcccggacagttccagtgctccacaggtatctgcacaaaccctgccttcatctgcgatggcgacaatgactgccaggacaacagtgacgaggccaactgtgacatccacgtctgcttgcccagtcagttcaaatgcaccaacaccaaccgctgtattcccggcatcttccgctgcaatgggcaggacaactgcggagatggggaggatgagagggactgccccgaggtgacctgcgcccccaaccagttccagtgctccattaccaaacggtgcatcccccgggtctgggtctgcgaccgggacaatgactgtgtggatggcagtgatgagcccgccaactgcacccagatgacctgtggtgtggacgagttccgctgcaaggattcgggccgctgcatcccagcgcgttggaagtgtgacggagaggatgactgtggggatggctcggatgagcccaaggaagagtgtgatgaacgcacctgtgagccataccagttccgctgcaagaacaaccgctgcgtgcccggccgctggcagtgcgactacgacaacgattgcggtgacaactccgatgaagagagctgcacccctcggccctgctccgagagtgagttctcctgtgccaacggccgctgcatcgcggggcgctggaaatgcgatggagaccacgactgcgcggacggctcggacgagaaagactgcaccccccgctgtgacatggaccagttccagtgcaagagcggccactgcatccccctgcgctggcgctgtgacgcagacgccgactgcatggacggcagcgacgaggaggcctgcggcactggcgtgcggacctgccccctggacgagttccagtgcaacaacaccttgtgcaagccgctggcctggaagtgcgatggcgaggatgactgtggggacaactcagatgagaaccccgaggagtgtgcccggttcgtgtgccctcccaaccggcccttccgttgcaagaatgaccgcgtctgtctgtggatcgggcgccaatgcgatggcacggacaactgtggggatgggactgatgaagaggactgtgagccccccacagcccacaccacccactgcaaagacaagaaggagtttctgtgccggaaccagcgctgcctctcctcctccctgcgctgcaacatgttcgatgactgcggggacggctctgacgaggaggactgcagcatcgaccccaagctgaccagctgcgccaccaatgccagcatctgtggggacgaggcacgctgcgtgcgcaccgagaaagcggcctactgtgcctgccgctcgggcttccacaccgtgcccggccagcccggatgccaagacatcaacgagtgcctgcgcttcggcacctgctcccagctctgcaacaacaccaagggcggccacctctgcagctgcgctcggaacttcatgaagacgcacaacacctgcaaggccgaaggctctgagtaccaggtcctgtacatcgctgatgacaatgagatccgcagcctgttccccggccacccccattcggcttacgagcaggcattccagggtgacgagagtgtccgcattgatgctatggatgtccatgtcaaggctggccgtgtctattggaccaactggcacacgggcaccatctcctaccgcagcctgccacctgctgcgcctcctaccacttccaaccgccaccggcgacagattgaccggggtgtcacccacctcaacatttcagggctgaagatgcccagaggcatcgccatcgactgggtggccggaaacgtgtactggaccgactcgggccgagatgtgattgaggtggcgcagatgaagggcgagaaccgcaagacgctcatctcgggcatgattgacgagccccacgccattgtggtggacccactgagggggaccatgtactggtcagactggggcaaccaccccaagattgagacggcagcgatggatgggacgcttcgggagacactggtgcaggacaacattcagtggcccacaggcctggccgtggattatcacaatgagcggctgtactgggcagacgccaagctttcagtcatcggcagcatccggctcaatggcacggaccccattgtggctgctgacagcaaacgaggcctaagtcaccccttcagcatcgacgtctttgaggattacatctatggtgtcacctacatcaataatcgtgtcttcaagatccataagtttggccacagccccttggtcaacctgacagggggcctgagccacgcctctgacgtggtcctttaccatcagcacaagcagcccgaagtgaccaacccatgtgaccgcaagaaatgcgagtggctctgcctgctgagccccagtgggcctgtctgcacctgtcccaatgggaagcggctggacaacggcacatgcgtgcctgtgccctctccaacgccccccccagatgctccccggcctggaacctgtaacctgcagtgcttcaacggtggcagctgtttcctcaatgcacggaggcagcccaagtgccgctgccaaccccgctacacgggtgacaagtgtgaactggaccagtgctgggagcactgtcgcaatgggggcacctgtgctgcctccccctctggcatgcccacgtgccggtgccccacgggcttcacgggccccaaatgcacccagcaggtgtgtgcgggctactgtgccaacaacagcacctgcactgtcaaccagggcaaccagccccagtgccgatgcctacccggcttcctgggcgaccgctgccagtaccggcagtgctctggctactgtgagaactttggcacatgccagatggctgctgatggctcccgacaatgccgctgcactgcctactttgagggatcgaggtgtgaggtgaacaagtgcagccgctgtctcgaaggggcctgtgtggtcaacaagcagagtggggatgtcacctgcaactgcacggatggccgggtggcccccagctgtctgacctgcgtcggccactgcagcaatggcggctcctgtaccatgaacagcaaaatgatgcctgagtgccagtgcccaccccacatgacagggccccggtgtgaggagcacgtcttcagccagcagcagccaggacatatagcctccatcctaatccctctgctgttgctgctgctgctggttctggtggccggagtggtattctggtataagcggcgagtccaaggggctaagggcttccagcaccaacggatgaccaacggggccatgaacgtggagattggaaaccccacctacaagatgtacgaaggcggagagcctgatgatgtgggaggcctactggacgctgactttgccctggaccctgacaagcccaccaacttcaccaaccccgtgtatgccacactctacatggggggccatggcagtcgccactccctggccagcacggacgagaagcgagaactcctgggccggggccctgaggacgagataggggaccccttggcatagggccctgccccgtcggactgcccccagaaagcctcctgccccctgccggtgaagtccttcagtgagcccctccccagccagcccttccctggccccgccggatgtataaatgtaaaaatgaaggaattacattttatatgtgagcgagcaagccggcaagcgagcacagtattatttctccatcccctccctgcctgctccttggcacccccatgctgccttcagggagacaggcagggagggcttggggctgcacctcctaccctcccaccagaacgcaccccactgggagagctggtggtgcagccttcccctccctgtataagacactttgccaaggctctcccctctcgccccatccctgcttgcccgctcccacagcttcctgagggctaattctgggaagggagagttctttgctgcccctgtctggaagacgtggctctgggtgaggtaggcgggaaaggatggagtgttttagttcttgggggaggccaccccaaaccccagccccaactccaggggcacctatgagatggccatgctcaacccccctcccagacaggccctccctgtctccagggcccccaccgaggttcccagggctggagacttcctctggtaaacattcctccagcctcccctcccctggggacgccaaggaggtgggccacacccaggaagggaaagcgggcagccccgttttggggacgtgaacgttttaataatttttgctgaattcctttacaactaaataacacagatattgttataaataaaattgtnnnnnnnnnnnnnnnnnnnccgagactagttctctccctcgtgcagaattcgccaccca

SEQ ID NO: 349441 - DNA, 1166 bp, Homo Sapiens
ggtttatgaaattctaaaagtttctgtcgtctttaaaaaggaacgtgcagtatatttctatctggctgtttagataaccctttccttgtattaattgtgagcacggagctcactggtgggggaggttctgaaactctctgccctcctgtggttgaatgaagatgttgcaagacttgcacaaaggaggttattcttctgacagcatcaacttttagagatggttctttttcatctttccaattcagttacttgacagtctccttccccagtatgctgaagtttgttaagagtcaccagtaattgtgcttttcagacagtagtgcagcttcaaaatcgaggccatcactgggctgatgggctgggagaaccttgccatgtgcctgcctgtttcctgcccccttagtcactgcccatttcctgcccccttggtcgctgacacaccttcacccaaagtgccatggttctgatggtggcagttccatctccctgacatcaggaagcttttctcgatcagagcagagcgtggcctgcctgccctcgtgtcactggatttctttctcttataatcagctgaaacagagttctcaaagaacagtaaactcaggttcagaggtattatggaataagaatggtttcatagtttggcttttctatataatgcctccctctcaaactgaaatattcatttttttagtggagtatttgactagagagaaggtaaggcagaaatacagtctacactggcttttaaaaatgtaaagccaatttccaaccggaccccaaatagtacaggttgaacattccgttccaacaatccaaaaccccaaatgctccaaaatcttaaactttgagttccagcattccgtcagaagtggaaaattttacacctgacctcatttgacaggtggcagttacagtgcaatcaaaactttgttccatgcccaagattattaaaaatattggataaaattaccttcaagctatgttgtataaggtgtatataaaacaaatgaattttgtgtttagacttgggtctactcccaagatacctcattatatatatacaaaaatccccaaatccaaaaacatttgaaacacttctggtcccacacattttggataagggatatttgacctatatctaattatataataagaaaaatgta

SEQ ID NO: 349442 - DNA, 733 bp, Homo Sapiens
  misc_feature (374)..(631): n is a, c, g, or t
  misc_feature (653)..(671): n is a, c, g, or t
ctagattttaaaaatcaaaatcatgtttccatgcacttgagttccggatcaaatatattatctacagaaaaaatccacaaactcttatccaaatgttcatataaagtttaaattatgtcagggtggcttttctcccttagttttatattcattaagtattgaaaacaaacctaaaatcttcaagtggaaagatattaaattaaattttgttggaaaaaaacccatctttgccatgatgttaaaaaagggaaaatcaggaaaaatggttcccacagatatttaaagttttaatgggtcctcttctccaagatgtttttctcctcacccttcaattttttttaaaagtatttctgagaaagaaagtacattttttnnnnnnnnnnnnnnnnnnnnnnnnnnnnnnnnnnnnnnnnnnnnnnnnnnnnnnnnnnnnnnnnnnnnnnnnnnnnnnnnnnnnnnnnnnnnnnnnnnnnnnnnnnnnnnnnnnnnnnnnnnnnnnnnnnnnnnnnnnnnnnnnnnnnnnnnnnnnnnnnnnnnnnnnnnnnnnnnnnnnnnnnnnnnnnnnnnnnnnnnnnnnnnnnnnnnnnnnnnnnnnnnnnnnnnnnnnnnnnnnnnnnnnnnnnnnnnnnnnacaagagtgaaactcctcctcnnnnnnnnnnnnnnnnnnntacttttttcttattatataattagatataggtcaaatatccacttatccaaaatgttggga

SEQ ID NO: 349443 - DNA, 1187 bp, Homo Sapiens
  misc_feature (739)..(739): n is a, c, g, or t
  misc_feature (750)..(752): n is a, c, g, or t
ttcagttattcacaccttgatcaaacctgaattataaacttagcacttacaaatatgaaaattcattcacaaggaaaaacagtatttccatttcaccaataaaaattttgaaagttaacagtctattctaggaaaccaagtttagctgaaaacttcagggatgaagatcatctgttgtagcagcattcaaatatataaacagtaaaaataagacttaaaactgctgcctacagtgtcatgttttgggatttagtcaatccaattgatttttagtacaaaactagaaaataccctcttctccataacatcaataggtaccaatataatttcttcttttcaattgtgaaataatactttcaagatgatcctatatacacaaggttgtcagttcaagctgtcatataaatataaatgctttcttaaaaaaagtattttacagacagatagtgtaatatacattgttcagtttgatctggggcaaaagaaaaaagctaacacaaagctttaagtgtgatatataaaaagaatgatacataaatgacgttaaaaaacctgcatagaaaatgagcttcaaatagtagtgtgattttaatttttatcacctctgaaaacttcaagccattaaaaaaaaggcacacttctcaactttatccctctaaagggaatgttcttaaagaacccttcccttggttagagtttaaatgtaacacttaagaaaacacaccactacaccaaacanaaacagacaannntttgacttcaaggtactttaaagtttgttggaacatttacccaactattttgtaaattaaacatccagtaatataatgctctgcaaaagaaataaatttatatgtacaagatacttcatttacaatgttggattaaatactttcctgggatagtttagcacacattttacataatatgtttctgtcggcagtttatacattaaaatgaaatgtatactgatcaaaagttacttgctcatgctcaaataataagcacccggccgttatgtccgcattcccgggcatatatccacggtaccatcgcactgataaacttcgatataatgtatgctaatcgcgaaccttaatacgccgcttcctcgctcacctatctcgctgcgctccgttcgtacgacactacgagctagcgccatatagacttaatccaacgttctt

SEQ ID NO: 349444 - DNA, 669 bp, Homo Sapiens
  misc_feature (23)..(23): n is a, c, g, or t
  misc_feature (34)..(34): n is a, c, g, or t
  misc_feature (54)..(54): n is a, c, g, or t
ggggaagctgaaatttataaatnctattaaagancaaagcccttccaatacacnaaaattaatactgagaccatcatgatttccttatgaataatcatttgttttaaacatctttgtgtcttcacataaattatggaaaatttaactcagaagaaaaatactgtaatccataatccattaaataaaaaatacagtgagctaggtcaaagtcagtattttaagaaataattaaggtattgtactcaagagcacttttctttttcactaggctaggaaagtgaaacataattagcattttactccgtgacagcaagttcactgcacttctaaatgcttgactatctccaaaaatacacttttcattgttttataatacacacatattttatacttgtgagttaacataggtatttttcttgagaagacattacaaaatgaagcactgatatgaacaaaacctcacaggcaagattttagaaaatctgaaatcatcttgcctgggtcataatccaaagacagtgacaaatgttgttaggggaaacaaaatcagtagaaatataaaatatgaaaagtctttaaaatccagacagccaatataaaaaacagacagacttcagtgaaagcttggagagctgtttaaagaaatgaggtatgacccgggaattccgg

SEQ ID NO: 349445 - DNA, 1467 bp, Homo Sapiens
gagcgggttgatgtgccgttagggggtgctaaagctggtgttaagatcaatcccaagaactatactgataatgaattggaaaagatcacaaggaggttcaccactggagctagcaaaaaggtgctttattggtcctggcattgatgtgcctgctccagacatgagcacaggtgagcggagatgatgtcctggatcgctgatacctatgccagcaccatagggcactatgatattaatgcacacgcctgtgttactggtaaacccatcagccaagggggaatccatggacgcatctctgctactggccgtgtgtgtcttccatggtgcattgaaaattatcatcacatgaagtcttcttacatgagtcattcttaggaatgacaccagcgtgttctgcaagataaaacatttgttgttcagggatttggtaatgtgggcctacactctatgagatatttacatcgttttggtgctaaatgtattgctgttggtgagtctgatgggagtatatggaatccagatggtattgacccaaaggaactggaagacttcaaattgcaacatgggtccattctgggcttccccaaggcaaagccctatgaaggaagcatcttggaggccgactgtgacatactgatcccagctgccagtgagaagcagttgaccaaatccaacgcacccagagtcaaagccaagatcattgctgaaggtgccaatgggccaacaactccagaagctgacaagatcttcctggagagaaacattatggttattccagatctctacttgaatgctggaggagtgacagtatcttactttgagtggctgaagaatctaaatcatgtcagctatggccgtttgaccttcaaatatgaaagggattctaactaccacttgctcatgtctgttcaagagagtttagaaagaaaatttggaaagcatggtggaactattcccattgtacccacggcagagttccaagacaggatatcgggtgcatctgagaaagacatcgtgcactctggcttggcatacacaatggagcgttctgccaggcaaattatgcgcacagccatgaagtataacctgggattggacctgagaacagctgcctatgttaatgccattgagaaagtcttcaaagtgtacaatgaagctggtgtgaccttcacatagatggatcatggctgacttcctcactatcctcttcacatgtaacttctgcagacctatcacaagtttacatgtaaccacagaaaatccctttctctcctgactcctttaataatgggatacccttttctcaacaaggtcaatcccaagtccagccccgtttaagggaaaaaagaaatttaagggttaacctgggatcttggtacaaaaccttgaaggggggaaaatgtaaaaaattcccccttaacccccaaaagaaagcccatttttttggggaattttttgccccctttt

SEQ ID NO: 349446 - DNA, 2300 bp, Homo Sapiens
  misc_feature (13)..(13): n is a, c, g, or t
  misc_feature (1416)..(1430): n is a, c, g, or t
  misc_feature (1522)..(1572): n is a, c, g, or t
  misc_feature (1603)..(1660): n is a, c, g, or t
  misc_feature (1781)..(1790): n is a, c, g, or t
  misc_feature (1816)..(1824): n is a, c, g, or t
tttagaaagaaanatttggaaagcatggtggaactattcccattgtacccacggcagagttccaagacaggatatcgggtgcatctgagaaagacatcgtgcactctggcttggcatacacaatggagcgttctgccaggcaaattatgcgcacagccatgaagtataacctgggattggacctgagaacagctgcctatgttaatgccattgagaaagtcttcaaagtgtacaatgaagctggtgtgaccttcacatagatggatcatggctgacttcctcactatcctcttcacatgtaacttctgcagacctatcacaagtttacatgtaaccacagaaatccctttctctcctgactcattaataatggataccattctcaacaagtcaatccaagtcagcccgttaaggagaaagaaattaaggttagcggatcatgtacaagctgagtgtgaaagtagaaatcacctacaccagagagccattttggtattttgcctttaaataaaaagcctcctttatctggctgtgcagccttgctctgtggcttttcccaacacaatcagtgctagtgctggggaggaacagtcaagagcagtcagttgcttgcttattttttctggatgagtctgggacacactgtaactttaacacatttaagaagtaggtgtgtggccttttcagaaggtggcatggtcctcaagtgagttcttagtattttatatcagcaaaataattcaattttgcaggttgcaaacaaatataaaacctgtttctgtttatgaatattattcttttagaatagaataagtacatgctgctgtaataaaattgcctttaatcacttaacaagcctaaccttgactcaaacagtgaatgcctatagaaataataaatgaaaaaaactagtatttttatatcataaaacaatgtcatttatagcttatcattcatgtattgtccagcagacattaaaagccctgtggataattaagttatcttcatacctgcaaaatggtggaggctattttcattaaaactgtcagaatttgcttactataattatgatacagtccaaagaatgcagtcactttttatcatgttaactaattgttctcttttgaagatctatggttgactaattaaacaataattcaagtagagtgtcccagaaaaaaaccacttgggctccctgtttggagtctggctggctctgagcattgccaatggcccctactcacctgactttgtatcctctccttttagaggctttgcattctgcacccagcttcactaacagtgggctgaaaacatccttgggttgagtgtttcatttgggagttatttggccagggccttttgaacagtagtgtccccatgaagtgctagataatatatgtgtaagagtcagcnnnnnnnnnnnnnnnaactctaacacccttcagaaatttctaactactttgtaactgcatggcttaacctggtgataaaagcagttattaaaagtctacgttttccnnnnnnnnnnnnnnnnnnnnnnnnnnnnnnnnnnnnnnnnnnnnnnnnnnnccaaggtccaaaacaaagctaaacacactcnnnnnnnnnnnnnnnnnnnnnnnnnnnnnnnnnnnnnnnnnnnnnnnnnnnnnnnnnntttcttgttgggcccggggcggcccccataaggggaaagaggacacactggggcaataacccgggtttcccctaaggaaaaacccctggggctacagaacataaggcggcttggggaactnnnnnnnnnnaaataaaaaaacaaaccgccccgccnnnnnnnnnaaaacccgaaagactgtgttcccttcaaaaacaaaattctccccgagtagggaggaattctttccgggaggagggccccctttatcgtggggggacttctttattctccaacaccggggggtgtctccacaaaggggcggacgcccctcaaatattctccaaaaattttcaccgcgcccccgcggcccgccgtgggacaactttaatattggagaagatacttgggccgggacaattatcatttctatataccccctttttccggcccgacaacacggtgagaaacgcccccctccctacaaccgccgccctgtgttatagacaccccgtgaactctccgcccaagcgggggacatccgcaacccccctgttgtcaccacccttgggccttaatataatattttcgcccccctgggggcaaaaaaacggccgggcgctccacaacaaattgtccgccattttttggccccccctcc

SEQ ID NO: 349447 - DNA, 511 bp, Homo Sapiens
ccctggcctatgctgtcatcatgcttaatactgaccagcacaaccacaatgttcgtaaacagaatgcacccatgaccctggaggagtttcgcaaaaatctgaaaggtgtgaatggaggcaaggactttgagcaagacatcctggaggacatgtaccatgccatcaagaatgaggaaattgtaatgcctgaggagcagacaggcttggttcgggagaactatgtgtggaatgtgctgcttcatcgaggtgccacccctgagggcatattcctgcgtgtgcctactgccagctatgatcttgacctcttcaccatgacctggggccccactattgctgctctctcttatgtctttgacaaaagccttgaggagacaatcatccagaaagccatctcaggcttcaggaagtgcgccatgatctccgcccactatggcctcagcgatgtgtttgacaatctcatcatctctctatgcaaattcacagctctcagcagtgagtctattgagaacct

SEQ ID NO: 349448 - DNA, 805 bp, Homo Sapiens
  misc_feature (305)..(313): n is a, c, g, or t
ttttttatcaggaatggccgatgtgtatgtgatttgtaatcacaagtaatgattcatcaggaaatgtcaatcctgttggaaagattgcacctttacttgcagaagtgacccccacctgtgtcctgacctctccatttacaggctctctcacccatttcccccacctcctttaatttttgctttactgtcataaagtaggactaagattggtctaagcattgcatgttcttttgtgatggtaaatccaaaggaaggcctataagtattaacatttgaaataactgctaattcaggaaaatggaagnnnnnnnnnttatttgaaacacagaacccatttcatggcctgcctgatatctgtgaaatcagggctggagctttacttaggattcacatggcctcctaggaaccatgggacaaatgggaaacaggttatcgggggattcatgaagtcagtgagagtaattgcttcttttttgcgggtgaactgaatgtatttcttcaccaaatcttgatgttaacaattaaaaagaagaaatgacatgcaagtaggtcttagcagaaaaatgcaggctgggcatgagtcatgttgttaccctcccacatgctcctacaatccacagagatgcctgtctgcaggttcttgaagttattgttagtatttggtatctcaaatttttcgtcactgttcacatgccactttctctgtgcacagtggtatcctcatttgctttttaacctacactgaggagtctttgtcaggttgcactgattttccaattctgcagtaatgagtaagctcacggca

SEQ ID NO: 349449 - DNA, 579 bp, Homo Sapiens
gctggtaccggccggaagtacgggatatcgtcgacccacgcgtgcgatcaaaaccaattcagagcctggcacaaaatgtatacttcctagtgaaagctgtctcaaaagcacagcctttttgatggatcatattagctcatatctgccatagaaaggcaatcaagcttactccctgcaatcggagtcaatatcaattcttgctcaagcaaacatgttttacagtgttggcgcaatggcaggaactagtcaagggcactttcagatctggaaagaggaaagaggaggtagaaaatcactcttatgtgtttcttaaactgtcaatcaagcaagaaaatttattccaccaccttcatatttgctctaaaatctggggccaggtagttgaaatgtgatcttgttctttctcagccattttggcaatttaatgccaaatattccaaatgttagatgaatggcagtaataaaatgattcaaatgtttgataaatacaagctgagagcaaaatctggactctgaaaaatcggaactattttatcatgttgctaaaatgagagcatcattttcttccctctctgtaag

SEQ ID NO: 349450 - DNA, 420 bp, Homo Sapiens
gtggtgaagaccagctggctactttgggtatgtcaatcctatcctttcaatcttcacctaatggaagtgaagttaagatcataaagaaattctatttaggcagaattaaggactcaggagaacatccacgtagaaatcatccacgtagaaccaagagcttgccaacactgaaaaacctgacacaaagcctgttaagcagcaaatggcagacatttctttctctacattaaaactgattttcaacatgaaaagcagatttaaaagggaacatttagggtaaccacacttaatgcattcttgatccagtgactatctcaaaacaggaaaagatttttaagtaagttgaccatttggaaaccacttggtatgtcaaggtcatctcgtagaaaagcccaagttcttatgatctctgaagagctc

SEQ ID NO: 349451 - DNA, 719 bp, Homo Sapiens
  misc_feature (481)..(481): n is a, c, g, or t
ccccgggctgcaggccagaaatgagggggtctataggcaggcagatggagaggacagggacttcatagcatttaacatcattttaccatctttccttcctgttctttttggtgctgttggaaatcagtagtgagaggaaaacactcaaatctggaagtctagcgctgtcggtaggaactgggtagaaaaaactatgcatgtccccccatcactcggaaactacatcagaacatcataggagcatcctgtttccatgtgcattagtttccacgaacatacatgtgaatgttttcccacccgtagtgttgctgtggagttgtgagatgtcaaagtggaggcaagagtatctgccttttgcagtaggctctgttcttttcctgtcctgagagaggaggtcagtctaaccctcaccttgtgagttcagccttatactgacctgagcccagggtggatcagatgctgagatcatgtgactccaagntgcaagacacgtaatagagagaagcgtgactgttgcatccatgcaggctctaatcctggctccttcgggctggctgagctttggctcctgagctataaagagaggatgataggaacacctactccaggaggtgctgtgagcacaaaagagaaaacggggaaaaacgggtttcctgcatggtcagtgctcaacaaattgtagtttcaatgataaaaagtaaaaccaatacaccctcgtg

SEQ ID NO: 349452 - DNA, 1284 bp, Homo Sapiens
gctctcattaagcaaaaggggaggcacatgaagctccagcaaggccgggagggaaccgtgaagccaaggctctgggagcccccaggcacctgcgtttgcattttcatcctggaggagaccaggcctctggggctgctccccggggtgcagagaggaggggtctttcttggtgtgtaacatactcattgattcagtcacctgacctttgactccatgtattttgttgagtctggatgtgtggtgtgctctgcccagcagctgggatccacatgagcacagacatggtccccccgcgtccttggtgagtgcagaacctctgccgtgagcctcgattctgggaggttctgggaggttctgagcccagggtggatcagatgctgagatcatgtgactccaagttgcaagacacgtaatagagagaagcgtgactgttgcatccatgcaggctctaatcctggctccttcgggctggctgagctttggctcctgggctataaagagaggatgataggaacacctactccaggaggtgctcggtaggttaccttgccagaggctgcagggaacttactccatttcagcacagaagcactttgtttcataggacagtggttctaccactttccaggaagtccaaaggctgatctcttggaaatgcagcaaaaggtgaggtgagtgccaacttctgggctactccagagggcagctccaatgccagagatgttcaagttaagccaggatcaaacaggaaaaacccacgctcccgagggagaggctggccctcgaggggcagggccctgcacctgtcagtccccaggccggcaggaggcctccacggtatgtgagaaagctgcctgtcttgggagggaaatctcactagatggttcctgaaagcggcttcgcaggctagcatttcataaacgttttcacttgtgaaaacaaaaatcccttgagtgagttgtgtaagcacaacatagaggcttgtttataatgctacgtatgtacttggaaaaccccccaagaagtcagaactgtcaccttggtctgttagctgcgttacttggaaggattcttggcgtctgcgctctggttatttgtgttactgggcagtgtggaagacgtagaattagatgaggacagtgttggttcgttgctgatcggccacggtaaagagcatatttcttttctatcttgctttctggggctcttcgccaaaattgatcatttcataaaagaggggaaacccaaggagagagactaaactttgaataaaaatttgaatgc

SEQ ID NO: 349453 - DNA, 2700 bp, Homo Sapiens
  misc_feature (145)..(145): n is a, c, g, or t
ggttcttgggccgggggtttgctcttggggggaacaaggttatggccccattgttccccttgccctaacgggggccgcgccccccccaaaggaaagtgttttggaaaacttttgggggggccggaggggggccggcaaggaaganttaggggaaatacgcatgggacgtggtaaaacataagtatgggtatatttatttctctcaaatgcatacaagacaataattacacagcaacaaatcttttgttcaacaatgatttgattcataagcatttgaaatttacataatttcatatcaatacccttgtatttttaaatacagtaagtaaaaaagcccccaaataaccaattcttatatttcctatttatccctctatacatccaaacttttaaaaagttacaaactgaacattatacagaacatataaatcatgtttaaaaacttgaggttttaaaatcactgcttccccaatatgattcagaaaaattctcatactgacaagtacagtcataggtggtaaagtaagttggtggcggggaaaatgaaagaagagacagacacaagtttgctgtcttaatgttttactaatcctgtcagttaaaaatggtgacgtcatgagaagtaatagtttaatatgaggaatggagtttgccttgcagcttgagacatgcatttcaagtattttcctatttgatctgagctcactgtagcaaactgatgccagaagagaataattattttcttccatacattcgctcaatgtccgcctggtaatgtgttttaagctctttgcgtttcagcttgaaggcatctgtcaccagaccagtttcaggggtccacggttcaggactcaaacgaatttttactggaatttcaaacttttccagacttgctgaaatagcagcttcggaaagcactttaagtacctcattttccatttcacaactgttacacagctcctcccaagtccctttaagtcctttctttcgagctagttcagttagttccttttgatttggcacaacaaatccaatgacataagaatgataactgtttgcatatgcacaaatgttatctactagtggaagattcttcaaagctgcctctactttcccaagagaaacatattcccctgcctgtagttttacaaggtcctttttacgatcaataatctttaagcatccatcgggttcaaactctccaatatccccagtacagagccacctttgtccattttcatcttcaaagaaatcagcttttgtttttgcttcatttttgtagtaccccattgtcacactttggcccccaataagaatttcacccctggggtgtggcttatcagtattaaagtatccaccttcctcccagttttttaatttgatttcacagcaaactaatggtgctcccactctgccagtattgtagtcccacacttcggaaattgttccagccccagcagattcagtgagcccgtatccctgaccaacaggacagcagaaacagatgttcatgaatcgctgcgtggttgcagaaagtggagcgccaccacacaacaggagacgaatatttccccctagcaagcttcgaactttccggaaaacaaagctgtcgcacagtggagtattacgtccttttgaaatctgttccattttgtaattataggccagaataaacagattacgttgaaaactactcatttcactgactttattcatgacatttttgtagatccgatccatgatttccggaactgctgccatcagtgttggtttcaacatggatgtatcccctttgcttccttttttaatttttgaagactgatctgctaaagtctgtggtgaagagtaaccaatgcggcatccgtgagaaagacagacaagctcagcacttaattctagaacatgggccagaggcaaatatccaatgtagacatcttcctctcctagttctggaatcctttctgccatcccagttataccagcaataatgttactatgtgagatcatgactccctttggaagtcctgtggatccacttgtgtacatgattactgcaatatctgagggcaatggtttgctatgaggttggttttccatgctggccttggctcccagggcctccactgcagccatggtatgcacaatgatgcccttggggaactcggaccaggtcggtggctttccatcaacagtgatgatgtgccgcaggcgtgggaccaaagaaactatatccttcaactttgtttgtaagagttctttactagtaatgatgttggtcacctctgtttcatttaatgcatgaacaatggctggacctcctagagtggcatataatgtaacaactaaaaggaaaagcagcagccagtcaaatattcaaacatttaactacaaatgtaaagtctctgaatgtggagatgaatcataataacgcattaggagccctaaactgttaaatccacagtctataagtgttatgttttttaaagttatcttatcatactaatcaacattacacctactcatcctcccctaaatgccccaagatttccaatttttaaagatgaagatatttaaatttttattttgtttcacttacagatgttactctgggactaccacattgtgaaggaattataactgatttctaagacttcaaattcttaattgttggccacttggctttacaatgtgaaaaagaac

SEQ ID NO: 349454 - DNA, 615 bp, Homo Sapiens
  misc_feature (14)..(14): n is a, c, g, or t
  misc_feature (51)..(51): n is a, c, g, or t
  misc_feature (378)..(392): n is a, c, g, or t
tgtcttatttgatntgagctcactgtagcaaactgatgccaaaagagaaanatcatttcttagcttgaaggcacttgtcaccagaccagtttcaggattcatgggtcagggctcaaaccaatttttaatagattttcaaactttttcagacacgcccaaatagcagcttcagaaagtactttacgtatggtagtcccctcttatcctcaagggatatgttccaagacccccagtcttggaacctgaaaccctatacaatgtttatttcctatacatacaagcctatgataaagtttataaattaggcacagtaagagattaacaacaacaataataaaacaattataacatactataataaaagttatgttaatgtgnnnnnnnnnnnnnnnaaaatatcttaacatttttggaccacggttgactgtaggtataacccaagaaagcgaaacctcacataaagggggactactgcacctcatcttctgtttcacaactgttagagagctactctcaagttcctgtaagtcctttctttcaagttagttctgttagttccttttgatttggcacaacaaatccaatgacataagaacaattaactgtttgccccca

SEQ ID NO: 349455 - DNA, 1815 bp, Homo Sapiens
ccgcctcctcctcccatccagcctgctcggcggcggaggcggcggtggcggcagcggttgttcctgcctctccgccacctccaccgcggcttatcccctggctggcggcgttggcggggcgggggacagtagttgtagacgcccgcccctgcctcagagaagataccacattgaatgaacaaagactgaactttgtttacagataccttttataaaagatgtctgtggagtagtgttacagttcaaataacaaaggattttgcattatgagatgagtgagagtggagaattggacaaaaattgatttttgatctctgaattgtggtttttagctcaccagttattgtgtagtctcactatttgaaaattcatgctgaaaaactgagtgaatatgatcagatttctccaccaaattctcagcctgataagggaaaatcccgttttgtcaacctaatgaagcattcaaagaagacatatgactcttttcaagatgaacttgaagattatattaaagtacagcaaagccagaggcttagagccaaagacttgtttcacgaaacgatgaaacggggactatttggaaacctgtgggtacaaaggagaggttaattccagacccacgtatagaatgtttgaccagagactcccatctgaaaccatccagacctacccaagatcatgcaatattccacaaacagtggaaaatcggttgcctcagtggttaccagcccatgacagcagattgagactagactctctgagctactgtcagttcacgagggactgtttctcagaaaaaccagtacccctgaactttaatcaacaagaatatatttgtggctcacatggtgtagaacatagagtttacaagcacttctcctcagataacagtaccagtactcatcaagccagtcacaaacagatacatcagaagaggaaaaggcacccagaggaaggcagagaaaaatcagaggaggagcggtctaagcataagagaaaaaaaagctgcgaggaaattgacttagacaaacacaagagcatccaaagaaagaaaacagaggtggaaatagaaaccgtacatgtcagtacagaaaagcttaagaatcgaaaggagaaaaaaagccgagatgtagtctctaagaaagaggaacgtaagcgtacaaaaaagaaaaaggaacaaggccaagaaaggacagaggaggaaatgctttgggaccagtctattcttggattttgaagctttcaaagttggttctcccaaagttaaattgaaaaaataggtgagagcttggttttatgatatccgtgttcataccacttttcttatgtgaataggttctttaacttctaacaaaggcctagtaaacaaagtgtttagcatgcttgctctccaacacagaaattgcttttcctcattttctaaaagcattattacattttttgaacatatagtgtaatttcctttaatgaaagtgactctgcttttattcatcaaattgctttgatggtggaaatattttctgttgggaggttatttattttaaattggaggattaatgacctttgcacaatctgtttcttgattgggtttgttatagttttgagttgggtattttatgttcattggtttttctctgtgaagcaatttttttctcctttattagatctaacttgcagtgtattttctaggctggaaagtggaaaatgaaatatattataatcttaggttacataaagtttctaaagtttcaaagagtcttgatacaaaatcagtttatattctgaaaatatttataataaagtattctaatttct

SEQ ID NO: 349456 - DNA, 1302 bp, Homo Sapiens
  misc_feature (775)..(775): n is a, c, g, or t
gggcagcctcattttcttcagagtcagcatctttctttccccttgcaagcagtctcctgtttctatgaatagtctttgctcagacaaggccaatatacttggtaataattaatttagcttctttgaaatgattaggtcactttttggtttaaaagattaccatggttgtccccaaaatctttgcatgtaccaatttatttcctcctccctagggtcagaatgattttatatttggcttatgaaatgtattaatttgcttcttctggtcaaagataaagtggaaggatgatgagatttttaaaaaattaatgtatcccttgcttctaattctacctacaaagtggaatagtgtgctagttactatatagttcccagtgtatagcttttgactcttttgaagtggtaactagtagttttgttttagaattttgctttcagcttttatcctgagagtggggctcactgaacctctctcctttctaaaatctgtggaaattacttttggtaactaaggcactgcagtgatctcagcatttagtatgagaacctatgtttgccatatttgtagtattgcttttacatctttagatatgttccggtcccacatgcaaggaagtgaacatcaaattaaagaatccattgttatcaatctagtgaagaattcaaggaagacacaagactcttaccaaaatgagtgtgcagattacatcaatgtgcagaaagccagaggactagaggccaagacttgtttcagaaagatggaagagagttcttntggaaacccgtagaatacagagaagtggtcgattccagacccagacatagaatgtttgaacaaagactcccatttgagactttccggacatacgcagcaccatacaatatttcacaagcaatggaaaagcagttacctcattcaaagaagacatatgactctttccaagatgaacttgaagattacatcaaagtacagaaagccagaggactagatccaaagacttgtttcagaaagatgagagagaactctgtggatactcatgggtacagagaaatggttgattctggacccagatcaagaatgtgtgagcaaagattttcacatgaggcttcccagacctaccaacgaccataccatatttcaccagtggaaagccagttacctcagtggctaccaacccattcaaagaggacatatgattcttttccagatgaactttgaagattacataaaagtgcagaaagccagaaggactagagccaaaaacttgttttcagaaaagatagggagataagctctgttaa

SEQ ID NO: 349457 - DNA, 429 bp, Homo Sapiens
tctcacatatctcacatataatgtaatttccctaaatgaagttgtctctacttctgctcatcaaattgctgtgatagtgaattatttattcatgggagataatttattttaaaggacagaattaccaagcgttacaaaatcagttctttccttggttttgtgttagtgttggtggtattttattgttgtttttctgtgtttatgtgtctcagctttctccaaggaatatgtatgaaataacttaaactgattttttctttgttaaatctaatttgcagtgtatttttgcattttctagttctgaaagtggaaaatgaaacagtctataataaacttagatgatatatagttttaaaacggtctcaaaaagtactgatataaggtcagtctatattctggaaatgtttatattaaagtgttttaatttct

SEQ ID NO: 349458 - DNA, 348 bp, Homo Sapiens
accatcttccctaggaatattcctagaaagcatctgcttaattttgctgctaacagctaaccttatcccacgttgagggtggtattaaaactgttcacacagagtgagcctgggtcagtcaaaaacagaatttgggcatttgagtgataacagacaacctaaggacaatgagcactttgcagatctctacaattaaaagttgcctctttgaggcaggaggggagaagcacagtccctgccaggttgcctgaactaaagatgccatggagcaggagtgtcttggtgcattgttccccgcttaggagtacctttaaaaagggggtgaaataaatttggcttaataattgt

SEQ ID NO: 349459 - DNA, 416 bp, Homo Sapiens
  misc_feature (18)..(18): n is a, c, g, or t
gtccaggcctggtcctcngaactccctgacccttgtggatcctgccctgccctcggccctccccagtattgggattaccaggcatgagcccacccatgcccggccttaaaatgccttcttaaaggaaaaatgccaactccatccttaatctcaaggaaatctgattgtccaaatagatctgttaatatgtaacatattaataggtaacttgctgtgtaaaattataagccatattttaaaaggttttaaaaatacttattgtgctccatttgtgatataatttctaacatttctgctctgtgatgggggtttatttgtaagaataagaggcaaaggaatgttagcatagcaaaaatgtgtttgaatgagttaaccttttaatcgcaaccctatgtgaataaaattactccactgtt

SEQ ID NO: 349460 - DNA, 150 bp, Homo Sapiens
atgagccaccatgcccggccttaaaatgccttcttaaagggaaaaatgccaactccatccttaatctaaggaaatctgattgtccaatagatctgttaatatgtaacatattaataggtacttgcctgtgtaaaatataagccatattta

SEQ ID NO: 349461 - DNA, 2327 bp, Homo Sapiens
  misc_feature (692)..(692): n is a, c, g, or t
  misc_feature (694)..(694): n is a, c, g, or t
  misc_feature (697)..(697): n is a, c, g, or t
  misc_feature (1112)..(1131): n is a, c, g, or t
  misc_feature (1216)..(1216): n is a, c, g, or t
  misc_feature (1219)..(1219): n is a, c, g, or t
  misc_feature (1225)..(1226): n is a, c, g, or t
tttgatgtaaaagaaatagttaccaatgctagctcgtgtggtcttccatgatttatttgtgttttgtgaattttcaatttatggtgatgatctgctgatatgcatttataaagtaagctctgttgtacagtctgtccaaatgggtcaaggttgcctttagaagcaaatagtgtgattttcaagacttcaaatacaaatttagtttaagtgtttgaacaactatatgcacttacggttgtgtgtttaaaatgtctctctctcaccctagcttcatgatgtgactcttaaaaaactataatagttaacaactgttagtaagatagaccaattctgattagactttatcagggaatctgtttaagatatgtttggtgaccaaaacgtatgtgtgaatgtagttataatgcttttgaaaaattttcctttttctatatccccttagtccagcctctcttctcagacatttagctatctgcctctttcctttagctgggaaagtgagagctggcatactatgcagtttttatgttttccatagtaagtcagaaaatgcctcctatttctggcatcagaactttgccatttgtctacagaagaccaaacagaagacaaaattactaagtataaattagtcaagtttatcagtctaaaaaacgaagggatgtgcaactgcagctctttaagaagttttntnttntagcttctagggtaaagataaattcagaaatgctctaagctaccagagttattctgaaagtatgggaactgctacaactaacaaacatttgtttccaagcctgtcattaagagtctgcatcaagagatttgtcctccttgggggaccactggatcattccagatttcttgtgatttttctattgtgtaattcttggtgggctctgtagtttaataataagaaaaaggccatttcattttaaattgtgacctataattctttgtcttgggttggtaattcaggattcatttggaaagtgggtaaaaggggcttcaaaaaacggatagaacaggattttctaggagttacacatacattttatcctgtcatacctcgagataaagtggcatgttagtgaggagttctgatattaagnnnnnnnnnnnnnnnnnnnnaatggacttctctgaagctgtgtttagtgaaatgagctcaagtacatgaatgttagttgttatcacatacagcaaattcctttcnccncctttnnctatgagcacactctgctgcttctaaactttacatgcctgatggcaccttactccagcagcctccaggtgctttcattttcacttccagtctaagccagtggctcctgccactgccctcccattacctagatggcacctcctttggtgaaaccacggccaatgttccttagctgcaccaggcccgaagctgttcccatgcttgagcttccatggggaggatgctgagtgagcagtttcctaccccgtggatctagcaagccatggagacaggtagcatttgtaagatgctgcacaggagcagcattatccccaaagatattacagggtagacacgttttaactgaaatcaatcaagataactttattcaaagagcagcccgctttgtgtgactaaaatgaaacaagacagttgaattgtgtgacttgaagattaccaatgattttgaggcttttctataataaaaagaggttctaaccattatttgggaacaaagagagttttcatcttttttcagatcaaaaccattctgtaaaatctttgttgtttaattaaatgtgccgttatttacccctgatgttatttatgactatgtgccgattcctgctcgggctgtttgctgttggctggtaataatatatttgatttaaatgctgttgactgtgctattaactgctgccgtcagtaaactccaaagatctttttgttttggctttagtatcatatgtgctttttctgtatcctgagcgctctatatgatcatgttaatttaaagctttatacacattgttgtttttgctggtctcatctttggtaatatgctataccccactgctgcccgacactgccctttagctgcagagctggattagctgttgaccatttgatgctgttgtctgtctggcagggactgaatgacctgatgtcagatttagattcttcctggggattacacagctatgaatgtatttgcttctaaaacctcccaaagtgaatctaatcttaaaactacaagttgtaagtattctgaaattgggaaacatttattttaaatgcaatcaggtagtgttgctttttacagcataataaatatatgtatcaa

SEQ ID NO: 349462 - DNA, 1266 bp, Homo Sapiens
  misc_feature (498)..(498): n is a, c, g, or t
accgtgtggtcttatctgtgtccagcgggggccagcatacagtcttattagtcaaggacaaagaacagagctgatgaagcctctgagggcctggcttctgtcctgcacaacctccctcacagaacagggaagcagtgacagctgcagatggcagcggtgcctctccccagccctgagcactgtgtcagttcctgccttttctcatcagcagaacagaatccttttcctcttttccttcctcctctttggaattttcctgggacctacagaataaagggggggatggacagggggttttcaaaaggaacatggctcactcagagctatatggttagacgtttcttccccttttccctaccttccatggtcctggttggccctggctttgcctactagaaaaccaaaacttcccccctgggggtttgtgcccactctctgagaagttggggctccatcaagcaccattctagtcatgtgcccctttcctgtccctaacangtccacaggcaaacaaatggtacagtcataagagccatctgtcacggacccacgcccagaggaacgtgcagaaaaaagcagagcaacatggctgtgggcaactataagccaaatatttggctcagaacaggtgtccatgggacaaaaaagaacgatcctccacttgaccaagaaaaaagtgattctcccagaagcacaaagcatactcttgcccctcaggtgttgcttgtgtacatcgtacccatccattcggcttcacctgcagccaacggcctggaatcgcaaagagacaccactctgggcagagcagagcagggtatggggtggggagagagggtggagggttttataaacaaacttaacagcaatattgaaaggaggtgggggattgagggagggacagagtgttggagggccagagactagtcctgagatggaaacagcaacttgtacagtggctgagaaaataggatatagttttgatttttttaattgtaaaatattttggagggagaacaaaatcttttaacattttgaataaatttagagttttataaaataggccacttgttttctacacattccctgctttttaagggagcacatattatgtgccaggcactgctgggaaagacagaataaactataaacctggtgttgaggctacaacttaagtgatgtcaagatgtcctgaggtgccaaccagctgtcagtgtgactgtaacaaaggcttcaaatctgtcaagaagtaaggaaaagttttgtttg

SEQ ID NO: 349463 - DNA, 497 bp, Homo Sapiens
ggcatagagctgacttggtagtggaccctctgtccacacccacccggccccttgcgcctttctagcataaagtggtgtgtcagagccactgtctccacagaaagcaccacgtttgtttcatttgacttatttgaacccgtttctcctgcctttgcctttttaaataaaaatagcaaaaattgattcaagtgaatctattagaattttctaaaatgaagcccatttgtcttttcagtcttgcaagtaaagtctttaaaacaattaagcctcccaatgatttaaccgtattttcttacccccccaccctgaataatatttacaaagaaataataacgtgaatttttaaaaaccccgtccttcagttgttataaatgatagttcattcttggtaagtatatctgtaacaaaatactggggaaggacatgaggtatggtgaacacttaaaattctgccagccagcttaaatacataatctaaatttaacccacgtaacacc

SEQ ID NO: 349464 - DNA, 513 bp, Homo Sapiens
  misc_feature (62)..(364): n is a, c, g, or t
ataatgtaccagatgcagaaatcatagactcatataagggtgggtttatttattaattaatnnnnnnnnnnnnnnnnnnnnnnnnnnnnnnnnnnnnnnnnnnnnnnnnnnnnnnnnnnnnnnnnnnnnnnnnnnnnnnnnnnnnnnnnnnnnnnnnnnnnnnnnnnnnnnnnnnnnnnnnnnnnnnnnnnnnnnnnnnnnnnnnnnnnnnnnnnnnnnnnnnnnnnnnnnnnnnnnnnnnnnnnnnnnnnnnnnnnnnnnnnnnnnnnnnnnnnnnnnnnnnnnnnnnnnnnnnnnnnnnnnnnnnnnnnnnnnnnnnnnnnnnnnnnnnnnnnnnnnnnnnnnnnnnnnnnnnnnnnnnnnnaagggtttacttttaaaatagcatgcatttgcacagtggtaagcttgtacactgaaactgtaaactatgtttcactgataaaaccataaactatgtttactgattgctgtagtcattagatataaaaaagctagtataacacttttatt

SEQ ID NO: 349465 - DNA, 983 bp, Homo Sapiens
aatacttacttccggaaaataatgctacttcttgtagatttttgcaaataggaaacccccttgaagaagatctcaaattacgccccccacccccaaaaaaagacaaacaggggagaacaaagttttggcatgcctgcaggaacggtggcttttttagaaactacctaggaggcagaagctaagtgatttgctcatgcctcttacctgggagtagaaggtgggaagaaatggaccgaggctgtgacgagaagacaaggcacagtgcagcttggtgaagccacacgctgactgcgttctgccccctcttcatgcagtgctgcgggctggtgcatcgccggcgagtacgggtgtcctatggttcggcagactcctacactagccgtccatccgattccgatgtatctctggaggaggaccgggaggcagtgcgcagagaagcggagcggcaggcccaggcacagttggaaaaagcaaagacaaagcccgttgcatttgcggttcggacaaatgtcagctacagtgcggcccatgaagatgatgttccagtgcctggcatggccatctcattcgaagcaaaagattatctgcatgtgaaggaaaaatttaacaatgacgggtggatagggcgatgggtaaaagaaggctgtgaaagcggattcattccaagcccagtgcaaactagaaaacatgaggctgcagcatgaacagagagccaagcaagggaaattctactccagtaaatcaggaggaaattcatcatccagtttgggtgacatagtacctagttccagaaaatcaacacctccatcatctgctatagacatagatgctactggcttagatgcagaagaaaatgatattccagcaaaacaccgctcccctaagcccagtgcaaacagtgtaacgtcaccccactccaaagagaaaagacatggcttctttaagaagacagagcacactcctccgtatgatgtggtacttcc

SEQ ID NO: 349466 - DNA, 867 bp, Homo Sapiens
  misc_feature (413)..(413): n is a, c, g, or t
gggtgtgtgtcccatggattggctggccagtcctgagagtctgcagggacagctgctggcttttggggactcgcagggcagcaaagctattagacctttatacacttgattttggtacttgggattgccgtggaccaaagaatccaacagaacctgcacttcctcctgggtctcttctgacttagactttgccacaaattctgctatggatcgtacaccatagctttcacaaatgagttccttgtatgtcctgccagagttcgcaataacctgaagtagtttgacagattccttcttggcctcctccttgatcttctctagcccaagtatttccaagagggttaggacacctccaacctcaagaaattctataaggtaccgattactgcttacagctgataagaagatgccantggacctgagaagcttttctaaacatgagtcagtcatataggtgattctaagcgaggtggtcaagcgtaccaggaacaaactggctccctgggaaaactcctgctccagttcaggggcagtcttgccttggttggtttcaatgaacttgtcgaggatgtgactccttgcgactttgccagcgttgtcccactcctgtaaaaaacttaagagcctgctaattgctgcctgctcctttatagaagtcatgatcaatcagtcctgaagttggctccagccctcgcagttgcggctggtagaggatggcagaggtaggtagacgatgcaagtcaaagggcacactcttccgccgcgtaggataggactctgttcggacgagtgaccctgcccattcccagaatacagcaactcttcagccgcctctcacctacatgagagggtggggactcctccgct

SEQ ID NO: 349467 - DNA, 1384 bp, Homo Sapiens
  misc_feature (1273)..(1273): n is a, c, g, or t
  misc_feature (1328)..(1328): n is a, c, g, or t
tgtaggtgagaggcggctgaagagttgctgtattctgggaatgggcaggtcactcgtccgaacagagtcctatcctacgcggcggaagagtgtgccctttgacttgcatcgtctacctacctctgccatcctctaccagccgcaactgcgagggctggagtgacataaccccgctgaagaaatataaaaaagcattcagtcacaaaagttcatggaaggaggcaacaggagatgaaagaattcaacaaatatttggaaggcagaaggcaggtgcagggaggctaaccggcttgaagcagaggaaattgcaagcaactgccaacaaggggagcttaccaacaagaaaccagtcaattcagccagtttgacctctaagaggcttaatgcttgaaagcacaaattaccactgaaggtcagaaatgaggttggtccgcagtcattcacctggttcttaaggccagctagatttcgtggttatctccatcctggaggctgcgtggacgcccttctggaagcacgcatcccatgtcctctggggagtagtagagccaacttcaggactgattgatcatgacttctataaaggagcaggcagcaattagcaggctcttaagttttttacaggagtgggacaacgctggcaaagtcgcaaggagtcacatcctcgacaagttcattgaaaccaaccaagggcaagactgcccctgaactggagcaggaagttttccccagcggagccagttttgttcctggtaacgctttgaccacctcgcttaaaatcaactatatgactgactcatgtttagaaaagcttctcaggtccattggcatcttcttatcagctgtaagcagtaatcggtaccttatagaatttcttgaggttggaggtgtcctaaccctcttggaaatacttgggctagagaagatcaaggaggaggccaagaaggaatctgtcaaactacttcaggttattgcgaactctggcaggacatacaaggaactcatttgtgaaagctatggtgtacgatccatagcagaatttttggcaaagtctaagtcagaagagacccaggagggagtgcaggttctgttggattctttggtccacggcaatccccaagtacaaaatcaagtgtataaaggtctaatagctttgctggcctgcgagtccccaaaagcccagcagctgtccctgcagactctcaggactgcccagccaatcattggggacacacaccccagcatcgtggactgcctgcctgaaagtgctggnacgaatgcacctgggaaagtccgtattgagccctcgagttgatcaaagacctggntcggttaccatgtgcgccaggcgctgcttcaggggcctcttgggcttgctgaaacc

SEQ ID NO: 349468 - DNA, 801 bp, Homo Sapiens
ttgtggagttcctttcatgtggatgcctggagataaaattgtgtcgagatatatatgtatttttaaatgtttgatctgcattgctagattgccatccagaaaagttaatcaatttgtattcacagcagcagtgtacaagagggctggttttctgaagataacatttttttcagtcctgttcagaggtttggtcaatcttacctgtagatgacttcagccaccaggctggatgggagcccacagacaaaaggacattggtgtatgttatggtgaaaaccatcagtaccatgcctagctcaagaatgtgaaattgaacctgaaaaaaactttgaacctacaattttatgttctgaaaatagttattctaatgtgagggcattaataagaatatgtaccatcaaagcatcagaagattttccatacaaactaaaatcacttttggagaaagtacctaaataaaaagagaaacaaatccaggagatactgtacggtttgaaagaaaggtaatcaaatactcagaaaaagtttgttgatgacttaaaaaggataaataaaaagtaagactaaagaaaatcagtatacccattaataataaatctttagtaatctataaggggaagaatgcttttcaaccttatacactagaagcatgctctttaaaattaatgcaacaggatgacgacttgatgtagaaactatatgtggaattatagattaaaatgtgattgaaacatatttagaaaatgtgattatcttcctgatcctactccctttaggaagaacttcttaaactggaagcag

SEQ ID NO: 349469 - DNA, 1434 bp, Homo Sapiens
  misc_feature (855)..(901): n is a, c, g, or t
  misc_feature (919)..(1031): n is a, c, g, or t
cgggggcccagccccacctgctgaggccgatttgcactcggggagcagcaatgatctgttcacaaccgagatgagatatggtgaggagccggaagaggaaccgaaagtgaaaacccagtggccgaggtctgcagatgagcctgggctatacatggcgcagacagtgcacggcgtgtgggaggagtgggggtcctggagcctgtgctcccgcagctgcgggcgggggtcccggagccggatgcggacctgcgtgcccccccagcacggcggcaaggcctgcgagggtcctgagctgcagactaagctctgcagtatggctgcctgcccggtggaaggccagtggttagaatggggtccctggggcccatgctccacgtcctgtgccaatgggacccaacagcgcagccggaagtgcagcgtggcgggcccagcctgggccacatgcacgggtgccctcactgacacccgggagtgcagcaacctcgagtgcccggccactgatagcaagtgggggccatggaatgcgtggagcctgtgctctaagacgtgtgacacaggctggcagcgccgcttccgcatgtgccaggccacgggcacgcagggctacccctgcgagggcaccggagaggaggtgaagccttgtagtgagaagaggtgtccagccttccatgagatgtgcagggatgagtacgtgatgctgatgacgtggaagaatgcagctgctggcgagatcatctacaacaagtgccccccgaatgccctcagggtctgttagccgccgctgtctcctcagtgcccaaagcgcgcgcgcactgtggcccgcccattctttccccgctccctttcccattccgnnnnnnnnnnnnnnnnnnnnnnnnnnnnnnnnnnnnnnnnnnnnnnngctacaatgaaatgaatnnnnnnnnnnnnnnnnnnnnnnnnnnnnnnnnnnnnnnnnnnnnnnnnnnnnnnnnnnnnnnnnnnnnnnnnnnnnnnnnnnnnnnnnnnnnnnnnnnnnnnnnnnnnnnnnntctttcccaatccacatactccgcgaaataatttagtcgcccggtatcgaccgccataccgtgacgcgcgccgcaagctatgtgctgcccgcaccccctagctccttcaattaaccccgccgctctcgtctatctcccccccattcttccgctgtccccaccacacgcacatctcgcggtgcactcacgccgcccacctgcctcctcacattttctcccgccgccccccttctgatcgcctttccaccccggttcttgccctaacgcccgctaccgccccttatcccgatggctcccccgaaatatccgcctggtactcattatccgccatagcctccctccgcttattcccccgcccccttcctcctcccgttgaactgtcgtcccgtattcccactctgat

SEQ ID NO: 349470 - DNA, 554 bp, Homo Sapiens
gggatcctttcataggagaacacactgaggagatacttgaagaatttggattcagccgcgaagagatttatcagcttaactcagataaaatcattgaaagtaataaggtaaaagctagtctctaacttccaggcccacggctcaagtgaatttgaatactgcatttacagtgtagagtaacacataacattgtatgccatggaaacatggaggaacagtattacagtgtcctaccactctaatcaagaaaagaattacagactctgattcctacagtgatgattgaattctaaaaatggttatcattagggcttttgatttataaaactttgggtacttatactaaattatggtagttattctgccttcccagtttgcttgatatatttgttgatattaagattcttgacttatattttgaatgggttctagtgaaaaaggaatgatatattcttgaagacatcgatatacatttatttacactcttgattctacaatgtagaaaatgaggaaatgccacaaattgtatggtgataaaagtcacgtgaaagcag

SEQ ID NO: 349471 - DNA, 418 bp, Homo Sapiens
gatctatgtatacatgtacttagtatgtgtggtatcaggatattttttaaactgtgataatacaacagatagctttgaatgatctgccataacatgtggcaacaatagttcatttctcataacatatatgaggtatacaaaattttctaactccagattgtagtcattttgagaggtacaaagctcataattaccatgacaacatggtaatgtccatagacatttgtatctgaatccacaagaagatctgaatctaagaaggaattacctttgacaatatttttcggtaagaagtaaaacctctggagacctatctttaagatctctaattggaattataaattatttttggattgctgagctgaatcttaaaaagccaagttgatatacatagtcatttttcctctatggtagaagt

SEQ ID NO: 349472 - DNA, 1723 bp, Homo Sapiens
  misc_feature (951)..(992): n is a, c, g, or t
  misc_feature (1579)..(1579): n is a, c, g, or t
  misc_feature (1597)..(1597): n is a, c, g, or t
  misc_feature (1622)..(1622): n is a, c, g, or t
gtgcgacaaatctggcgctgtccccttcagcaccacgcggagtccgcgccgcccctccccgcgctcagctgggcccagcctctcctctgtctctcctcggtctcagctctgggcgagcagcggcctgtctgaagagcatgcagcccccttactccccgcctggcctcgccatcccaaaacccccaacctgacccccggccccagcatggcccagggtcccatgcgcttctgctcggaaggcgactgtgccatctccccaccacgatgcccacgccgctggctccccgaaggcccggtgccccagagccccccagccagcatgtatggcagcacaggctccttgcttacggcgcagtggcaggtccaggtcctcgaggccgggaactgggacgtgtgacagcaccctgtacacctctgcgtggccccccctcaccccgtgttgctccctcaccctgggcaccctcttcacccactgggcagcccccacccggggcccagagctctgtggtcatcttccgctttgtggagaaggccagtgtgaggccactgaatgggctacctgctccagggggcttgagtcggagctgggatctgggtggggtttctcctcccaggcccaccccagcccttgggcctggctccaaccggaagttacggctggaagcatccacatcagacccactccccgccagaggaggctcggccctacctggcagccggaaccttgtacatgggccgccagccccaccccaggttggagcagatggcctttactcctctctccccaatgggctggggggccccctgagcgcctggccacactcttcggaggacctgctgacactggattcctgaaccaggggggatacctggtcctcccccggggaagtctcctctcatgcccagagaatcgctagagccaaatgggaattcttctatggctccttggannnnnnnnnnnnnnnnnnnnnnnnnnnnnnnnnnnnnnnnnnatctccacctggggtgggctcaaggcagggctctggggtggctgtggggcgagcagccaagtattccgagacagacctggacacggtgcccctgaggtgctaccgcgagactgacatcgatgaggtgctggctgagcgggaggaggccgactcggccatcgaaagtcagcccagctctgagggcccaccaggcactgcctacccacctgccccacggcccggcccactccctggccctcatcccagcctcggcagtggcaatgaggatgaggacgacgatgaggcaggtggggaagaagatgtggacgacgaggtgtttgaggcctctgaaggggcccggccagggagccggatgcctctcaagtcacctgtgccctttctacctgggacgagcccctcggctgatgggcctgactctttcagttgtgtgttcgaagccatcctggagtcacaccgggccaaaggcacctcctataccagcctcgcctcgctggaggccttggcctcacctggcccaacccagagccccttcttcacctttgaggctgctgcccaaccccctgcacccccggccgacccaccagctnccggcccacttggccctntttgaaccggattactggaaccagnctctgctgactgatgggaccttggacacacaagaggggcaggtaggagggaggcaataggcccaaatccaagtcttgcccctcagtgaggggaggccccct

SEQ ID NO: 349473 - DNA, 864 bp, Homo Sapiens
  misc_feature (156)..(196): n is a, c, g, or t
cctcggatgcaagtgtcaagatgtagttggattttacacacagggaaatctaaggaaggtgtggaaaccagaccaggactccagactctggtctccctgtttacagggtcttaaatggcggagccactttgggttctatccacaagactgcttcgnnnnnnnnnnnnnnnnnnnnnnnnnnnnnnnnnnnnnnnnncagccctgacctaaatattcacaaggtaccttaggcaatatctgcaaacaaaagtgaatgatgagtggaatctctcatctttacaactaagacagctccagagttgaagcaagtggaaatatctctagagacagagacttgggcaggttttgccagttacaaactaggagaacctgggcaggtttacctctctgagcttctgtgaccttgtaaaataggctgcatcgcactaaacgtgcaggaggaatcccagcatcctcctgtgcacaaggctggtttcttcccatccttttccttgttctgcctctctcctcctctccaagagatgaatgcatttggacccagtaggggcctatgtttgcaaaagctctcaggtgattctaatgcaggcagcctggctctggcagtgagttcttggacacttctagaggcacatttactagtgaggaaggtcactgtgtgctgaaggcatgactcatcttccattcctttcttccatgaagcaaggcgcatgggtcgactgagctgggagagtccacagtgtcaggctcccccacgcttccctccctccttattccttgtgtgctgtactttgtcttgatttcctgtactctgcgacaagccaggagatggtaagatctcaaaacaatcatttttgtgggaaatgg

SEQ ID NO: 349474 - DNA, 498 bp, Homo Sapiens
  misc_feature (170)..(210): n is a, c, g, or t
agctcggtaccctctggatgcaagtgtcaagattattgttggattttacacacagggaaatctaaggaaagtgtggaaaccagaccaggactccagactctggtctccctgtttacagagtcttaaaatggcggagccactttgggttctatccacaagattgctttgtnnnnnnnnnnnnnnnnnnnnnnnnnnnnnnnnnnnnnnnnnagccctgacctaaatattcacaaggtaccttaggcaatatctgcaaacaaaagtgaatgatgagtggaatctctcatctttacaactaagacagctccagagttgaagcaagtggaaatatctctagacagagatttgggcaggttttgccagttacaaactatgagaacctgggcaggtttacctctctgagcttctgtgaccttgtaaaataggctgcattgcactaaacgtgcaggaggaatcccaggatcctcctgtgcacagggctggtttcttcccatcctt

SEQ ID NO: 349475 - DNA, 672 bp, Homo Sapiens
cggacgcgtggggaaaatgagttaaagttacaaggaagctgattttggcatccataagaaaaatgggcacaacgatcgttgctttttgcgtggattgccacaagaatgttttcggattcacagatgtttaatactacacatcactttctccttctcctacttttcccataggttttcattcaacagatatctgttgattatcttgtggtggttcaagatgtgtccatctgcattttagctgggcatatgcccaaacagcatagatttcaagctgtcacaacccaccatgggacagatacttcttaaagtgtgtgtgggttgcgttactgggacccccaattgccacaccgctagcatttgtccacttgtaaagattttcttacttgtcttccttgttgaatcaggaagtggacttttacatggtgcatgcagtttttgatgcgcttcctctccctgctccctggaggtgccgcatggaaagcgcttttccctggacgttcagctccctctccactccttgtctctgtgcatcctgcatcttggcatctccccccgtgacatttattcctgtgaatctgaaaacttcctgtatgttttgtggctacattcgtattccagttgctagagcagaggggagcgggtgctgccatgtgaactttggtgttgaaagag

SEQ ID NO: 349476 - DNA, 2086 bp, Homo Sapiens
  misc_feature (488)..(506): n is a, c, g, or t
  misc_feature (1313)..(1313): n is a, c, g, or t
cctcgtcacacttcgtgccagatgaaacagagcacttcggaagacagcctaaacgcaacagagcgggaacaggaggaaaatatacagacttgtacaaaagccattgcctctctccggattgccacggaagaggcagctctgctcgggccagatcagccagcgcgggtgcaggagccccaccagaaccccctgggaagtgcacatgttagcattagacactttagtagacctgagccaggtcagccctgtacctcagccacccaccctgacttgcatgatggtgaaaaggacaattttggtacatcacagactccattagctcactccacgttttacagcaagagttgtgtggatgacaagcagttggactttcacagcagcaaggaattatcttcaagcacagagggaaagcaaagatccttcatcagaaaagagtcagctacattgatctatgatgcatggagactttcatttccacattttcccannnnnnnnnnnnnnnnnnnctagaaatggaggtaatccagtttatagcatgcctgtcctaagttacagtagtttgctattatatatacttttgttatatcaaaagaattaggtaaattaacaagtcatcatgagcctgaccaaaacaaaatttgaaattaacctattgggtctggtacttttaaaattgtacagatgtttgtgccttttctttactttgcttatattcttataagcattttttagcagtaatttgtacatattttagaatttgtgtatctgctttgtaataaatgtaatttctttccttttttggacacttggatctaaatgatgtaaagcaaaacagcatcaatatatatgtgaggttgcactaaaacatatttttatatgattaaaactgaacagcttttatgtacagctctgattctgtaatactaatatttatttactttgtttcataaattgtacattttttcttaatgttgtggattgcttttctatgtgaagcatgggatttactgttgcgtaactagaacaaaaatgtacattgtaaacaagatatttaaactagagtatcttattctgcacttatgcattagttaaaaaaagataaaggatgtatcagtcagttcttaactcttgtatatttttttgtctcttgtttgctggattgactataacttaagtgctgattgtgattttaaaatgatagtaccgtaaagcattaaagtaaacaatgtgctattgtgagttttttcaaagctttataaatcagttataaataatattaaaagtatttggtcttatgtgaacatgttgatctntatactcatctaaaaatatgggaaaacattccaccccatgtaaatatgtacaagtgcatcactggtacaattttatgtaactcagttggacactaggttgccacagacctatgctaggtgtctttaaaaaattaaggtgacaaagcacatgggactgtgtagagcttggttatcggccggcccggtggcttggcaggcagtgctgtgcgctgctcatggagaagacctgggcttagcaatctccttagttcttgctacacaggatggtgactggaactaaggctacacagagggtcgcacttggactctgagggttgggtgtggaagggggaaaaggggatggagacctgctccccagctcttcctgtcagccggtttacatgggaacagggttaacatctgtgttaggggaggtcaccttaccctttttcataggggaagagtgtcacactcctggctatctcagggggaatggggaaaagaatctttcaagggcaaagaactcgtgggaggatgtctgttgtatgtaatactcacaatggcttttggttagtgttgaaggtgggaagagcatttgtaggtccagaagagtgaaagagagggaggggtgcagcaacatgtgcacaggcacgcaacattgtgcacgcacacatacaatctgggttatctttgtgctatatagtggattataattctgtgaaaccaagtttgtatattgaattacattaaggagtgttctttaaaaagagaaataaatatacaattacatgctt

SEQ ID NO: 349477 - DNA, 495 bp, Homo Sapiens
cactggaacccctaaggttgggtgtggaaagggggaaaaaagggatggaaaaccccgctccccccacctcctccccgtcaaccggtttaacatgggaaacagggttaaccacctgtgttaaggggaaggtccacccctacccctttttccataggggaagagtgtccacactccccggctatcctcagggggaatggggaaaagaatccttccaagggcaaagaactcgtgggaggatgtctgttgtatgtaatactcacaatggcttttggttagtgttgaaggtgggaagagcatttgtaggtccagaagagtgaaagagagggaggggtgcagcaacatgtgcacaggcacgcaacattggcacgcacacatacaatctgggttatctttgtgctatatagtggattataattctgtgaaaccaagtttgtatattgaattacattaaggagtgttctttaaaaagagaaataaatatacaattacatgctt

SEQ ID NO: 349478 - DNA, 1320 bp, Homo Sapiens
  misc_feature (538)..(597): n is a, c, g, or t
aatgggtgtgtggtattattactatgggatacattattaatgtttgtgtgaatctcttttgggcggtcttttcatctgttggtcttgtccttgtttgtctcgtccttcttcattgtgaatatagtatatcctatccccgcttgatggatgacctgtcgaatacctttgcatttagggtaggtccatttccagtaccgtaatcagtctctagggcaggtggtaatggaaccctgagtggggagcggtgccccctaacacctcaggcacaagatgctgacatgtggggcttccctcaggctcacttggtgtggaggggccgagccccaccctggtgatgtcccgtgtgcaaaggcagagccggagccatgtcgggcccagctccctgccccacggggggtaccccaccgggtgggcccacttacattctgcactgggtccccccagaacaaaggcccctcggtgctgcagcaccagtcaggagaccgttgcacagcacggggacacccagggtacctctgcacctggaggcaagatgcgnnnnnnnnnnnnnnnnnnnnnnnnnnnnnnnnnnnnnnnnnnnnnnnnnnnnnnnnnnnngaccaaagctctgtgtagctgtctctccatctgcactgagtctcatgccggggagtggctgtgcaccagcagcagggtgggctgctagggacccctcacattgttggggaccagtggcccttcacgtccgcgagcccccactgctgggtgggcacgggggcagcaggtcgtgggcaaacacggagtcgtcccctgaggagctggagctgggggtgtcctaggccacccggggagtactgctcgaaaggcgccgacaggtccaggtactcgtcggtggacgtcacggtaaggacacggtccaggtcctccaccagctgcttaaaggtgggcctctgggagggcgcggcatgccagcactcccgcatgatcatgtacaggtcgtgtgtgcagttggcgggcttgtccatgcggtggcccaccttcagcagcttgaagagctcctccacagggatgccggggtacggggagccccccagcgtgaagatctcccagagcaggaccccaaaggaccagacgtcactctggtgagtgtagactcggtcaaacaaggcctcaggcgccatccacttcacgggcagccggccgttggttgtcttcttgtagtagtcgaggttgtgcacgtcccgggccagcccgaagtctgcgatcttcatcacgttgtcctcggtcaccagcacattgcgggcagccaggtccctgtggatgcacttctgggaggccaag

SEQ ID NO: 349479 - DNA, 1491 bp, Homo Sapiens
  misc_feature (1400)..(1412): n is a, c, g, or t
tgcagtcttcggtggctgtcggagtgggtgaaggcggggtacaaggagcctggcatcgcccgctgcagtagccctgagcccatggctgacaggctcctgctcaccaccccaacccaccgcttccagtgcaaagggccagtggacatcaacattgtggccaaatgcaatgcctgcctctccagcccgtgcaagaataacgggacatgcacccaggaccctgtggagctgtaccgctgtgcctgcccctacagctacaagggcaaggactgcactgtgcccatcaacacctgcatccagaacccctgtcagcatggaggcacctgccacctgagtgacagccacaaggatgggttcagctgctcctgccctctgggctttgaggggcagcggtgtgagatcaacccagatgactgtgaggacaacgactgcgaaaacaatgccacctgcgtggacgggatcaacaactacgtgtgtatctgtccgcctaactacacaggtgagctatgcgacgaggtgattgaccactgtgtgcctgagctgaacctctgtcagcatgaggccaagtgcatccccctggacaaaggattcagctgcgagtgtgtccctggctacagcgggaagctctgtgagacagacaatgatgactgtgtggcccacaagtgccgccacggggcccagtgcgtggacacaatcaatggctacacatgcacctgcccccagggcttcagtggacccttctgtgaacaccccccacccatggtcctactgcagaccagcccatgcgaccagtacgagtgccagaacggggcccagtgcatcgtggtgcagcaggagcccacctgccgctgcccaccaggcttcgccggccccagatgcgagaagctcatcactgtcaacttcgtgggcaaagactcctacgtggaactggcctccgccaaggtccgaccccaggccaacatctccctgcaggtggccactgacaaggacaacggcatccttctctacaaaggagacaatgaccccctggcactggagctgtaccagggccacgtgcggctggtctatgacagcctgagttcccctccaacccagtgtacagtgtggagaacgtgaatgatgggcagtttcccagtggtgcagctgttgaccctaaaccagaccctgaaccctagtagggggaccaagggaactcccaaagaagcctgggggaaacttcccaaaaccagccagccagggggggattaaacaagccccttctaaccttggagggattccccacccttccccgggccttttccccctttgcgcccagggcacggaacccggccctaggcgggtttccccgggatgcttccctggagggggcccattcaccaccaacttgccagaaatttcaaggnnnnnnnnnnnnnagatcccctggggggggttcaccgagctggtcaaacccttgcccccggtgaaaaccacagcccggggccccatcccggg

SEQ ID NO: 349480 - DNA, 1129 bp, Homo Sapiens
  misc_feature (15)..(15): n is a, c, g, or t
  misc_feature (91)..(91): n is a, c, g, or t
cacaggctacactgncacctccaccacagcatgttgcaaacgaacacgagcatgcgtagacagatgcatgtggggctgcagattccagtgnttccttaagaaactggagttgctcatcccactcagcagacaatcccgctcagtgacagcctatgaaacgcatgggccatcatgcagaccaaagaggcccgtgagttttgtaagatcctgcctgtcctggtgactcatatctgctttcaggaagtgctttctgacacagcaaactgactatcagtagacaagggccctagaccctagcatgtggtttctgtcccgtggagcctctgacaacagagctcaccgggacagaaccatatgtgggccaaaggaacattccaggaaaccagctctgctccagcccaaaccaggcagctccacgccaggtgaggggcgagtcatggggttcctgtgtttgccacggtgagcatggctccccacgcactctccctcagagcagacaagtaggctgaccacagagctacaaagtcacctgcgtttcactaaaccaagcgaatgtctctttcccctctcctcccccgccgcccccaattacatttttaagcaaacaagcaggattctggctttgatgctcgttcttgacatcggtcactcttgctaccaaaacagggacacagggtggagggtgagcacctctccccaacacaggataaaactcatctccggtgcagaaatgattgctaaagacctttctcatgtcaacccgaaggccacacccagccccctatggaatcagatgggaaacaggcctacgaattgcttcatacttatccggaagattcctaagctctcaaggcaggactatcacgagatgcatgtttgtacttaaatcactgaaagcctccgcttggaccggctctccggaagcccagcaacataaaacctgggatggggaagactgaagtgaaaccatcatcctgggtgctgcgtgtgtgtggtgttacttggtgctgaccggtttcgctccttgcaggggctccaagtgggtgcaggctgagccccccacctgcagctccttgaggccaccctcgtgccgaattcgacacccaggcctcgtaccttagaccgtata

SEQ ID NO: 349481 - DNA, 1839 bp, Homo Sapiens
tgcagaggcggcggggctcctcctcccgctcctcctcggcctccccttcgggcgctctcgcgctaactgtgctcctccgggggaggagaggggaaagagacattcgcttggtttagtgaaacgcaggtgactttgtagctctgtggtcagcctacttgtctgctctgagggagagtgcgtggggagccatgctcaccgtggcaaacacaggaaccccatgactcgcccctcacctggcgtggagctgcctggtttgggctggagcagagctggtttcctggaatgttcctttggcccacatatggttctgtcccggtgagctctgttgtcagaggctcacgggacagaaccacatgctagggtctagggcccctgtctactgatagtcagtttgctgtgtcagaaagcacttctgaaagcagatatgagtcaccagacaggcaggatcttacaaaactcacgggcctctttggtctgcatgatggccccatgcgtttcataggctgtccactgagcgggattgtctgctgagtgggatgagccaactccagtttcttaaggaaaccactggaatctgcagcccccacatgcatctgtctaacgcatgcctcgtgttcgttttgcaaacatgcctgtggtggagggtggtcagttgtagccctgtgcgtctcaaggctgccttgtgaggccattcccagtgcgtgcccttgagctccttaccaccccttttcctgctcggccctttaatccctgacagacctggactgtgtggctgaagggggacctgcagcactgcagaaatgcctctgcgtggtgccatgaaggaaagaaaccttggcctggtctcgagaagcttcccatgcttcaggaagttagtaagggtggggtggcttgcaggattggcctgtttccagggcctcccacactcattggccagattgtgaactttgtcaggcttgtccctccctgataccaagtatgtcgagaaccgatggccccaccctctggctggtgctgggccggaggtggctatggaggattttggcatgcgtggcctgtcgccacctggacagcgtgacctcaggggttgtccactttacctttatggtgaggcctgtcggatggctaagtccttgaaaccctagagctgtgacgtagaatatgtgctgtctgtgagaccgtgttcccaggagcactgactgcagttgagagagacccattttgctctcccttaccgccccccgccccgggtgctttctgcacaaagcctagagcctggcactcaagcccaccggtggcagctcctagtgactggacatgcctggaagacccctcagccttctgtttgcagaacgttcatttcaggagcttctccttcccacagacatcttacacttgctcgacactgccacctgcagaagcctggcgggctctggtcaccatgtgtctatctgaaggttgcactggccagcatgggcctgtcccaagcgagaggggagacacagtggactgaaaggactggttgaaagtggccaatctctatcagcttaatttggcagagaaaatttgtaacaactctgagcacatgctgggtgaagtcacagctcaaggaaagataaagctgggcggaaggaggtgtgcgtggcttctggggtgggacccagaggggaggctctgggacaggggctggggttcagtgccagggccctgaggaagaaatggggactgatctcaaaattccagaattccctgtacatctgttcacgtgcttgtgtccaggtgtgacttgtaaactgtctagtgtttgcattaaataaaatggcaccgagcagaaaaaaa

SEQ ID NO: 349482 - DNA, 848 bp, Homo Sapiens
tggagtatttcacttggggttcctcacataccccggcttccaggttctctcccttcacgtagtctgcgttgagaccctcttgacctgctgctgcatgctgaatgctgaacgcagaacttctttctgcttggtaggagatgtagctggagacggcaccgatgagggccatggccagggcgctggccaccccggcaatggtgccaggctctgccaccatgccagatccagggtcgtcattgctgccgtaccggccatcacctttacccttgtcaggtttgtattctccaccccctactatgtcttcaagatccttgtctgaaaacctcctcctccagcaattggtttcctgcggccatcatctcgatcatttcgatcatccagggcatcagccaagtcaaaatcatttcctaaagtatttgctggagctctggtggttactggcctcttggtcgtggtggttacatggttccatctctctcttcctcctatacccggtttcctgcggccatcatcttgatcatccaaagcatcagccaagtccaatccactacctggaggttttgccggagctctggtggttcctggcctattggttgtggtggtggtggtgtggtcccatggctgctttactgaggaagtttctttcactgcatcctccaggttaaaatcatcaaagtccccagatcctcgctggaccagggtggccaaggagaaagcgaggcagacaaggaacgccgagcgccaggccaccatggctgggagcaggcggagggccccggaggagcacagttagcgcgagagcgcccgaaggggaggccgaggaggagcgggaggaggagccccccgct

SEQ ID NO: 349483 - DNA, 1311 bp, Homo Sapiens
tctcgcgctaactgtgctcctccggggcctccgcctgctcccagccatggtggccttggcgctcggctgttccttgtctgcctcgctttctccttggccaccctggtccagcgaggatctggggactttgatgattttaacctggaggatgcatgtgaaagaaacttcctcagtaaagcagccatgggaccacaccacaccaccacaaccaataggccaggaaccaccagatgctccggcaaaacctccaggtagtggattggacttggctgatgctttgtgatgatcaatgatgatggccgcaggaaaccgggtataggaggaagagagagatggaaccatgtaaccaccacgaccaagaggccagtaaccaccagagctccagcaaatactttaggaaatgattttgacttggctgatgccctggatgatcgaaatgatcgagatgatggccgcaggaaaccaattgctggaggaggaggtttttcagacaaggatcttgaagacatagtagggggtggagaatacaaacctgacaagggtaaaggtgatggccggtacggcagcaatgacgaccctggatctggcatggtggcagagcctggcaccattgccggggtggccagcgccctggccatggccctcatcggtgccgtctccagctacatctcctaccagcagaagaagttctgcttcagcattcagcagggtctcaacgcagactacgtgaagggagagaacctggaagccgtggtatgtgaggaaccccaagtgaaatactccacgttgcacacgcagtctgcagagccgccgccgccgcccgaaccagcccggatctgagggccctgtccagctgcaggcatgcacaatggtgccaccgcttgtcacccggctccccccaccccttcatttggaaccacagctgctgtgctgctctgtgccatcggctccttgttggtctgagtttcccggatgagctctgggtgtttgtgagtttggttcctctgccctgccccaagcgtgctgagacttggtgccgaaattcaagagccagctctgatagaaagccagcacccagcctcgggaagctgcttgagccaccaactcccaaagccagcctgccttccagctttactgagcacaggatgcgggggccaagatgatgctgaggcctgatgacatttatgcttaggggacaagagtttgaactcaagggactgtgactcctgcacactggagtggctcattgtggcaggtttctgccaatagacagctcctgacagtgcctcaaggagccagagcctatgtgta

SEQ ID NO: 349484 - DNA, 828 bp, Homo Sapiens
agctatgtgctaggtacgaggcccggtgttatatcggcacgaggcttggtttagtgaagatcgcaggtgactttgtagctctgtggtcaagcctacttgtctgctctgagggagagtgcgtggggagccatgctcaccgtggcaaacacaggaaccccatgactcgcccctcacctggcgtggagctgcctggtttgggctggagcagagctggtttcctggaatgttcctttggcccacatatggttctgtcccggtgagctctgttgtcagaggctcacgggacagaaccacatgctagggtctagggcccctgtctactgatagtcagtttgctgtgtcagaaagcacttctgaaagcagatatgagtcaccagacaggcaggatcttacaaaactcacgggcctctttggtctgcatgatggccccatgcgtttcataggctgtccactgagcgggattgtctgctgagtgggatgagccaactccagtttcttaaggaaaccactggaatctgcagcccccacatgcatctgtactaacgcatgcctcgtgttcgttttgcaaacatgcctgtggtggagggtggtcagttgtagccctgtgctgtctcaaggcttgccttgtgaaggcaattcccagtgcgtgcacttgagctcctttacaaccctttcctgctcggccctttaatccctgacaggactggactgggtggctgaagggggactggcgactgcagaattgctctggtggtgcatgagaaagaacttggcctggctgaaagtaccatggtcaggagtagagggggtgctgggttgcggtccgcc

SEQ ID NO: 349485 - DNA, 1319 bp, Homo Sapiens
  misc_feature (964)..(1080): n is a, c, g, or t
  misc_feature (1086)..(1094): n is a, c, g, or t
ggtacccaatactctgttaaggaaggacaaggatgttgctcgactccaagatttccaggagctggaactggttctgatgataagtgaaaataattttctgttcagaaatgctgcatccacactgactgaaaggccttgctataacaggagagcttcaaaactgacttactaatgcagcagggacttttatcactgagtattatgacagtgtgcatcacctctgggccaaggacaagccattgatctaaatgcctcagatgcccgggagggcctctggtgccactgcatagtatatactaacatcattctgccaaggtaggaagcccctgacccccaagcagtggtgccactcttccaagcctcttggtgcacagtaaacctattgcttgaagctttgaacagctgagaagtggtctggagaggcagaagctgaaggttctatatccagtgtgttttatgtccagaatgtaagagagttgtctaagcagcagctgagagagagcggagcctatttctagccactcctgttgacagtgcacctgaagggctgggatgcgtttttcttggtgttgcatgctcacaactctgctgacattgggaacttatgagagaggaagactcgggaaagcacagatactggacagatggattctggtgtggggaaagcacagatactggacagatggattctagtgtgacttgtgactgtgaggtttcctataacatatttataaatgttactcaggttaaaagtatttaagaatacagttaactaattgtaaatatgctgttaaccaaaagagctttccctccctcactttttcctttgtaaacactcatgactgcttctctgtctcgagtcatctctgcattaactccccttcgtggtcactagagggctctctgatgccttctaaaagaacaactgcttttttacaatgcccaccacccccaccccgcccannnnnnnnnnnnnnnnnnnnnnnnnnnnnnnnnnnnnnnnnnnnnnnnnnnnnnnnnnnnnnnnnnnnnnnnnnnnnnnnnnnnnnnnnnnnnnnnnnnnnnnnnnnnnnnnnnnnncccacnnnnnnnnnactctgaagtgattccagtcatatgtgtgtgtaactgcatcctatgagaagagcacaaatattgctgttccatgttctccactttcattttccactacaaatgaaaagcaatttttgagactgaatctgttgctattttaaaggttattgtgggaaactgtagctaaaggtagttagcatctttatttttgtatcaaaaataaaggttattttaagattattagg

SEQ ID NO: 349486 - DNA, 1449 bp, Homo Sapiens
  misc_feature (114)..(114): n is a, c, g, or t
  misc_feature (129)..(129): n is a, c, g, or t
  misc_feature (168)..(168): n is a, c, g, or t
  misc_feature (253)..(290): n is a, c, g, or t
  misc_feature (556)..(573): n is a, c, g, or t
  misc_feature (1222)..(1263): n is a, c, g, or t
  misc_feature (1367)..(1367): n is a, c, g, or t
  misc_feature (1378)..(1378): n is a, c, g, or t
  misc_feature (1414)..(1414): n is a, c, g, or t
  misc_feature (1422)..(1422): n is a, c, g, or t
atagttgtagttttgatttaaaggggggaaacaagttgacatttgtcatttgtggctttctttcttatcatcatggcacagattctgtacatgtattaacaatgcagtttgctncatgcctggaaactncaagatggggagggagggggcgggtcttgctcgaatgtnctcactcactatcttgtctctcatacacatatccatctgcagaccatggtccctaaacctgcagtttcttctgctggtgcagggnnnnnnnnnnnnnnnnnnnnnnnnnnnnnnnnnnnnnntccataccatttccattcaactcaatctgcttagttcgggtttgatccatttttctcctctccatagttctaccacccttcactgctagtgtacagctcacagcatctctcctaccaccctgggaaaagtcacattctaggctggattctactgaagtagaggcctggtggtttaacagccgaagacacacgcctagggatgagcaccctctttgtgacacttcatcctgatgccaagattttttggagaacatctgcactttctnnnnnnnnnnnnnnnnnntaaaaaaagcaactgggtatatatcactaacagctttgtaggaagcacttttaatgttttctctctcacacacaaagattcaaaagaaatgtgcatatatttattctgtaatttcagtgattataaattgtaaaggtaatgtttaatcattgtatagtgattatgcctctggtatagctttcctaataaaaagtttttgaaaaacataatacattatatatagaggatacaaagcttgaaccttaaactccagctatgccatgcctttcgtgcttccattttagaaatgatttcttttacttgttacacagaaagtaatttattaacgggtttgatgcactgtgatgttgataaatcttatatcccaccatctctagtccaaaccaggatacaattgagacttaaaatgtgacttacggtttacttttttttccttgaattatgaatttcagtcttagtaaccagtgatgcactgtttcccaggcaagatgcaagggggagaaaataaagtaactagatcgctaagaagtacaggattaattaggagaagataatctaggatccatacatcttaagataataaatgagataaagaaattggaaaggaaaattgctattggttttaaaatatgtagtccaattacatggnnnnnnnnnnnnnnnnnnnnnnnnnnnnnnnnnnnnnnnnnnacccaataaattttcaaagggccgtgggagccaatttaggatgggccagattcctgtggaaaggctgttcacttatattttgggttaccctttttcccaaccanttacaggcaantggggcccccattaacggtttggaactaaggtcagnggggtggntggattggagttttttcgttcatttgg

SEQ ID NO: 349487 - DNA, 1928 bp, Homo Sapiens
agggatctgaaacttgcccacccttcgggatattgcaggacgctgcatcatgagcgacagtaaatgtgacagtcagttttatagtgtgcaagtggcagactcaaccttcactgtcctaaaacgttaccagcagctgaaaccaattggctctggggcccaagggattgtttgtgctgcatttgatacagttcttgggataaatgttgcagtcaagaaactaagccgtccttttcagaaccaaactcatgcaaagagagcttatcgtgaacttgtcctcttaaaatgtgtcaatcataaaaatataattagtttgttaaatgtgtttacaccacaaaaaactctagaagaatttcaagatgtgtatttggttatggaattaatggatgctaacttatgtcaggttattcacatggagctggatcatgaaagaatgtcctaccttctttaccagatgctttgtggtattaaacatctgcattcagctggtataattcatagagatttgaagcctagcaacattgttgtgaaatcagactgcaccctgaagatccttgactttggcctggcccggacagcgtgcactaacttcatgatgaccccttacgtggtgacacggtactaccgggcgcccgaagtcatcctgggtatgggctacaaagagaacgttgatatctggtcagtgggttgcatcatgggagagctggtgaaagttgtgtgatattccaaggcactgaccatattgatcagtggaataaagttattgagcagctgggaacaccatcagcagagttcatgaagaaacttcagccaactgtgaggaattatgtcgaaaacagaccaaagtatcctggaatcaaatttgaagaactctttccagattggatattcccatcagaatctgagcgagacaaaataaaaacaagtcaagccagagatctgttatcaaaaatgttagtgattgatcctgacaagcggatctctgtagacgaagctctgcgtcacccatacatcactgtttggtatgaccccgccgaagcagaagccccaccacctcaaatttatgatgcccagttggaagaaagagaacatgcaattgaagaatggaaagagctaatttacaaagaagtcatggattgggaagaaagaagcaagaatggtgttgtaaaagatcagccttcagatgcagcagtaagtagcaacgccactccttctcagtcttcatcgatcaatgacatttcatccatgtccactgagcagacgctggcctcagacacagacagcagtcttgatgcctcgacgggaccccttgaaggctgtcgatgataggttagaaatagcaaacctgtcagcattgaaggaactctcacctccgtgggcctgaaatgcttgggagttgatggaaccaaatagaaaaactccatgttctgcatgtaagaaacacaatgccttgccctactcagacctgataggattgcctgcttagatgataaaatgaggcagaatatgtctgaagaaaaaaattgcaagccacacttctagagattttgttcaagatcatttcaggtgagcagttagagtaggtgaatttgtttcaaattgtactagtgacagtttctcatcatctgtaactgttgagatgtatgtgcatgtgaccacaaatgcttgcttggacttgcccatctagcactttggaaatcagtatttaaatgccaaataatcttccaggtagtgctgcttctgaagttatctcttaatcctcttaagtaatttggtgtctgtccagaaaaagtcgatttatgtgtattaattggccatcatgatgttatcatatcttattcccttttatgctatgatttattctatcttttgtatttcagaagacatataattaaatctatttaataaataaaaatatatagcttttctta

SEQ ID NO: 349488 - DNA, 1045 bp, Homo Sapiens
  misc_feature (951)..(951): n is a, c, g, or t
cggacgcgtgggcccggagactagaagacccttggcggtggctctttctaatagcactttacctgaagtggggtcgtggtggagtttctcctccacctctcaatgcaaacactatgcggagagcagtctgcttccctgcgctgtgcctgctccttaatcttcacgctgcagggtgcttttcaggaaacaatgatcattttttggcaattaatcagaagaagagtgggaagccggtattcatttataagcattcacaagacattgagaagagcctggatatagccccacaaaaaatctacagacatagctaccattcctcttccgaagctcaagtaagcaaacgccaccagattgtcaattcagcatttcctagacccgcatatgacccgtctctcaatctgctggccatggatgggcaagatcttgaagtggaaaatctcccaatcccagcagcaaatgtaattgtggtgacactgcaaatggatgtaaacaagctgaacataaccttgcttcggatcttccgccaaggagtggctgcagctttaggactcttaccccacaagtgcacatcaatcgcctcattggaaagaagaacagtattgaactgtttgtgtctcccataaaccgaaaaacaggaatttctgatgctctgccctctgaggaagttcttcgttcacttaatatcaatgttttgcatcaaagtttatcccagtttggaattacagaagtctctcctgagaaaaatgttttacaagggcagcatgaagcgggacaaaatctggagcaaagaaggattttatgctgttgtcatttttctcagcatctttgttattatagtaacgtgtttgatgattctttacagattaaaagaaagattttcagctttccttaagacaagacaaagagaaaaaccagggagatccacctatcgcccatcacattacagccagncactgtccgagggcaaaggacagtccacagcctgggtccaacctgaggcaggccccaaaggttactgaattgttgttcgtgggacccttcaagg

SEQ ID NO: 349489 - DNA, 1757 bp, Homo Sapiens
  misc_feature (207)..(248): n is a, c, g, or t
ccagatcatctttcttgctgacaagtatcatctaggaatcactctacctcgctggcaattttgagaaaatagccagttatttttgtgctgaactttcatctagttaagggtcattccttcagtattcaagacctcgtgaaataaaagtgcagaaaacaaacccaggcgatcacagcagcagccgccgcggcagcagcaccaacagcnnnnnnnnnnnnnnnnnnnnnnnnnnnnnnnnnnnnnnnnnncaaagttagagttggggctggcgctccggagttgctgggctcagcgcagctcccattcattaaggaaccagctgcggaggaaggtggccgagcgcccgcgctgcccactcgctcgctcgcgcactcagacgcgcgccacaacagcgcgccccaagctgcgcagctctgcaaaagtttctgctcgggatctggctctcttccccttggactttagaacgatttagggttgacagaggaaagcagaggcgcgcaggaggagcagaaaacaccaccttctgcagttggaggcaggcagccccggctgcactctagccgccgcgcccggagccggggccgacccgccactatccgcagcagcctcggccaggaggcgacccgggcgcctgggtgtgtggctgctgttgcgggacgtcttcgcggggcgggaggctcgcgccgcagccagcgccatgcaaaactacaagtacgacaaagcgatcgtcccggagagcaagaacggcggcagcccggcgctcaacaacaacccgaggaggagcggcagcaagcgggtgctgctcatctgcctcgacctcttctgcctcttcatggcgggcctccccttcctcatcatcgagacaagcaccatcaagccttaccaccgagggttttactgcaatgatgagagcatcaagtacccactgaaaactggtgagacaataaatgacgctgtgctctgtgccgtggggatcgtcattgccatcctcgcgatcatcacgggggaattctaccggatctattacctgaagaagtcgcggtcgacgattcagaacccctacgtggcagcactctataagcaagtgggctgcttcctctttggctgtgccatcagccagtctttcacagacattgccaaagtgtccatagggcgcctgcgtcctcacttcttgagtgtctgcaaccctgatttcagccagatcaactgctctgaaggctacattcagaactacagatgcagaggtgatgacagcaaagtccaggaagccaggaagtccttcttctctggccatgcctccttctccatgtacactatgctgtatttggtgctatacctgcaggcccgcttcacttggcgaggagcccgcctgctccggcccctcctgcagttcaccttgatcatgatggccttctacacgggactgtctcgcgtatcagaccacaagcaccatcccagtgatgttctggcaggatttgctcaaggagccctggtggcctgctgcatagttttcttcgtgtctgacctcttcaagactaagacgacgctctccctgcctgcccctgctatccggaaggaaatcctttcacctgtggacattattgacaggaacaatcaccacaacatgatgtaggtgccacccacctcctgagctgtttttgtaaaatgactgctgacagcaagttcttgctgctctccaatctcatcagacagtagaatgtagggaaaaacttttgcccgactgatttttaaaaagg

SEQ ID NO: 349490 - DNA, 844 bp, Homo Sapiens
  misc_feature (94)..(125): n is a, c, g, or t
aacaaaaaacaaacaaaagggcaagacttgttctattggccctctcttatacgaatgacgagcgcagcgagtcagtgagcgaggaagaggccgnnnnnnnnnnnnnnnnnnnnnnnnnnnnnnnnatatcacgtcgacggtaccgggacatatgcccgggaattcgtgccattacggccgggggtagctgaaagagaacgtgttttggatagtctgcaacagataactcgatcgtaatgtaatgatgtcgagatgaaccaagcgtaaatgactcttaacggtgtcgtattgtggcagtattgcacatatagaagtctcaggactaggagacagataagcttgatttccattttacagaatattagaaagttttctctgtcgagtatacgaagaatcagggaaggagagataaaaacctaatgaaacttaattttgcgtataatgtcgtggtgttggaagaaaataatgtgtgtagaagttgtgcgttattagcttaaataccttatagtacttttaaaaaatcatccttggtaattattgacttatcctagatccatgtacaattcagacttttatctggtgagctttaataaaaaatttaaaaccatctcatttcagaataaaataaacggaattacaagttcatgcattagcatttttaagtgaaagttctcttaataagattgccttttgtctaaccgaaatagggcatacagattagttggatgggaaagtggtaaagacttgagttgtttaatactgtgcctatttccaaaaagaagacttgaatgttggctttttacatgatgctataaagatgttaagtggaggatacaatagtctt

SEQ ID NO: 349491 - DNA, 1306 bp, Homo Sapiens
  misc_feature (1087)..(1087): n is a, c, g, or t
ccctgaagatgtgcatctggccaatggtgggtcaaaaccagagttctgcaggctgagatttttccttttattattattaaactgggcttgtgttttcctttcggtggctctggcatcctatgcagtagtgctggacatttgcaggcagttaaggcccagtacagcaggaagaatgatttctgtgactgctggtctgtgcaagccctccagctgcgggagcaacctcccttgaggagaagttgtgggggtgggcctggtggggagggcgataggctgggacagaaggaaggatggaatactggacctggtggccaggggtcaatgggatgtccttctcaccagaagcaacagaacgccgactccagcatgctcccatttcaactaaagtagtgggagacccacccaatgtgcatcaaaggcctgggtccttctgggctgcactttgaggaggagcagcatagtaagggatggggcgcccattctgctagcagagtgattcctggagatgcaatctgggagggatgtatccacgtggctgacccctcgtgtccagatgtcacatcttagtgtcatgagcctggtataaacattgaatttttaggatgcattttcactgagaggctaccactctgggagcctctctttttcctgcaaggagcgcctctcaaaggagtgattctggttctcagaggcattctgagctttgggatctagtctcaggctttccagggaaggaaaaagctatggctggatgacttttagttttctgcagtgccggatgccaactagaaaagctcatttttatctgaaaggaaagaaccagctagaattgagcatgccctcctttcccatgcctgtatcatgtccttggttccacatccccccttgccatgctgttgtgaagttgttttgttttcctctctctttcccataaaaggtcatgagctctgtttctgtctttaagattcccgtacttggtggcacaaatgaggcagcctcaacattctgttgaaggagtgaagggtttggaagttccaggtggtgcaggaaactagactggctcccagcaggtagatctttcccaacnctgaaatggccatacaatcctgtatgtgagacaggctgaatgcagagaatgagcatttccaggtggtagctctcatctcatctcacaaaaaaaaccagaccaccactgggagtcctgttccccggcttttatgctcacccctcccagtcacttcagatcagttaattctccagatttacaagctagaaaactccagctctggcactcagcacacaggcc

SEQ ID NO: 349492 - DNA, 896 bp, Homo Sapiens
atcaggccaaatcggccgagctcgaattcgtcgagagcgtggttgttcatttgtcggacatagcaaaaaagaatttcatgatctctgtattttgttacattgacatcaggtgcttttgatgagaaacaacagtgaaatatcgtgttcataatagaaacgaaagtcaggtattgcagtaggaagtctttgtcagcttaatgctgaagccaagagtagcacaaggtaccacattcttgtgcccacgacaggcttttataatccttctgagttctctttgacatcaagccccacgttgttccccagtctcaatattctgttggaggcagccacgtaacaattagagttgaaacctgccccacgttgttccccagtctcaatatactgttggaggcagccacgtaacaattagagttgaaacctgccccacattgttccccagtctcaatatactgttggaggcagccacttaacaattagagttgaaacctgtctgccatcctttgtctcaatgtttgaggatgtatgcagtgtttttggcagcgattataggaatgcagttgtttatttggcctcagcagtttatttatggctgcaattaatatccctgatcatgggcttttaaacctaaaatagttcagatcctcccttgttcctcttaatgtctaaaagctttgattctgtaataagaataagtgttggagttgatacattagttacaccctttgtaagctttaaaaacctgaaattttaaggtttactcatggtgcttgtattgatactcatattgttcacattaagtagggtaacttttggtgttaaggtattatctcttctggaaacggtaatttggtaatcttaaactatattttttttaagcataagtcattcagttaaca

SEQ ID NO: 349493 - DNA, 815 bp, Homo Sapiens
  misc_feature (23)..(23): n is a, c, g, or t
tgaccctagaggatcccacacgntaacgccttcagatcaactgtgtagccatttcagtagcactaaaagattaactctagtgttcatgtgtccttcttttcaaatatcaggtaacttgaataaggattatgtgccccacccttactctcattcctgcttcctcttggactcaaacagggtatgagtatgaagattttgcctttagttcctgaactgaacctgcttgctatccctttcctccccaccactaccttattccttctctgcctccaaattgccactttgttttgaggcttccttccctaccttattattctgaaggaagtagagatcttgcttctgaaacccctcctaagaaactgcccagggacaagataaattacaaacaattcatgggagtttactacctaagttgcttctagggcatatgtataccatactagtagtctagatttctggatatactctacagtagatgggggttatggttgaaactgattctctttcagtattccctctaaacatctcccctactcccccagcttagttaaaccctgcgtttggaccttcctgcctgcagctattagtagaaagtaaaacatatttccatatttcccttcacctaacattttattttttggaagcgttatcagtcctatttggttagtgaggaaccatgttccccttattcccgctaagttgctgctggttactaccttagaatctcaattggtttctctttctttcctctcccttcacattaattattagaacataagttgatcaggaaaattaaatgagactttagtattttg

SEQ ID NO: 349494 - DNA, 2335 bp, Homo Sapiens
  misc_feature (579)..(642): n is a, c, g, or t
  misc_feature (707)..(736): n is a, c, g, or t
ggtagcaacgaggggtagtggggagcaaatacacgagcggtgggaggagaagaagagaggtgtgccacgtgatagtagaggcgtcgggtggtgcctaagagagagagagtgttaggcgcggcggataacaggagaatggagagaagtaagagcagagagggcggcgcagtgagacaaggtggtgggcataaagaacgcgggggcgaagcgagtggtcaaagtgcgcgggtcagaaaatagtagggaagaggggtgacagcgcggaagtgacaaaccacggggaaggggagggatgacgacgtgacagggggtggtttgtgcgccgcgcaccggggggtaataatgtttgttgtttgaggaaggaattggccgggggctgtgcatcgggagaacggaagaggtgttatgagtgaggaggagaagggcagtgcagcgcgaccggtttattaaaaaactataggagaagtgggcgaccgccaagcgcgctaagggaaagtaaatgggtacataagaagatttacggtgagaagcaggggatagggcggaaaaaaaagaataataagtgagtggcagggggannnnnnnnnnnnnnnnnnnnnnnnnnnnnnnnnnnnnnnnnnnnnnnnnnnnnnnnnnnnnnnngggtaaaaaaggtagaaggtgggggtaaatgtgggtatatatatttggggtagtggatgggatannnnnnnnnnnnnnnnnnnnnnnnnnnnnngttggtaatttacatgaaaggacaatatttatttaaacagagctcaatggggtaaccatggtatcatcagagtgcatccagaggaaaagagggaggaggggccgaaggagacacaatcaacggcactcccacacttttactgtttgatctacgctgccagtgacgacatagggtgccgtcttgtggaaatccaaggaggtaacaaagtgttcatgcgcattgagggtcttcatgcatcgcttgttcttgtaatcccatacgcgtagggtcttgtcatcagcacaactcaaaataaacttccccccagaatggaacagaactccacgtacccagttatcatgacccacgagggtcataaggcacatgccagtactgacatcccacatcttaatagtcttgtctctggatccagacagcaagaatggcccaggtttaccactttttttagtctcagatcctgttgcttcagagatggaggaatatgagctttctggagcccaggaaatgcattctaccacatgctcatgctctcggagctcagccttgcattcctttgttgctacgacccatacacgcacagtctggtcattggaacagctggctatcagagtgccatcttgatttggccgtaccatacgtacccattctctgtgtcctgtgaatgtcttcacacagtagccagtttgcacttcccacatttttatagttttatcccttgaggcagacactatatgatctccattgggcatgatggctactgaagaaacattgtggtcatggccgtgcatggttctgatgcattcaaagccctgaaaatcccatagtttaatggtcatatctgcagaacaggaagccagaagcttgccgctgtggtcgaatgaaatgtcctgtacagagtctgtatgtcctttaagagttcgttcaaaatctccagtctcataatcccacaccttaattgtagcatcctctgaagcagagaccataacactgaacacaggatggaaaatgactcgagtgactggactcctgtgaccactcaatgcatatttttctggcggacggggaatccattcttttgggtctcgtttctgaccaagaggtccacctgacgtaaattcttcttttgcttcatttagctttgattctaattccataaccttcttttgtaatctaataacagatgtccattttttttccaaaagaccagcatactttttatctaattcttcattcacatctaattcagcttcctttttaaaaactgaatatgcctcttcatagccatttgaacgaagataatctgctatagctcgatttagttcatctcgttgtctctgggacagcaccatcttggctgtaatgtcaagcttatctgatatagtggtatgtccctcctttgggaaatcaaaaagctttttgatccgtggacttataatttaaatatgccactaagtgtcttccacacaggggaaaatgattctttcacaaatgaatccaactagtaaccagaagatattcaacaagtaagattcattccaccggagcgctgcaccgccgcctccgcagggcctcttccgtccttcactcccatccaccggc

SEQ ID NO: 349495 - DNA, 1787 bp, Homo Sapiens
  misc_feature (1139)..(1198): n is a, c, g, or t
  misc_feature (1420)..(1420): n is a, c, g, or t
  misc_feature (1442)..(1442): n is a, c, g, or t
  misc_feature (1539)..(1544): n is a, c, g, or t
  misc_feature (1548)..(1548): n is a, c, g, or t
  misc_feature (1550)..(1552): n is a, c, g, or t
  misc_feature (1557)..(1560): n is a, c, g, or t
  misc_feature (1562)..(1562): n is a, c, g, or t
  misc_feature (1568)..(1568): n is a, c, g, or t
gtggaccggtccggaattctccggatcgcgcgccggaagtggaaatgtgtcatagagggcgggcggcgacggcggtggcggcgtcggaggcgcctccgggggacggtggcggctcccggcggtgaggccgcgcctgtccggggatcgtcgagggacggcgggagcttgggccagcggcggcggcggcctgggacgcaggcggagccccgcgcaggcccaaggtcccggaggctatggcagcggctaccatcgtgcacgacacgtctgaggccgtggagctctgccctgcttacggcttgtacctgaagcccatcaccaagatgaccatcagcgtggcactcccgcagctgaagcagccggggaagtccatctccaactgggaggtgatggagaggctgaagggcatggtgcagaaccaccagttctccacgctgcgtatttccaagagcaccatggacttcatccgcttcgagggggaggtggagaacaagagcctggtcaagtcttttctggcctgcctggacggcaagaccatcaagctcagcggcttctccgacatcctgaaggtgcgcgcggccgagttcaagatcgacttccccacccgccacgactgggactccttcttccgcgacgccaaggacatgaacgagaccctgccgggggagcggccggacaccatccacctggaggggctgccctgcaagtggttcgccctgaaaggagtcgggctccgagaagcccagcgaggacgtcctggtcaaggtgtttgagaagttcggggagatccggaatgtggacatccccatgctggacccctaccgggaggagatgacgggccgcaacttccacaccttcagtttcggggggcacttgaacttcgaggcctatgtgcagtaccgcgagtacatgggcttcatccaggccatgagcgccctgcgcgggatgaaactcatgtacaagggcgaggacggcaaggccgtggcctgcaacatcaaggttttcttttgatttcgaccaaacacctgagtgatgcctcaattaagaagcggcagctggagaggcagaagcttcaggaactggagcagcaaagagaagaacaaaagcgcagagagaaggaagcggaggagaggcagcgagcnnnnnnnnnnnnnnnnnnnnnnnnnnnnnnnnnnnnnnnnnnnnnnnnnnnnnnnnnnnncttcgcaagagggagcagaagcagagggaccgtgagctgcgccggaatcagaagaagctggagaagctgcaggcggaggagcagaagcagctgcaggagaagatcaagctggaggagcgcaagctgctgctgggccagaggaacctgcagtcatccggctcatcgcgagctgctcgcagagccagggtacccgggggtcctctgcagcgccagcgggccggntgcctcatgcccccctgaatgngacgcgcagggcgttcccgcgtgcatgactcaacctttgagagagctcgaggcgcgcgtcagtatgatcttatgtgcacgcggcttgaactggcgtnnnnnnactngnnncgacnnnncnaccgcnacaccaaaacacacacaaactctccaccacgcacatactccccaccccccaccgacctcagctacacccggaactatcgccccccctcgcgctattctctgatacgaccgcgaactcgacatgcgcacacccgaatttaccatgtgcgctcccaccccccggcttaacgctaccctctgcatccggcttcgtaactcatccgccctcaataccggcccg

SEQ ID NO: 349496 - DNA, 1345 bp, Homo Sapiens
  misc_feature (1328)..(1328): n is a, c, g, or t
tattgttaggggaagacagtaatttatcattcatggaccagtagattgttgaaagttggtgaatcggattataagcttctagctaacacaaggattcagaattaggtaaacatctgaaggtttagtatattagaaacacccaaaccagtaatatgctaacctgatgcactgctgaaagaaaatgtgaatttttcgtaataattgcattttagtgaattgtacagtgggtggaaagggcatttggagctcattagaatgagacatagtacaccccaatggccctgtttattaaatgtagtggattaagtgtctgtcaacaaatacaccaaaaccattttttatagaaacagtatttaatggtcactcaatagctttcaaaatacatttttgtattacagcactgcacaagctattctaatagtgctctcgcctcatcattcctgcaaagcttgctttggggagttggataatgtgaaaattttaagtacctaggggagaaagagccatgtaaatatctgtaataaacttgtagcatatgtaaagttttcttggcctttatcttacaaaaatggagtattttagtatgaatttgctgaatgtaagaccgtggactgttttttataatatggcctaattttaaaggtccaaaataacttgtttttaaagtttgcccttgtgctaaagtgccagtgtatgtatgttatacttgatttggttgtaaactatatttcaaagtaaaccctagtgtaataagttttataactaaaaaggtttaagctgctaaaactatttttaagagatgtgaaatgcagtatgggactatctttttttcctcctctaagcccaaagattaactagagtccctccaaccttatagattgttggctttcacaatcttataacctaggatacaggtagtttcgagtatggtgccagtgatgttttgtttttgtttggtcaaggggtaggtgcaacccaatggaccacttatgcaaaagatgtaaactcttgcataatacattgataacatgttttgccaactttaaatgcttaaacataagcgaaaccagtagcaagtatgtgggtcagcttaaaaattttgattgttaatgccctattttctaatttggcacctcttgatgcctaagcaggtaagcagatgcctaagctgtatttctccaaataaatcaagatgaagtactgcccaagttaaatattgatagcctaaagacaagtttatgtagtacttaatgtacatgatatgaagcataaaattaaataaaatttttccccattggcttggttttatttcgccgcggcgcggagancgcgggcaaaaaactgt

SEQ ID NO: 349497 - DNA, 417 bp, Homo Sapiens
  misc_feature (16)..(16): n is a, c, g, or t
  misc_feature (21)..(21): n is a, c, g, or t
  misc_feature (39)..(39): n is a, c, g, or t
  misc_feature (47)..(47): n is a, c, g, or t
  misc_feature (91)..(91): n is a, c, g, or t
  misc_feature (97)..(97): n is a, c, g, or t
  misc_feature (118)..(118): n is a, c, g, or t
  misc_feature (131)..(131): n is a, c, g, or t
  misc_feature (159)..(159): n is a, c, g, or t
  misc_feature (235)..(235): n is a, c, g, or t
ccctgggatacgggtngtttngagtatggtgccccgtgntgttttgnttttgtttggttcaaggggtaggtgccaaccccaatggacccanctatgncaaaagatgtaaacttcttgncataatacattgnataacatgttttgcccaactttaaatgncttaaacataagcgaaaccagtagtcaagtatgtgggttcagtcttaaaaattttgattgttaatgccctattttnctaatttggcacctcttgatgcctaagcaggtaagcagatgcctaagctgtatttctccaaataaattcaagatgaagtactgcccaagttaaatattgatagcctaaagacaagtttatgtagtacttaatgtacatgatatgaatgtgaagcataaaattaaataaaatttttccccaaa

SEQ ID NO: 349498 - DNA, 928 bp, Homo Sapiens
  misc_feature (24)..(24): n is a, c, g, or t
aaagatgatggtaacataaaaatntatgtggtaatacttagaatataggtatgaagaagaagacagggcctagccaatgtgaaagaataagcagtagctaatctatgtggtcttgaggtatagtataaacgtgaaaagttctatgaacctcttcagttctgagggttgcccaattaaaacagcaacaacacgatcagcagcaacaaaactttatcagatgtactgaatgacttcattctctgataaatttcaaagcttccagaacagaggatcaactattgtaactattgcccatttctggtccaggaaatacctttctgataaagagtgctcataaaacgcttgtgttgttttcattcattctatctagaagtgggcaaataccaaaacctttatcccagattaaggtcggataataagtgaacctgatgacctactttagaatgacaattcaaacagctatccctgaaaccagacaactacacgagttatgccttgaagcagatctttcaaagtgcaacgaaacattactcctgtttttcacttgaggagactaaattatggtcatatcttttccatgatactgattttttatttaacataaaccaaatactgactgaatcaaagactaaaaccccacaaaatttcatcctttaaaacaaaaagcaataaaatcccacccctaaatcaggcctcaaagttcaaagaaatgtttaaaaatcccccatatgggatctgacatgaatgtctattattgtcccccccaagtcctctcaaaaatcactttaaaatcttgctttgagaccctaagttttcttggaaataaaatacatttatagattgttttaaacctactgaattttactatttctgctcgctttcttcccatttaataaaatcaaaataaaaaattttgaccaaataaata

SEQ ID NO: 349499 - DNA, 858 bp, Homo Sapiens
  misc_feature (348)..(376): n is a, c, g, or t
  misc_feature (558)..(768): n is a, c, g, or t
tagtctcctcaagtgaaaaacaggagtaatgtttcgttgcactttgaaagatctgcttcaaggcataactcgtgtagttgtctggtttcacggatagctgtttgaattgtcattctaaagtacgtcatcacgttcacttattatccgaccttaatctgggataaaggttttggtatttgcccacttctagatagaatgaatgaaaaccacacaagcgttttatgagcactctttatcagaaaggtatttcctggaccagaaatgggcaatagttacaatagttgatcctctgttctggaagctttgaaatttatcagagaatgaagtcattcagtacatctgataaannnnnnnnnnnnnnnnnnnnnnnnnnnnnttaattgggcaaccctcagtaactgaagaggttcagagaactttccaggtttatactatacctcaagaccacatagattagctactgcttattctttcacatgggctaggcctgttctcctcctccagacctagtattctaagttattaccacatagtatttttatgttacccatcatcttnnnnnnnnnnnnnnnnnnnnnnnnnnnnnnnnnnnnnnnnnnnnnnnnnnnnnnnnnnnnnnnnnnnnnnnnnnnnnnnnnnnnnnnnnnnnnnnnnnnnnnnnnnnnnnnnnnnnnnnnnnnnnnnnnnnnnnnnnnnnnnnnnnnnnnnnnnnnnnnnnnnnnnnnnnnnnnnnnnnnnnnnnnnnnnnnnnnnnnnnnnnnnnnnnnntgggtgtgaaccccgggaggccaaaacttgcaatgaagccccaaattgcaccacttggacttccaacctggggcgaaaaggggccagaat

SEQ ID NO: 349500 - DNA, 755 bp, Homo Sapiens
  misc_feature (208)..(208): n is a, c, g, or t
  misc_feature (686)..(686): n is a, c, g, or t
agcccatcgacctgaccgagggtgactttgccaacgatgagactaagaggaaccagctctttgagcgcatgttaaaggtgcacagccggggcggcctcatcagtgcctccatcaaggcagtgacagcagctgacatggaggcccgcctggcgtgcggcctggtaaagggccacgcatacgccgtcactgatgtgcgcaaggtgcgccntgggccacggcctactggccttcttcaagtcagagaagttggacatgatccgcctgcgcaacccctggggcgagcgggagtggaacgggccctggagtgacacctcggaggagtggcagaaagtgagcaagagtgagcgggagaagatgggtgtgaccgtgcaggacgacggtgagttctggatgaccttcgaggacgtgtgccggtacttcacggacatcatcaagtgccgcgtgatcaacacatcccacctgagcatccacaagacgtgggaggaggcccggctgcatggcgcctggacgctgcatgaggacccgcgacagaaccgcggtggcggctgcatcaaccacaaggacaccttcttccagaacccacagtacatcttcgaagtcaagaagccagaagatgaagtcctgatctgcatccagcagcggccaaagcggtctacgcgccgggagggcaagggtgagaacctggncattggctttgacatctacaaggtggaggagaaccgccagtaccgcatgcacagccttcagcacaaggc

SEQ ID NO: 349501 - DNA, 921 bp, Homo Sapiens
aaaaaaagagtcttttttcaggaagcaaccaagtggattggcgcaaacacaccttaaactgaaccggctgaaaatgaattttggatcaaaagaattgtgaaggtcctggaaggaagaaaagccccccggggggaaactgaagttaaaggtgagggtgcagaaacctctgaatggccaggatgtgcaaatggtcacttagaactggctgattctggagcacaggggcttgtgagccgatgaccagcaccaggagaggagtcaggccgcaactgtgcaggagatgactttcccagctttgctggcttcaaaagcctttgtacataaaagatgctgctacccaagcaccaaagacctgttaagcatgtgcactactgaccacgactctggtctttcctgttgttggcccctctggggctctacagaaacaggctgggttccaggagcccatctccccactgtctccccctgccccgagtctggaagagggcaaggacacttccattcctctgtaccatggagtcctgcagccccttaacccctgcgtggcaactgtgtacagcttacccctgcctccagttgcaccacttctagatgtgcctttaaaagatctaactatgggatgggagaacttgagggtgatcgggaacctcccctgctgagggtggtgtcaggggttccgtgactccagtgggccagtggtagcctgtcccagacaactccgtcaccccagctctgcctgtgcctttatccctgacagctgctgcactagccttcctgcttccctaaggacttagtggagggggaaagttgtttttggtactacttggtgggaagtaaggggaaggttggatcttgggtttggtctacccacccaagagaaaagactgttaactggaagaaaaaatatatatataaaatttt

SEQ ID NO: 349502 - DNA, 787 bp, Homo Sapiens
  misc_feature (69)..(115): n is a, c, g, or t
aaaaaatcagctaggtaccttattaaaaatggtccccaacatgtctgagctggagcttcagtgttcacnnnnnnnnnnnnnnnnnnnnnnnnnnnnnnnnnnnnnnnnnnnnnnnagaggaagacattagataaagtaaaaggagtcatgagaaaaggtgcacctaaaaaacatcacataacaaaatactaaagtcactagtggagaataacaaacatgtctctctactctatattctaagatcagtctttggttttctatatttccatgtgtctgattataaagactcattaagtttatgggctttttaaacttcaaaaataaagtgctacgatttttaaaataaaaacacgactataagggcttttaagaaacttgcctgtttctgagagtgaaggacaatctttgagatccaaactcttctgaaattctatttcattgcataaaccctcgattatttattgccttttgagtctaatctccatgagatttaatttgctccttaagggcaaggccattttatatattaataatagtttggtctcctcgaaagcacttaacatttacataaaagttcacaattgtaaaacctaatcagaagtccatttttccttgcagcaagataggaaaaaggacaatcttcaaactaaaacatacttccaattatttatcataaatatttgattttactccatgacttctaaaatacagaaatgtttactgctttacaaacaataaatattaaagatatgacaaattactgtagcatactaaaatatttacaagt

SEQ ID NO: 349503 - DNA, 1076 bp, Homo Sapiens
  misc_feature (144)..(240): n is a, c, g, or t
  misc_feature (360)..(360): n is a, c, g, or t
  misc_feature (1036)..(1036): n is a, c, g, or t
  misc_feature (1047)..(1047): n is a, c, g, or t
gtctaggatactgcattagttaccagaaaactaggggaatttagagggaaaaaaaatccatgttttctatttcccaggtttttaaaaagtagctcttccccaaccccgttgctagcttgttgcaatataaaagccctggtgcannnnnnnnnnnnnnnnnnnnnnnnnnnnnnnnnnnnnnnnnnnnnnnnnnnnnnnnnnnnnnnnnnnnnnnnnnnnnnnnnnnnnnnnnnnnnnnnncaattaaaacaatcttcaagagccctgtaaggttaatgccgataaaatgactgactccgcccttcttccttagtacgtagtatccagcaaggcatttgccccaccttgtcttgttgatgnaacaatattatgaaggcctggcagtcattctctctgtacatcagagcttagttcgaatggaatcatgaaaatctctgattctgacctcctaaggaaaaatgaaacccagaggatgtggtcatacaggatggctcccatgtgggcctagaacccaggatgcttcactcttgactccatgctcttccttttataccatgtggctgtgaatacatactatgggatgggattcaacccttctaagtaaatcctcagtctgggctatattggtacttgcctggtttcactagaaggagtcacccaggccatttagtgaatgataaatcctagaagttgagtctgagtaccatcagagtttggcattatttgcaacattcccaggaatgagctataagactccattgctttctggactttagtgaccagctaatcttcccttggatcctccaataaaggggaaaaaaaacttgtcttatgttgttttagcaagggaaaaaagccaagtgacaggaaagattccctggtctgcatctaaacattagtcaacagaaggaaaaggctcttttccttggagattttcaagttgaaaaagtacagctgcttggatggagtttctctcatcagaatagaaatatgctaggtggtcttcaagacctttttgaacctacagattctaaanccttagggggnagccagaatatgtgatcatacccgggtga

SEQ ID NO: 349504 - DNA, 1201 bp, Homo Sapiens
  misc_feature (1063)..(1075): n is a, c, g, or t
gatgggcagggagaatgtggaatcctaatctacattttgttatctttcccctcactcattccagtaaagtctctgctacaccataatgatgcggactggcagaagattgatatcttttgttctgagttctacagcgagtgtatcctagtggctatattatattattgattgctgtaataatagagcaataatattgctgtatattatttagagttataattttaggtactcctaataaattgatattgcactttctactaaatatttcatttgtgaccttttggttacagatgttgaaagtcaaacggaaacacaaaggtcatgaatgcctatgtttttctccatatctcggtcactagcttcccttaaggtggatattttggaatgaacaatttctctgtgacagaaatagactaagacaagggcccttcttggatttctaaatatgtaaggaaagcaaacgaaagcatttactcaaggccctctcttttcaaagaaataaaatacgtaacactcaggaaagcgtggggattagaaaatggctttcttacataaaagagctggctgtttgcgtattccctgagctattgttgagaaagtcattgtcatataatgccacaaaataaaacataatatttcctaaaatgattaatgaaaattcaattgatataaattacttcagaatattatgagagattcagaaccatagggatcttcttatttcttagcttagtaagtaacagctgtagattgacttaaatgtgagcaaatgccagtgaaagatgtcatttacataattttaaaatgtaaggatcaaatttcctaaaacatgctcaaagtgctagaaatctttttaattctactctcaaccaactcaattcatactctaaatttcttttcttcaggagtgatgcaattttgcgtttttagttctgtaggaaaatttcactaagttgtatctatctccagcacaattattgttgtgagagcatctgcaacataaaacaaaattttcctaactttctcagaagcaaatgggaatacgaaccttaagctaaggagnnnnnnnnnnnnnctggaatataggaatctgtattcctgcaagtcaccaaaaaggcattggggtgccatgaaaacccagggtcattgttttactgtaagggtccagatagattttaggctttgcagtccatatggtctc

SEQ ID NO: 349505 - DNA, 796 bp, Homo Sapiens
  misc_feature (12)..(12): n is a, c, g, or t
  misc_feature (112)..(112): n is a, c, g, or t
ccacctccgggngatgaaaacccccaggttttggcccccccggtcacagaccagggcctgccacccgtttgaaacctacaattaattatagatgtccaaaaccattaacccngattaaagtaatatatttaagagtaaattttgccttgccatgtgcctaatatgaaataacagactaacattttaggggaaaaataaatacaatttagactcctaaaaagtccttttcaaaaagaaatgggaaataggcagactgtttatgttaaaaaaattcttgctaaatgatttcatctttaggaaaaaattacttgccatatagagctaaattcatcttaagacttgaatgaattgctttctatgtacagaactttaaacaatatagtatttatggcgaggacagctgtggtctgttgtgatatttcacattctatttgcacaggttccctggcactggtagggtagatgattattgggaatcgcttacagtaccatttcattttttggcactaggtcattaagtagcacacagtctgaatgcccttttctgttatagcctaagttctggagtggccagttcctatcagactgtgcagacttgcgcttctctgcaccttatcccttagcacccaaacatttaatttcactggtgggaggtagaccttgaagacaatgaagagaatgccgatactcagactgcagctggaccggcaagctggcagtgtacaggaaaattggaagcacacagtggactgtgcctcctaaagatgcctttcccaaccctccattcatgggatgc

SEQ ID NO: 349506 - DNA, 773 bp, Homo Sapiens
  misc_feature (537)..(575): n is a, c, g, or t
atggattcgttcactaggccagtcctgaatgtgaggtctcctcctgcaattacgtaagtagaagtggaaaagtaatgcttctggtgtttctcatagaaagccgaaagagttctggagtactatagtagattgcagctttaatgctcatcccattaaacatccagtcagcattagttctgctttacataaggtaattgccgatgtaggtaactgggataatgttttcttttaggatgagtaagtgattcctactgaaatcgcttcacatactctattgccctggagctgcacaacgattcaaaaaacagttcttgttagggctgtcatccccaggaaaagggacaggagagatcagggactgaaaatgtttgattaggtagatggaatgtgtacgaagaagaggaagcccaaagtgaagcagaaatcagaaatgtcttttgggagagggaaggatggagatttatttgagagggagcccctttaactgggcagcaacttcttttctaacttaatattacactgaactattttctagtnnnnnnnnnnnnnnnnnnnnnnnnnnnnnnnnnnnnnnnttttaaacgagcaggcttattaattttcagatttgaagccacaagcaggtaaataaatttcacaacaaaatgtggctcatactatgaattccatatgtccaatgtcaaaatgtcatttgatcaagacttgcactagtggacaaagttttctctgcactgaatttcagttttacttatttggaattccacagaaatgca

SEQ ID NO: 349507 - DNA, 966 bp, Homo Sapiens
  misc_feature (236)..(247): n is a, c, g, or t
gggatcatctgtggggtcaggagtttctagggccacctggcctacgtggtgtcaccccgtcctgttctctatattgccaatttgctgggcatgtgtggtgtggcccctgttatcccagctatcttgggaggctgaggccggaggctcgcttgataaccgggagtttgtaggttgcaatggagcccagatcacacccttggcactcatgcctgggtgacagagcaagctttgtttcnnnnnnnnnnnnggaagtgggaagcagaaggttaatatccagaacacctagtaacaaggaatgtaaagcccccagaagaccttccccatgggatgaggactcaatttcagagcaatgccaggtttgaatagactcacacagagggcccttctctgctgacaactttgggagtgatggtcctacccaggccacttaagtttggctaagtgtttcaaccaatctgcaaaactgtaccccagcactttgcttcctgctcctgaattgagaaatttcatatttagttgtgaatcacaagcatatagagactccacacactaattcctagggaagagagctccaaggatcacaagcatatagagactccacacactaattcctagggaagagagctccaaggaccagacagaattatccttaaatcaggagatgatgagatagatgcctaaaaagcataactcaaaggggctgtggacttcatagatatccaatctaaagaaaatgatatgacccaacatggttcacttcctttcttaaactagctactttgtccctgttcaatttttatctacaaatatattaagaaacaggaaatcaagcatcactataaatggtaaacctcaatcacttaagtagtactgtgttccccaggctgagaacttggctaaaccagatgaatggggcttgagaggcccttgtacacattccatggaagactatggtaagggaaaacc

SEQ ID NO: 349508 - DNA, 1217 bp, Homo Sapiens
ggttctaaattcagggagaaggctgttaagcccaggcctctgtgggggatgggagttctttgttctgtgatgcaatgatgacctcagggtaaactgccagaaggctaagggaaatggaatggctgctggaggacctgcttggggctaagggggatatggggcttctctggggccaactgacccatgccctaagccgtgcagacactgcggcagcaggctgcttccagagtccaggaaatctggtgacactattcttattcgtggtttggcagattcagagatggtggcagcttgggaggttgcgacagcttcatccctggtgctctgggaatatggtgcaaggcaaggaactaccacttctgcaccgtgtggccttccttgatcacctgtgtaagcagaaatcagaagtggaggaagaaggggaagaagaggaagagggggaagacgaggcatctctggatccactgaagccatgttctcctaccaaagaagctcccactggagagcaagccactccagcgcccagccccagccatcctgtggttctgagggcctcctcaaggctatagggataccagagcaaacagtcatgcagcccgtgagcccttccagatccttccccatcttccagattctgaccagctttcctgtgaggcacaagatagcatcagggaaccgccagcagcagagaaaaagccagctcttctggggtctcccctctctgccacagcgagtccttggaggccatcttcctgagctcaggtggccctctcctctgaagtggtcaggtaaggtacatactgtcttcttcaacaagcttgccttcctagctaggtccaacatgttgctttcccaggtatcacgtcctcagcccaagtttcttacccatgggggccatactatggaaagtcttagacaggattggcccagaatgctgcagaagcttcaacgatccatattactacatactgtctactacatacatactatcatctgaggccccctccaggtggaaccacaaggggaagtgtgaatcaggggcgcgtaggcgaccaaaacaagacacccgggagaaagatcccccagggagagtcaacccagggacatgtagagacatagggatacaacaggacacaaaagaatgccagagtaaatgagcaccgagacacacacatagaaaaaccacacgacctactggaaacacacaaacaatgaca

SEQ ID NO: 349509 - DNA, 1718 bp, Homo Sapiens
  misc_feature (78)..(146): n is a, c, g, or t
  misc_feature (1571)..(1571): n is a, c, g, or t
  misc_feature (1642)..(1642): n is a, c, g, or t
ttaaacacggtgctctcatctcaggcacccagaacactgctgaaagtgccggtgttttagaaacaatttgaagaaccnnnnnnnnnnnnnnnnnnnnnnnnnnnnnnnnnnnnnnnnnnnnnnnnnnnnnnnnnnnnnnnnnnnnnatttagggaaaaatagagaaaagaagaaaaacacccccctccctggctcatgctctgggccctggattctgctttttaaatgcttttgggtacatgtgaaatagatgtttatttacatgatccttgttctactgaatatcaactttttactagacaacatattttgatgtaacaaagttacattttcttaaaatataattatgttgttgcacgtgaggaatgtgaatgaaacaaatgagtcgtggtagtgggccaaattctcactgctgttcctgtaattctgaaccttttcaagtatacaatggaggtataagaatctggccagatgtgaaacatcacctataagctaaaggacagacccttaaaattcatcaccagtacaattgtgaggtggaaatgaggaatacaaaaaattgaggtattttatatgataaactgtcttgtggtgtgactggtgtacaaattggtcttttctttccaactcacattaacagaatctacctatgaatatgagtaaaacctatgaaaaatgaacacggatatgtccttgggaggaaggtcactgttaaggagtcaatgatacatttttggtccctgagaaggcaaaacaccaagactccatccaatcccgcctgatggacgaacaacgccctcggtgtcagacaccatgaaaagaacaacttcagaacacggaagctaatccatgctgtcgggaacagaccttacactgaaatgttctctttctagtttcctgcttggtggcaggaagcctaagtcagcatcgagcaggtgtcaggtcgaagcggcacaacgggaggggctctgggaaccaccggagtactctctcccctcttctgggttagctgagcagcttgaagaagaggaatcccccgaccagacagaagggcagcagcctgtgcccatcacacctgtttccacggaccaggtgtccgtgcacacctgggagacactgcatctccaaagtctagaactggcccctagaagttgagcacaacatttacaaagagctgagtcatctaggaagaaggaaaataagacgactgcacaagtgaacagtgctcacttctaccagaaaacagatgtgaaatccaacagaagaacaaacaccaacatattaccgctgggatgaacttctggaaagacaactgggtgtagtaaattggcttgaagagcaggaattgaaagaatattccttattgctgaacaaagagctgcgaagtatattcactaacattctgataggaaaagatctcaatgagagctgagcaaggccaccagaataccaaattcctccccaaagtccccagcatgggcagggcctcactccatgtggcactggaaggacttccctccccagcaccttctccacagagatggcatggtcctgccagccgggaagatgcnccaggggggctttgtggtgctgggttagggttagaatccttaattggccctacctttgatcaatgagcagnacaggaagcaatcctttcaaatgcaaatattcagaggagaaaacaaggcattgcccaagaagaggagagaaatagc

SEQ ID NO: 349510 - DNA, 663 bp, Homo Sapiens
tgatgagaaggattgtggagattcacatattcttcccttctcgactcctgggccctccacgtgtctgcccaattactaccgctgcagcagtgggacctgcgtgatggacacctgggtgtgcgacgggtaccgagattgtgcagatggctctgacgaggaagcctgccccttgcttgcaaacgtcactgctgcctccactcccacccaacttgggcgatgtgaccgatttgagttcgaatgccaccaaccgaagacgtgtattcccaactggaagcgctgtgacggccaccaagattgccaggatggccgggacgaggccaattgccccacacacagcaccttgacttgcatgagcagggagttccagtgcgaggacggggaggcctgcattgtgctctcggagcgctgcgacggcttcctggactgctcggacgagagcgatgaaaaggcctgcagtgatgagttgactgtgtacaaagtacagaatcttcagtggacagctgacttctctggggatgtgactttgacctggatgaggcccaaaaaaatgccctcttgcatcttgtgtatataatgtctactacagggtggttggagagagcatatggaagactctggagacccacagcaataagacaaacactgtattaaaagtcttgaaac

SEQ ID NO: 349511 - DNA, 878 bp, Homo Sapiens
  misc_feature (807)..(817): n is a, c, g, or t
attgaaaagattaaataagaaataaagggaagtgtctgctacttagttgccagtcaaaatgttagttctctctctctaccaccttcctcctacctcttcccatattgcttgcctgataaaacagctaatcaccagcatttgttccccatagtcacagggccacacaagggaacatttaggacaaactttctccatggcctatgatccaaattgttatctaaagatgattctaggtgttgctggtagtatgtgaatcttccaatctaggtgtgatcgtgtcctcatatgaatcaggaaaaggcagtttcttacaagttccgaattccaaatacagagactggtggtgttacatttaaccttaaagatgttaatgttgatggaaattcatgtttcatattaaaacaacactttgtctttacaatgaaacattttgcttaatttttaaagtaagacattatgatacctctgatggcagttcctcaaataactttaacttttgtgctttagggatagttgttaaagttacaacttcttttattttattttttaaaggcttcagattaaacaagagcccttaagcccacgcatagcattgccgcttcagcttgctgaggactgtctccaaggaggccaaatgggaaaaggagaggctacttcaagtgggtgttgggcccattgaggcctattggggcaaactattaaccaggttggccttattttgggtggattactccaggagaggccaccctccagctttctcttatcccagtaactcctcttcccattttccaatccatccccagccannnnnnnnnnncttctgtactcttcttttgccttcaatatgagtttcatttcctctgtgtctttgggcagac

SEQ ID NO: 349512 - DNA, 589 bp, Homo Sapiens
  misc_feature (469)..(469): n is a, c, g, or t
  misc_feature (479)..(479): n is a, c, g, or t
  misc_feature (530)..(530): n is a, c, g, or t
  misc_feature (552)..(552): n is a, c, g, or t
cttcagcttgctgaggactgtctccaaggaggccaaatggaaaaggagaggctacttcaagtggtgtggcccattgagcctattgggcaaactataaccaggttgccttattttgggtggattactccaggagaggccaccctccagctttctcttatcccagtaactcctcttcccattttccaatccatccccagccattttttttacttcttctgtactcttcttttgccttcaatatgagtttcatttcctctgtgtctttgggcagacttccttctaacatgtgtcagctaccctaccacacacctggcctaggagacacatcattcattgctcctacttgtgtctgtaatcagagagtatttaaggagggcagttctgcgacggactgtgtgtgtgttgaaagtaaagatggggggccgcggggaaggcaagagtttttccaaaagattattagaaatgaggngctgtatctnactctgtgggagtaggaaccaagtctacttgggagaaaagaaccaagtccnttgggatatctaggggaaagcngtttggcaggaagaaaaattcagagggacccagggtt

SEQ ID NO: 349513 - DNA, 678 bp, Homo Sapiens
  misc_feature (125)..(211): n is a, c, g, or t
gcatttctgtataatgtgaagaagcaactgtatttgaattaaaaatcactgctaaagaatatatttgagtcatacagtttctaagggtacaacctgtgaagtcagacttcctgagttcagatctnnnnnnnnnnnnnnnnnnnnnnnnnnnnnnnnnnnnnnnnnnnnnnnnnnnnnnnnnnnnnnnnnnnnnnnnnnnnnnnnnnnnnnnccttttgtacagttatgaggaaacttagacaatgcctgtgttgtatggtaagcgttttcataaatgctgcctacctgtaagtagcattatagtgtgtagttattggttaatttcctttttctttaccagaagtgtgggttttgcccagcctttatacaacttcagtatttctggttaatctgtctctctatggctctaaacttttcagagtggtgggggagttaccaacacttttgtaaaaggccagatagtaaatgttttatgctttatgtagtctctgttgcaagtactcaattctgtaattatagcgtgaaagcggccacagacttgtaaatgaatgagtacagctatgttctaataaaatttttatttaccaaacccatgtggtggactggatttggcctttgggccatattttgctgaccctgttttaaaccataagcttttctaagaatttttttaatccc

SEQ ID NO: 349514 - DNA, 2016 bp, Homo Sapiens
gctgggtggcgaattcggcacgagggagccgtgggaagaaaagagggagcagctagggcgcgggtctccctcctcccggagtttggaacggctgaagttcaccttccagcccctagcgccgttcgcgccgctaggcctggcttctgaggcggttgcggtgctcggtcgccgcctaggcggggcagggtgcgagcaggggcttcgggccacgcttctcttggcgacaggattttgctgtgaagtccgtccgggaaacggaggaaaaaaagagttgcgggaggctgtcggctaataacgaaggtgacctgctgagaaaagtggtacaaatactgggaaaaacctgctcttctgcgttaagtgggagacaatgtcacaagttaaaagctcttattcctatgatgccccctcggatttcatcaatttttcatccttggatgatgaaggagatactcaaaacatagattcatggtttgaggagaaggccaatttggagaataagttactggggaagaatggaactggagggctttttcagggcaaaactcctttgagaaaggctaatcttcagcaagctattgtcacacctttgaaaccagttgacaacacttactacaaagaggcagaaaaagaaaatcttgtggaacaatccattccgtcaaatgcttgttcttccctggaagttgaggcagccatatcaagaaaaactccagcccagcctcagagaagatctcttaggctttctgctcagaaggatttggaacagaaagaaaagcatcatgtaaaaatgaaagccaagagatgtgccactcctgtaatcatcgatgaaattctaccctctaagaaaatgaaagtttctaacaacaaaaagaagccagaggaagaaggcagtgctcatcaagatactgctgaaaagaatgcatcttccccagagaaagccaagggtagacatactgtgccttgtatgccacctgcaaagcagaagtttctaaaaagtactgaggagcaagagctggagaagagtatgaaaatgcagcaagaggtggtggagatgcggaaaaagaatgaagaattcaagaaacttgctctggctggaatagggcaacctgtgaagaaatcagtgagccaggtcaccaaatcagttgacttccacttccgcacagatgagcgaatcaaacaacatcctaagaaccaggaggaatataaggaagtgaactttacatctgaactacgaaagcatccttcatctcctgcccgagtgactaagggatgtaccattgttaagcctttcaacctgtcccaaggaaagaaaagaacatttgatgaaacagtttctacatatgtgccccttgcacagcaagttgaagacttccataaacgaacccctaacagatatcatttgaggagcaagaaggatgatattaacctgttaccctccaaatcttctgtgaccaagatttgcagagacccacagactcctgtactgcaaaccaaacaccgtgcacgggctgtgacctgcaaaagtacagcagagctggaggctgaggagctcgagaaattgcaacaatacaaattcaaagcacgtgaacttgatcccagaatacttgaaggtgggcccatcttgcccaagaaaccacctgtgaaaccacccaccgagcctattggctttgatttggaaattgagaaaagaatccaggagcgagaatcaaagaagaaaacagaggatgaacactttgaatttcattccagaccttgccctactaagatttggaagatgtcgtgggtgttcctgaaaagaaggtacttccaatcaccgtccccaagtcaccagcctttgcattgaagaacagaattcgaatgcccaccaaaagaagatgaggaagaggacgaaccggtagtgataaaaggtcaacctgtgccacattatggggtgacttttaaggccaaatcccaaggcagaattgtgaaatatgccttaatggatgagtctcgagaaaagacgtagttaagaaggaaaga

SEQ ID NO: 349515 - DNA, 854 bp, Homo Sapiens
gggggctcgcgcttcgttgtcagatctgaggcgaggctaggtgagccgtgggaagaaaagagggagcagctagggcgcgggtctccctcctcccggagtttggaacggctgaagttcaccttccagcccctagcgccgttcgcgccgctaggcctggcttctgaggcggttgcggtgctcggtcgccgcctaggcggggcagggtgcgagcaggggcttcgggccacgcttctcttggcgacaggattttgctgtgaagtccgtccgggaaacggaggaaaaaaagagttgcgggaggctgtcggctaataacggttcttgatacatatttgccagacttcaagatttcagaaaaggggtgaaagagaagattgcaactttgagtcagacctgtaggcctgatagactgattaaaccacagaaggtgacctgctgagaaaagtggtacaaatactgggaaaaacctgctcttctgcgttaagtgggagacaatgtcacaagttaaaagctcttattcctatgatgccccctcggatttcatcaatttttcatccttggatgatgaaggagatactcaaaacatagattcatggtttgaggagaaggccaatttggagaataagttactgggggaagaatggaactggagggctttttcagggcaaaactcctttgagaaaggctaatcttcagcaagctatcgtcacacctttgaaaccagttgacaacacttactacaaagaggcagacaaaagaaaatcttgtggaacaatccattccgtcaaatgcttgttctgccttggaaagttgaggcacgcatatccagaaaacatccagccgagctccgagaagac

SEQ ID NO: 349516 - DNA, 823 bp, Homo Sapiens
  misc_feature (121)..(208): n is a, c, g, or t
gaacagtttctacatatgtgccccttgcacagcaagttgaagacttccataaacgaacccctaacagatatcatttgaggagcaagaaggatgatattaagacagggtcttgctccgtcannnnnnnnnnnnnnnnnnnnnnnnnnnnnnnnnnnnnnnnnnnnnnnnnnnnnnnnnnnnnnnnnnnnnnnnnnnnnnnnnnnnnnnncctgttaccctccaaatcttctgtgaccaagatttgcagagacccacagactcctgtactgcaaaccaaacaccgtgcacgggctgtgacctgcaaaagtacagcagagctggaggctgaggagctcgagaaattgcaacaatacaaattcaaagcacgtgaacttgatcccagaatacttgaaggtgggcccatcttgcccaagaaaccacctgtgaaaccacccaccgagcctattggctttgatttggaaattgagaaaagaatccaggagcgagaatcaaagaagaaaacagaggatgaacactttgaatttcattccagaccttgccctactaagattttggaacgatgttgtgggtgttcctgaacaagaaggtacttccaatcaccgtccccaagtcaccagcctttgcattgaagaacagaattcgaatgcccaccaaagaagatgaggaagaggacgaaccggtagtgattaaaagctcaacctgtgccaccattatggggtgcccttttaagccccaaatcccagaggcaagaactgtggaaatattgccctttctcctttgattctcgcagacaaagaaccgtcagttacagacggagaagaca

SEQ ID NO: 349517 - DNA, 1498 bp, Homo Sapiens
  misc_feature (571)..(594): n is a, c, g, or t
  misc_feature (1334)..(1334): n is a, c, g, or t
  misc_feature (1456)..(1456): n is a, c, g, or t
  misc_feature (1463)..(1463): n is a, c, g, or t
gcaattggacaatgaaacgtggttaaaagcaggcggacggtccggaatctcgggatatcgtcgaccacgcgtcgatcctctgtgtgtctctactctagatgcctaggagagtctagatacttctaaaagctcctaaagcttatattccaagagagatgactatctgagttcgtgtaggtctctaccgcacaggattacattaaagcttgttatgacgttatatgtttccaggtgggcatggttgtatttcccagtttaacagtgcagtaataggggcatgtattttattatatttaagggtgggttaggagtatcctttgctggagactgagaaaggggtgtagtttaagttccatcaggtccagtacagtactaggagtcataatactttataatcaattaaataagatagaaccactgagagaataatgtattttgttaaagtggagaaatgtggtttgcttttttgagcttgcgctttttcagtatttgagcatagggagataattgttttataatacaaaagtaaccacttggaattttaaagataatgttatgtgtgtatgtgaannnnnnnnnnnnnnnnnnnnnnnnttcctaaacagaagaaaagatacctttccgttacaactggtatcaactcctcttttctaattgctgtgaaatggcaactgttgataaattattgtgattgttttaaaatctaatgggaagtaaaatatattttgattttacccagcttaatctgtaaagtagcacttaaatatatctgatagcaacacttaagatattgcatggggattactttcctatcatccatatgcatttgtgcaacttcaaacatattgggtgcttctgaattcctgatgattggatttaagctattgaaaattggataatttaaacttaatgatttttataattttctgatcttaaaatttggttaatgcctataatctgttgctttttctcaatatgtgtcctattggaaattcctcaaatcgttggtgccatcagtgatttacaaacaatattttgatattgcagatgacttgcttactgtatttgcattgttagaaaacagtttgtagacaatgattcttttttaataaaatcaaataattctaaaagtgctagagaatttaactaaaagctggttcccaaatgcatagctggcattttaatttaaattcaaatctacatagagaacatccgtgtaaatcatctaactggatttttcccattggtcattcccaaacacacctatggtcctagaaaccttaagagaagcaccctgtaaccttttatgtggtttgcctttaagaggcccaggngcttctcctttatgatttgagttggcctcttcataaattagtgctgtttactttcagagggagcagagaagttgctgttatgtttttgcatccctttacccccatggcaaagttgctgtatngatgccnactaaactgctctttaggggagccttctggagggg

SEQ ID NO: 349518 - DNA, 1992 bp, Homo Sapiens
  misc_feature (297)..(323): n is a, c, g, or t
  misc_feature (346)..(360): n is a, c, g, or t
  misc_feature (1538)..(1538): n is a, c, g, or t
  misc_feature (1541)..(1541): n is a, c, g, or t
  misc_feature (1544)..(1544): n is a, c, g, or t
  misc_feature (1547)..(1547): n is a, c, g, or t
  misc_feature (1549)..(1549): n is a, c, g, or t
  misc_feature (1552)..(1552): n is a, c, g, or t
  misc_feature (1558)..(1558): n is a, c, g, or t
  misc_feature (1564)..(1564): n is a, c, g, or t
  misc_feature (1569)..(1569): n is a, c, g, or t
  misc_feature (1578)..(1578): n is a, c, g, or t
  misc_feature (1582)..(1582): n is a, c, g, or t
  misc_feature (1586)..(1586): n is a, c, g, or t
  misc_feature (1591)..(1591): n is a, c, g, or t
  misc_feature (1606)..(1606): n is a, c, g, or t
  misc_feature (1621)..(1621): n is a, c, g, or t
gggtgtataatttatactattcagaactgtgacattaattctttctgggagaaaagtgatttaaaacttttttgatgcatagttgaggtacccaaatatcaaaggcagagaccccatggggctccaaagagctgcagtctccttcccaaggttttctggatataaatttgcatggtatagtcataatagcttttgagctttttatatgcatttggcaccaagactgggatccacaactttgtagacactgcgatgaagttaacatattagctatactataaatagtgtttgtaactnnnnnnnnnnnnnnnnnnnnnnnnnnnaatacatacatatattcctcgtnnnnnnnnnnnnnnnctttttaagatccttgggtatgtgtttgctttactccatttcagaagaaaattacttttcttctaacaaaattattttatagcttctccatttttaaaacttgtgagagcattgagaagagaactctgactgtgttaacagaagagagttgaattggagtctctgttgtgttaaaatgacccctcgttactccacagtagttatttgagccagtgactgagtcgcgttgaggaattctgaacccggacctctgacgttgttgggaggtggctgttacccacacccagacctcttgagtaaggacagaaacgttatcattggggatataatgagatttctttcttaacaattgaaagtaataaagagttaattttctcagtagtcctgtctttccaaaatgcgccacaggggctcaagatctacagaagaatcttgttatgacagtttgttattacccatattcagatatccttgagataatggaagagccctgctacataactccctacagagaaagactgatagacttgagtagtccttaaaacaagtgttattcctgttcaccaaccccgggactgtggaggggtttcactgtctataccatgcgacatccatttcccctgaatctcaaacgaactagaaagtatgtcatgataatatttccattagatttggaagctacctgtacatctgcaatattgtgtttttaacgccagcacccagaactttgacatgttcagtcactccctgaaaggcacttctctcttgtccaaacacagcgttgacatttttactgaggagatcatctcaaaggtgatgccaaacgagtctggggctggttttaaggggacaggcacattgcagttgtaggtgttcattttcagcatctagtagataatccattggtgtttgtcccaccattggtgtattctaacaagaatgtgtccaactttgaatctcctggcttgaaagtataaaccatcacttaattcttattttaactctccacctgaaaaccagttcatatttctggccattttatgtaagcaaaactgaacaattggtgaaacattttgttactcttggaattgactctggctgtcagtgtgagccattagagtaacatcgaatcttggggcaaagagctgcccaggtgaattaaatttttccaggacacntangcntangntgntgcgcnttgganttganttaccctcnttcntacntgcanttgaaaaggcgccantgttttccctgaaantacctaaattcccaacacccgggtaaacaatgaccttccagagagtggctcccgtatgcctctccctaggaccaacccccatgaacatgttttgtcacgtttgtctcatgtttctacttcacaagtcagtgagtgtgtttaaggtaagtacaggattattctagtaggaataggcgattgctgtcataatcaattctcatgttgatttcattttattgtaaagataaatttaaacccagttttgcttaagcacattgatgtaattttttggtattatttgacatgaaaaaacagcaaaattgagtgatagatacaatatgaaacttgttgatgaatgaattcaaatttattaaaaaaggagtaactgacct

SEQ ID NO: 349519 - DNA, 689 bp, Homo Sapiens
  misc_feature (153)..(186): n is a, c, g, or t
agatcctttccatccctgttcatcaataacctaagacaaaacgagataatggtacataccgctgtgaagcttcaaacatagtggggaaagctcactcggattatctgctgtatgtatacgatccccccacaactatccctcctcccacaacannnnnnnnnnnnnnnnnnnnnnnnnnnnnnnnnntccttaccatcatcacagacacaacggcgacgacagaaccagcagttcacggccttactcagttgcccaattccgcagaagaactggacagtgaggacctctcagattcccgagcaggtgaagaaggctcgatcagggcagtggatcatgccgtgatcggtggcgtcgtggcggtggtggtgttcgccatgctgtgcttgctcatcattctggggcgctattttgccagacataaaggtacatacttcactcatgaagccaaaggagccgatgacgcagcagacgcagacacagctataatcaatgcagaaggaggacagaacaactccgaagaaaagaaagagtacttcatctagatcagcctttttgtttcaatgaggtgtccaactggccctatttagatgataaagagacagtgatattggaacttgcgagaaattcgtgtgtttttttatgaatgggtggaaaggtgtgagactgggaaggcttgggatttgctgtgt

SEQ ID NO: 349520 - DNA, 714 bp, Homo Sapiens
  misc_feature (536)..(536): n is a, c, g, or t
ccagagacaccaaggaggccagaggcaccaagaggccagaggcaccaagcagggatagttgtggggggatcgtatacatacagcatataatccgagtgagctttccccactatgtttgaagcttcacagcggtatgtaccattatctgttttgtttaggttattgatgaacaggttgggcccagacaagtacggcgtgttgaggcatttcatcatcgactctcacccaagttaccatcacaggctggggcttcccgatggcttcacatgttaactcaagcgcgtccccttcccgggttaagccttgtagaggataagtcatctgaatgtgcacttgaggcttatactgtacttctagataccgctgggtctgcaggtttccagtgaccgcagggtgctccacctggcagatcactgggaccccatcgtcctccttgtgcaccttcagcatcagctgactggtcacagtgtacatgtctgaccactcttgccacctccgatttgccttttagctctgtgattccctgttcgaaccancctgatagtctgtgagtctggctgtggctgcgccatagcagtgcagttgacttcaatctcctcaccttccaccgcagtgtctttctggatatcgatcatcagattacagtggtggcgaccaggactgtgatagctggtgtaactttcctgtgggggatcggtatagagctggcaaaag

SEQ ID NO: 349521 - DNA, 1202 bp, Homo Sapiens
  misc_feature (165)..(211): n is a, c, g, or t
  misc_feature (1172)..(1172): n is a, c, g, or t
ggttgggctcgcggcgctgtgattggtctgcccggactccgcctccagcgcatgtcattagcatctcattagctgtccgctcgggctccggaggcagccaacgccgccagtctgaggcaggtgcccgacatggcgagtgtagtgctgccgagcggatcccagtgnnnnnnnnnnnnnnnnnnnnnnnnnnnnnnnnnnnnnnnnnnnnnnnttctgctgttgctcttctccgccgcggcactgatccccacaggtgatgggcagaatctgtttacgaaagacgtgacagtgatcgagggagaggttgcgaccatcagttgccaagtcaataagagtgacgactctgtgattcagctactgaatcccaacaggcagaccatttatttcagggacttcaggcctttgaaggacagcaggtttcagttgctgaatttttctagcagtgaactcaaagtatcattgacaaacgtctcaatttctgatgaaggaagatacttttgccagctctataccgatcccccacaggaaagttacaccaccatcacagtcctggtcccaccacgtaatctgatgatcgatatccagaaagacactgcggtggaaggtgaggagattgaagtcaactgcactgctatggccagcaagccagccacgactatcaggtggttcaaagggaacacagagctaaaaggcaaatcggaggtggaagagtggtcagacatgtacactgtgaccagtcagctgatgctgaaggtgcacaaggaggacgatggggtcccagtgatctgccaggtggagcaccctgcggtcactggaaaacctgcagacccagcggtatctagaagtacagtataagcctcaagtgcacattcagatgaccttatcctctacaaggctttaacccggggaaaggggacgccgcttgaatttaaccatgtggaagcccttcggggaaagccccccaccctggtgatgggtaactttggggggaaaaatccaatgtatgaaaatgcctctcaccagcccccttacttgttctggggcccaaccctggtttccttccaatataccctctaaccaaaaacccggaccaagtgggggaacctatcccgccttgtggaaacgcttctcaaaaacatttatggggggggagaaaacctcccccttccggngattaattaatgcgccccggaatggggaac

SEQ ID NO: 349522 - DNA, 2435 bp, Homo Sapiens
aaaaacggcccgagaagctcgcccggagaacggggaggaatatgctgtggagctcctctgccatataaacaaaaagaggaaatctttcaaacatggctgaagcaaagacccactggcttggagcagccctgtctcttatccctttaattttcctcatctctggggctgaagcagcttcatttcagagaaaccagctgcttcagaaagaaccagacctcaggttggaaaatgtccaaaagtttcccagtcctgaaatgatcagggctttggagtacatagaaaacctccgacaacaagctcataaggaagaaagcagcccagattataatccctaccaaggtgtctctgtcccccttcagcaaaaagaaaatggcgatgaaagccacttgcccgagagggattcactgagtgaagaagactggatgagaataatactcgaagctttgagacaggctgaaaatgagcctcagtctgcaccaaaagaaaataagccctatgccttgaattcagaaaagaactttccaatggacatgagtgatgattatgagacacagcagtggccagaaagaaagcttaagcacatgcaattccctcctatgtatgaagagaattccagggataacccctttaaacgcacaaatgaaatagtggaggaacaatatactcctcaaagccttgctacattggaatctgtcttccaagagctggggaaactgacaggaccaaacaaccagaaacgtgagaggatggatgaggagcaaaaactttatacggatgatgaagatgatatctacaaggctaataacattgcctatgaagatgtggtcgggggagaagactggaacccagtagaggagaaaatagagagtcaaacccaggaagaggtgagagacagcaaagagaatatagaaaaaaatgaacaaatcaacgatgagatgaaacgctcagggcagcttggcatccaggaagaagatcttcggaaagagagtaaagaccaactctcagatgatgtctccaaagtaattgcctatttgaaaaggttagtaaatgctgcaggaagtgggaggttacagaatgggcaaaatggggaaagggccaccaggctttttgagaaacctcttgattctcagtctatttatcagctgattgaaatctcaaggaatttacagatacccccagaagacttaattgagatgctcaaaactggggagaagccgaatggatcagtggaaccggagcgggagcttgaccttcctgttgacctagatgacatctcagaggctgacttagaccatccagacctgttccaaaataggatgctctccaagagtggctaccctaaaacacctggtcgtgctgggactgaggccctaccagacgggctcagtgttgaggatattttaaatcttttagggatggagagtgcagcaaatcagaaaacgtcgtattttcccaatccatataaccaggagaaagttctgccaaggctcccttatggtgctggaagatctagatcgaaccagcttcccaaagctgcctggattccacatgttgaaaacagacagatggcatatgaaaacctgaacgacaaggatcaagaattaggtgagtacttggccaggatgctagttaaataccctgagatcattaattcaaaccaagtgaagcgagttcctggtcaaggctcatctgaagatgacctgcaggaagaggaacaaattgagcaggccatcaaagagcatttgaatcaaggcagctctcaggagactgacaagctggccccggtgagcaaaaggttccctgtggggcccccgaagaatgatgataccccaaataggcagtactgggatgaagatctgttaatgaaagtgctggaatacctcaaccaagaaaaggcagaaaagggaagggagcatattgctaagagagcaatggaaaatatgtaagctgctttcattaattaccctactttcattcctcccaccccaagcaaatcccaacatttctcttcagtgtgttgacttctatcctgttaacactgtaatatctttaaatgatgtacaggcagatgaaaccaggtcactggggagtctgcttcatttcctctgagctgttatcttgtgtatggatatgtgtaaatgttatgactccttgataaaaaatttattatgtccattattcaagaaagatatctatgactgtgtttaatagtatatctaatggctgtggcattgttgatgctcacatatgataaaaaagtgtcctataattctattgaaagtttttaatatttattgaattattttgttactgtctgtagtgttttgtggagtactggaccaaaaaaataaagcattataaatatatagttttatttataaggccttttctattgtgtgttttactgttgattaataaatgttatttctggacaa

SEQ ID NO: 349523 - DNA, 1064 bp, Homo Sapiens
  misc_feature (7)..(7): n is a, c, g, or t
  misc_feature (15)..(15): n is a, c, g, or t
  misc_feature (21)..(21): n is a, c, g, or t
  misc_feature (24)..(24): n is a, c, g, or t
  misc_feature (35)..(35): n is a, c, g, or t
  misc_feature (37)..(37): n is a, c, g, or t
  misc_feature (40)..(40): n is a, c, g, or t
  misc_feature (48)..(48): n is a, c, g, or t
  misc_feature (50)..(50): n is a, c, g, or t
  misc_feature (52)..(52): n is a, c, g, or t
  misc_feature (55)..(55): n is a, c, g, or t
  misc_feature (59)..(60): n is a, c, g, or t
  misc_feature (63)..(63): n is a, c, g, or t
  misc_feature (75)..(75): n is a, c, g, or t
  misc_feature (85)..(85): n is a, c, g, or t
  misc_feature (88)..(88): n is a, c, g, or t
  misc_feature (92)..(92): n is a, c, g, or t
  misc_feature (102)..(102): n is a, c, g, or t
  misc_feature (104)..(104): n is a, c, g, or t
  misc_feature (106)..(107): n is a, c, g, or t
  misc_feature (132)..(132): n is a, c, g, or t
  misc_feature (143)..(144): n is a, c, g, or t
  misc_feature (150)..(150): n is a, c, g, or t
  misc_feature (158)..(158): n is a, c, g, or t
  misc_feature (161)..(161): n is a, c, g, or t
  misc_feature (171)..(171): n is a, c, g, or t
  misc_feature (176)..(177): n is a, c, g, or t
  misc_feature (289)..(317): n is a, c, g, or t
ccccccnagggcccngggggncgnggggccgcacnanccntttttttncngngcncctnnggncgcccctcccgnttttccccanccncccncccccctgtncngnntgtctgctttgggtgcggttttgtnctcggtttggnntggggngggagganggncgggggaggngaggnntgccctgcagcccttttccgtggcttctctgcatttgggttattattatttttgtaacaatcccaaagcaaatctgtctccaggctggagaggcaggagccctggggtgagnnnnnnnnnnnnnnnnnnnnnnnnnnnnncctggagtgttaggaggagagtgaaggtagaggggtgaggaagggtaaggggcagggctggtttcagctgggggctctcaccagccctcctttcagcctctacaacagagcagcttcccagacttctccaggaacccagaaacgggatggttgtcggcaaaggttgggagtggcttttcctctggtagccacacacctgagcactacggacagggaggcaggtgccaccttgacacctctcttccatagcaatgggaaagtgatgagtgcgggagtcctgaggagatgtggcctgcagacaacatgcagccatgcagggacccaggactgtaacctggggaggacgcgggtccctgcaaggaagagtagatttggagaggaaggatggaggtggactctcaccccattccccccggaaatgaacaaagccgggccctttccataggaactgcccttggagatagcagagtgtggctgcccctccttgctccagcagcagtgggagaggcactgctctggggcctgaactgcctctgcttccccccctgaggggcccctcactcttacccaagactctggattgtgcacggcaaccactcctcccatggcattgctcagcaactacttctcccttcccggccaccctgtgcccccttcctggtcccaacgccagcccttcatccttcctccctcagcagccaggcagacataacaacaaaactactaaaaggagcttcactgcaatat

SEQ ID NO: 349524 - DNA, 1136 bp, Homo Sapiens
tggggtcgggacgatcagcacaagagatgtagctgagaaaaaacaaaatggtatccgtccggaattcttgggatccggtccccacctcggccccgggctccgaagcggctcgggggcgccctttcggtcaacatcgtagtccaccccctccccatccccagcccccggggattcaggctcgccagcgcccagccagggagccggccgggaagcgcgatgggggccccagccgcctcgctcctgctcctgctcctgctgttcgcctgctgctgggcgcccggcggggcaaacctctcccaggacggctactggcaggagcaggatttggagctgggaactctggctccactcgacgaggccatcagctccacagtctggagcagccctgacatgctggccagtcaagacagccagccctggacatctgatgaaacagtggtggctggtggcaccgtggtgctcaagtgccaagtgaaagatcacgaggactcatccctgcaaatggtcttaaccctgctcagcagactctctactttggggagaagagagcccttcgagataatcgaattcagctggttacctctacgccccacgagctcagcatcaggcatcagcaatgtggccctggcacgacgagggcgagtacacctgctcaattcttcactatgcctgtgcgaactgccaagtccctcgtcactgtgctaggaattccacagaagcccatcatcactggttataaatctgcattacgggaaaaagacacagccaccctaaactgtcagtcttctgggagcaagcctgcagcccggctcacctggagaaagggtgaccaagaactccacggagaacccacccgcatacaggaagatccccatggtaaaaccttcactgtcagcagctcggtgacattccaggttacccgggaggatgatggggcgagcatcgtgtgctctgtgaaccatgaatctctaaagggagctgacagatccacctctcaacgcattgaagttttatacacaccaactgcgatgattaggccagaccctccccatcctcgtgagggccagaagctgttgctacactgtgagggtccggcaatccagttcgcccccgcgagggaccgagctcgattcgta

SEQ ID NO: 349525 - DNA, 555 bp, Homo Sapiens
atgaggtacagaaattatcggggcagagacactggagctgctatacgccaggtggcctcttggggttcgttctggggaagctgtagatctccagacttgtatcttactttaacttggcctttgtgggaaactcagcgcactgagttagggagtggccccttcccatttgtgctgctttgcagaagaactaattgcaggcggacattattggacagtcagggaaatgagattctcaggctcagacaattaccagacgaggatagaaagaatgagattatctgaagcaaaggcaatctgaagaatgtggaaagtaacgaggagaccaggaaatggatcttcttacactggattgccgtgaacctcacagtgtaacaacagcttctgcccctcacgaggatggagagggtctggcctaatcatcgcagttggtgtgtctgtggagaaggaaatggtatcaatgaatacctccccacacggcttaggagattccctcacttagttgcacactacagcttctacctctaaatgtttccgcagctcaagaagtgcaacaaa

SEQ ID NO: 349526 - DNA, 1722 bp, Homo Sapiens
  misc_feature (1569)..(1599): n is a, c, g, or t
tcgctccgagcgccctatttaatccccgcgactgcagcagcgccggctccctcccggtccccacctcggccccgggctccgaagcggctcgggggcgccctttcggtcaacatcgtagtccaccccctccccatccccagcccccggggattcaggctcgccagcgcccagccagggagccggccgggaagcgcgatgggggccccagccgcctcgctcctgctcctgctcctgctgttcgcctgctgctgggcgcccggcggggccaacctctcccaggacgacagccagccctggacatctgatgaaacagtggtggctggtggcaccgtggtgctcaagtgccaagtgaaagatcacgaggactcatccctgcaatggtctaaccctgctcagcagactctctactttggggagaagagagcccttcgagataatcgaattcagctggttacctctacgccccacgagctcagcatcagcatcagcaatgtggccctggcagacgagggcgagtacacctgctcaatcttcactatgcctgtgcgaactgccaagtccctcgtcactgtgctaggaattccacagaagcccatcatcactggttataaatcttcattacgggaaaaagacacagccaccctaaactgtcagtcttctgggagcaagcctgcagcccggctcacctggagaaagggtgaccaagaactccacggagaaccaacccgcatacaggaagatcccaatggtaaaaccttcactgtcagcagctcggtgacattccaggttacccgggaggatgatggggcgagcatcgtgtgctctgtgaaccatgaatctctaaagggagctgacagatccacctctcaacgcattgaagttttatacacaccaactgcgatgattaggccagaccctccccatcctcgtgagggccagaagctgttgctacactgtgagggtcgcggcaatccagtcccccagcagtacctatgggagaaggagggcagtgtgccacccctgaagatgacccaggagagtgccctgatcttccctttcctcaacaagagtgacagtggcacctacggctgcacagccaccagcaacatgggcagctacaaggcctactacaccctcaatgttaatgaccccagtccggtgccctcctcctccagcacctaccacgccatcatcggtgggatcgtggctttcattgtcttcctgctgctcatcatgctcatcttccttggccactacttgatccggcacaaaggaacctacctgacacatgaggcaaaaggctccgacgatgctccagacgcggacacggccatcatcaatgcagaaggcgggcagtcaggaggggacgacaagaaggaatatttcatctagaggcgcctgcccacttcctgcgccccccaggggccctgtggggactgctggggccgtcaccaacccggacttgtacagagcaaccgcagggccgcccctcccgcttgctccccagcccacccacccccctgtacagaatgtctgctttgggtgcggttttgtactcggtttggaatnnnnnnnnnnnnnnnnnnnnnnnnnnnnnnnttgccctcagccctttccgtggcttctctgcatttgggttattattatttttgtaacaatcccaaatcaaatctgtctccaggctggagaggcaggagccctggggtgagaaaagcaaaaaaa

SEQ ID NO: 349527 - DNA, 544 bp, Homo Sapiens
  misc_feature (409)..(409): n is a, c, g, or t
  misc_feature (476)..(476): n is a, c, g, or t
  misc_feature (502)..(502): n is a, c, g, or t
  misc_feature (510)..(510): n is a, c, g, or t
  misc_feature (524)..(524): n is a, c, g, or t
  misc_feature (531)..(531): n is a, c, g, or t
cacagcaccagcaacatgggcagctacaaggcctactacaccctcaatgttaatgaccccagtccggtgccctcctcctccagcacctaccacgccatcatcggtgggatcgtggctttcattgtcttcctgctgctcatcatgctcatcttccttggccactacttgatccggcacaaaggaacctacctgacacatgaggcaaaaggctccgacgatgctccagacgcggacacggccatcatcaatgcagaaggcgggcagtcaggaggggacgacaagaaggaatatttcatctagaggcgcctgcccacttcctgcgccccccagggccctgttggggacttgctggggccgttcaccaacccggacttgttacagaggcaaccgcaggggccgcccctcccgnttgcttccccagcccacccacccccttgttacagaatgtctggtttggggtgcggtttttgtaattnggttttggattggggaagggaggganggcggggngaggggagggtttnctttagncttttcgtgggtt

SEQ ID NO: 349528 - DNA, 1432 bp, Homo Sapiens
  misc_feature (14)..(14): n is a, c, g, or t
  misc_feature (43)..(43): n is a, c, g, or t
tgaaaggtttaccncagtacatttagttactggaaagctaganttccctcaaaagtcagaagtcctttaaacagggtaaattttaaaccccttagttaaagttttcaaaacccccaggatgtaccttacctagtcaaaggtatttttgcatttccaaaggcggctgaattttgatttgtgcccaatgctgatcatttccaggcggtatgaaatactacacccttggtaaacccgtttatggaaatatcagtatttttaacagtaaacctctggaagtttctttattttgatgggaagagcaaaatagcataacacccactatcatatgcaccaaaccaacaaacaaaaacaagaaaaacatcgaactaaagttatcaaaggcttacactgcctgctattccagggcctagaaactgtgaaacttaccccagaaacactgggttgtgggagagccaagaccatggtggcagcttggcatccttggcactgggttactgatctatttctaaacacagttctaatttcagcttttttatatagtcatagttgctctgtcattataaacattttcttctaatgcagcctctacaatagtttaaaaacaaaagtttagtaaattgcacctgtcttcagtatttccaacaattctatggtaaactcattaataatactaaggttttctttcctcttattttggcaaataattcttacttttcccaggactgtaaacaaatttaaaaaattaaattcttgttatttctgagtatcaaaaccaattttatttacattaacatattacatggttactgtgtggataaatgtgaaatatattattaaaatcagaacacttaaatgtaccattatttattgaattagctgtggaatttaatttactgaaatcctctaatgaaacagcactacaggaaactcccctctcccctaggtttattttttcccccctcaaagccattatatcttaacatataaagggaacctgggagtagagggattaatatctttttgtaataaatatggtttagttctaaattggaacatccagataccaatatgctcactgaagtcaaattattttgtaaactgcaggtaccacaaagaaattggatctgcattactatgaaaattccaatgccatgataatccataccaccagtatagcagcaattctaacagcccccctactgtcatactaatgcaggctgaccagtcttttcacagtgattaaatgcaattctagcatatataacctacatgttttcttaaagaggtttctgatttttttggagaggaggaggaagattaaaagacattcaaaatacatcttatcaaagaaatttataatatacaccatactctattcttggaaattatttaacaaaataaaaatatcagctaccctaaatgtcacgtaccc

SEQ ID NO: 349529 - DNA, 659 bp, Homo Sapiens
  misc_feature (83)..(83): n is a, c, g, or t
ggtttgtgaggctcgcactggccgcagaccctcgggctcgatcgcccgggagccaggactcggcgacgcgaggctgccgggcntacccggcagaaggcttcgggggcgcaaactaatgggactggctcgctcggcagccatctccccgctcttctaagtacactgagcagggcccgcgctgaagtagaagctgtccgggggcgcgtagcccggagtcccagtgtggcccggaggaacggagcccgtgccagggcggcccagtcgggagcccggggaccgagcttgtgctgtggggaaacccccacttcttccaagggacagcgatcccgggacggtcgaggcgtcggggcggtcaccgagacctctgcgggaagaccccgtcggggagagggcgcgcagccccgaagcgtctcgggaagtcgagcggaatcgggcgggatcacccgggggcgcagagcccccgtcgcgcctcgtgcggcagcggagagcccaggagaacgagccctcgggggccgaagcccatgcccgggttgggggcggctgcccagtgagtcctcctggccggccgggcggagaagagcgacaccgaaagccggcgggaggggagcacttcaaggccgcggctgcggaggatgggcgcctgaacggcttccgagcgc

SEQ ID NO: 349530 - DNA, 1179 bp, Homo Sapiens
tgatcttctttccaagccaaaattcagtggagttgaaaagattaagaccattggcagcacatacatggcagcaacaggtctgagcgctgtgcccagccaggagcactcccaggagcccgagcggcagtacatgcacattggcaccatggtggagtttgcttttgccctggtagggaagctggatgccatcaacaagcactccttcaacgacttcaaattgcgagtgggtattaaccatggacctgtgatagctggtgtgattgaagctcagaagccacaatatgatatctggggcaacactgtcaatgtggccagtaggatggacagcaccggagtcctggacaaaatacaggttaccgaggagacgagcctcgtcctgcagaccctcggatacacgtgcacctgtcgaggaataatcaacgtgaaaggaaagggggacctgaagacgtactttgtaaacacagaaatgtcaaggtccctttcccagagcaacgtggcatcctgaagagtcaccttcattttggcaagaagactgtattttcaggaaggtatcacacactttctgactgcaacttctgtcccttgtttttgatgtgcgtgctgtctgtcctatggagcctctgcagactcgttctcgtgacccagtggcataccgtttggtgtctgatgtgtgcccagatcgttctgccacttgcactgtgcttgctcctaagcaaaagggaaaaggagcgcgcgtgatagaagaaaagcactgggagaactaacagaggagaaaggtgaaacacacacacattcttaaggcaataaaactagggggtgtatattatcttctggtgcatgttcttttctggaaaatatggtagctcgccaaccgcatctgctcatctgatattcaaacacacagtattcgtgaataagttgattctgtcccccacgtggactctgtgctcacccattgtctcattgccagtggtgtccaagggcccccgttgggacccacggctctcgtccctctgctccgtgtgtctcatgccagcagcacgtcgccatccgtcaccagaattagtcctcacagcctaggaccagttttgtatcaaactcgtctgatgttttgatgccatttgtcttttgtaaagttaattcattaaaagttttatgtactttgatttacagtgcctg

SEQ ID NO: 349531 - DNA, 1081 bp, Homo Sapiens
tggaccggtccggaattccctgggatactgtgcgactacagccaggtcttattttagaatcaggcatttggaaagacctgaagaccatgggctctgtgtctctctctatattcttcatcacactgcttgttctgggtagacaggttagacttcttatggaagaacaaattcaaaaaagagcgggaggagatagagaccatggagaacctgaaccgcgtgctgctggagaacgtgcttcccgcgcacgtggctgagcacttcctggccaggagcctgaagaatgaggagctataccaccagtcctatgactgcgtctgcgtcatgtttgcctccattcctggatttcaaagaattttatacagaatccgacgtgaacaaggagggcttggaatgccttcggtcctgaacgagatcatcgctgactttgatgatcttctttccaagccaaaattcagtggagttgaaaagattaagaccattggcagcacatacatggcagcaacaggtctgagcgctgtgcccagccaggagcactcccaggagcccgagcggcagtacatgcacattggcaccatggtgggagtttgcttttgccctgggtagggaagctggatgccatcaacaagcactccttcaacgacttcaaattgcgagtgggtattaaccatggacctgtgatagctggtgttgattgggagctccagaagccacaatatgatatctggggggcaacactgttcaatgtgggcccagtagggatgggacaggcacccggagttcctgggaccaaattacagggttacccgaaggaaaacgaagccctccgttcctggcaaacccctcgggataacacgtggccccctggtccgagggaataatcccaccggtgcaaaggggaaaggggggggcccctgaaaagaccctaacctttgttaaaacacccggaaatgggccaaggggctccccttttcccccccaaagcaaacgtggggctatcccttgaaaggaagcccccccctccctttcttgggccaagaaagaaactgggtattttttcccggggaaagggttttttcccccc

SEQ ID NO: 349532 - DNA, 686 bp, Homo Sapiens
  misc_feature (32)..(32): n is a, c, g, or t
  misc_feature (121)..(121): n is a, c, g, or t
  misc_feature (126)..(126): n is a, c, g, or t
caaacctgttgctgcccagtaagtgcctgccnaaaggtccttaaactttttcaaactcccactgaaattttggccttggaaaagaagatcatcaaaagtcagcgatgatctcgttcaaggnaccgnaaggcattccaagccctccttgttcacgtcggattctgtaataaaattctttgaaatccggaatggaggcaaacatgacgcagacgcagtcataggactggtggtatagctcctcattcttcaggctcctggccaggaagtgctcagccacgtgcgcgggaagcacgttctccagcagcacgcggttcaggttctccatggtctctatctcctcccgctcttttttgaatttgttcttccataagaagtctaacctacagtaatattcattctgtctacccagaacaagcagtgtgatgaagaatatagagagagacacagagcccatggtcttcaggtctttccaaatgcctggtctctcaaataagacctggctgtagtccccaggacgtgggcgtgggtgtggagtaggatggtgttgtagcccaccaaggccaccatcatgatcaacatcttcagctcatagtttacccgcaggaacaccggaacaggatatcagtcccagaatgcagctgtagataaagtacgggaggaaaaataaaatttgcgcacgcagaatc

SEQ ID NO: 349533 - DNA, 506 bp, Homo Sapiens
gtccccctgcgccgccccgggcctgccggccggaggagccaccatacaccccgggtcgccgagcgcctggccgccccgcgcccgcgccgcgctccgcctgtggctgggctgcgtctgcttcgcgctggtgcaggcggacagtccctcagccccagtgaacgtcaccgtcaggcacctcaaggccaactctgcagtggtgagctgggatgttctggaggatgaggttgtcatcggatttgccatctcccagcagaagaaggatgtgcggatgctgcgcttcatccaggaggtgaacaccaccacccgctcatgtgccctctgggacctggaggaggatacggagtacatagtccacgtgcaggccatctccattcagggccagagcccagccagcgagcctgtgctcttcaagaccccgcgtgaggctgagaagatggcctccaagaacaaagatgaggtaaccatgaaagagatggggaggaaccaacagctgcggacaggcgagg

SEQ ID NO: 349534 - DNA, 1367 bp, Homo Sapiens
  misc_feature (335)..(335): n is a, c, g, or t
aagagaaaagagagagagaggtgctctggctccggggctcttctcccaacgggtcgaggtcccagctgaggctctcccaggacaagtctctcagccccagtgaacgtcaccgtcaggcacctcaaggccaactctgcagtggtgagctgggatgttctggaggatgaggttgtcatcggatttgccatctcccagcagaagaaggatgtgcggatgctgcgcttcatccaggaggtgaacaccaccacccgctcatgtgccctctgggacctggaggaggatacggagtacatagtccacgtgcaggccatctccattcagggccagagcccagnccagcgagcctgtgctcttcaagaccccgcgtgaggctgagaagatggcctccaagaacaaagatgaggtaaccatgaaagagatggggaggaaccaacagctgcggacaggcgaggtgctgatcatcgtcgtggtcctgttcatgtgggcaggtgtcattgccctcttctgccgccagtatgacatcatcaaggacaatgaacccaataacaacaaggaaaaaaccaagagtgcatcagaaaccagcacaccagagcaccagggcggggggcttctccgcagcaagatatgaaaaccttttcagtgcttgccctcagcagctaagaagacagacagtagagaatgtgagaggatctcatggttctgatgatgattatccaacaaacatctggccctctctacatctcttccctccatctccttgtaccctctggcttactgtcctctctctggcgcactttcctgaagcctcttattaactcccatctccagaagcacctcaacaatgtcagtggctgaggctgcactcagagggatgactgctgggggtagactgggtgccaggggccatgggcccaggacccagtcttggccattcagttgagtgaggctgaaggctgggtttgaaaaggcaaaaagacaagacatccaggcagggcttctcttttctttccacaagggacaagagcttggcttatttaggctacagccctgctgctgctcccttccttcttctgtcctgtttccagccttgcaagaaggctattcacaattaggcctggctgcttctctcatttttttcctcccagtttccaaacaagccctcagtgaacatcattgaagcgtgactgcctgtctgcagggagaaggattccatttttcttctcagctggtccccaggcccacgggcacagggagagggacaactgcagcagtggggaggaggcacagctagctgcacagttctctcttctccttgtcctagtcagatgaaggaggctgcactacaaacccaaattctgcaaaaaaaa

SEQ ID NO: 349535 - DNA, 1105 bp, Homo Sapiens
  misc_feature (983)..(983): n is a, c, g, or t
  misc_feature (986)..(986): n is a, c, g, or t
  misc_feature (988)..(988): n is a, c, g, or t
  misc_feature (990)..(992): n is a, c, g, or t
  misc_feature (994)..(994): n is a, c, g, or t
  misc_feature (996)..(1003): n is a, c, g, or t
  misc_feature (1005)..(1015): n is a, c, g, or t
ggggagtgaggcgtcgtccgtactggaggctagctcttgtcgcggccgcggcgagttaacatcgtttttccaatctgtccgcggctgccgccacccaagacagagccagaatgttcaggatgctgaacagcagttttgaggatgaccccttcttctcgtgagttacgggagccaggagtccggggtcgcgcgggaattaagtgagtccattcttgcacaccgagaaaatatgcgacagatgataagaagtttttctgaaccctttggaagagacttgctcagtatctctgatggtagagggagagctcataatcgtagaggacataatgatggtgaagattctttgactcatacagatgtcagctctttccagacaatggaccaaatggtgtcaaatatgagaaactatatgcagaaattagaaagaaacttcggtcaactttcagtggatccaaatggacattcattttgttcttcctcagttatgacttattccaaaataggagatgaaccgccaaaggtttttcaggcctcaactcaaactcgtcgagctccaggaggaataaaggaaaccaggaaagcaatgagagattctgacagtggactagaaaaaatggctattggtcatcatatccatgaccgagctcatgtcattaaaaagtcaaagaacaagaagactggagatgaagaggtcaaccaggagttcatcaatatgaatgaaagtgatgctcatgcttttgatgaggagtggcaaagtgaggttttgaagtacaaaccaggacgacacaatctaggaaacactagaatgagaagtgttggccatgagaatcctggctcccgagaacttaaaagaagggagaaacctcaacaaagtccagccattgaacatgggaaggagatcaaatggtttggggggacaaactccacctcaaaggcttcatctgtggaaaagcaacaaaaaataaatagcccatgcatttganaananannnanannnnnnnnannnnnnnnnnngggcgggccgcttctaaagtatcccctcgagggggccccaaggtttacgcggacccagctttttcttgaacaaagggtgtcccctattag

SEQ ID NO: 349536 - DNA, 870 bp, Homo Sapiens
gctcggtgccaggttcaagggcggaacttgtgaaggtgtctgccttctgtgaagttctcgggaacaggaattgtcatggccgacaccgttctcattctagtgttttccctagattgtggtcgtcctggtttgtacttccaaaccttcacctttgccactccgtcatcaaaagcatgagcatcgctttcattcagaattgatgaactcctggttgacctcttcatctccagtcttcttgttcttgaactgtggtgaaggacatgagctcggtcatggatatgatgaccaatagccatttttttctagtccaccgtcagaatctctcattgctttcctggtttccgttattcctcctggagctcgacgagtttgagttgaggcctgaaaaaccttttggcggttcatctcctattttggaaataagtcataactgaggaagaacaaaatgaatgtccatttggatccactgaaagttgaccgaagtttctttctaatttctgcatatagtttctcatatttgacaccatttggtccattgtctggaaagagctgacatctgtatgagtcaaagaatcttcaccatcattatgtcctctacgattatgagctctccctctaccatcagagatactgagcaagtctcttccaaagggttcagaaaaacttcttatcatctgtcgcatattttctcggtgtgcaagaatggactcagagaagaaggggtcatcctcaaaactgctgttcagcatcctgaacattctggctctgtcttgggtggcggcagccgcggacagattggaaaaacgatgttaactcgccgcggccgcgacaagagctagcctccagtacggacgacgcctcactcccgct

SEQ ID NO: 349537 - DNA, 1631 bp, Homo Sapiens
  misc_feature (1236)..(1236): n is a, c, g, or t
  misc_feature (1575)..(1575): n is a, c, g, or t
  misc_feature (1584)..(1584): n is a, c, g, or t
  misc_feature (1619)..(1619): n is a, c, g, or t
  misc_feature (1626)..(1626): n is a, c, g, or t
ggattggtgacctactaacagtgaccctgtggctctgtggaattttgaagtgccttttgtgaatcatgaatgaaacatttaacttgagaccctttaaaaaattcatccagaatctgttaccccttgggtagtttgatggaactgagttaagcagaagaccccagctgttttctgggtaagccaggctttgctgtatctggcagtcaggagagaggtcagcccatggtggaggtcttcagtgccgagggctcggatgagaacgtgtagttctttgacttggacctgggcagcgtcttctatggatgcctgccttgtgagcacccacaccttccctccccactgtcgggttgagtagccccagcgtggctgtgttaggagtcctttgcccaacattgtgctgcactggagcctggccctggcactgtcctcaggaccctgcccaagggcccaccgcagagcacacctatgctatggggagccctgctggcagccccgagagccatgccatggcctgcaggagccaggctcctgtgtggatgaagtccctcttcctctgtgccttgatcccttgggggtgcctttggtcatctcttctgtcctttcctgtctctgaaatagtcatcactccccttgactctctctgttcacgtcttctcagtctgcagagttaacttctgtaaggagtttaatctggggttccaagaaaacaagttccttgttaacatagcactgactttgcaacaatagaaaactaacaaatgagcaacaatataaagagtagaggtagttctcattgggtgtaacttcaacccattctgcttgtggttagaatttataattttgctaacgatgtaatttactaaggtttgaaatggtattctaacagtgagtccattgtcttgaggattaatctgatttataagtaatactgatagacatattttcgtacatctgagcagaaataaatgcatgtttctagcatatgtaatataaaaactccagaggataagtttacacttaacaagatgttgttttctatttttgaatttcttattatttccccctttttggtagtggagttgagagggggagcatactatttgtataaagaactgtcaccccagagtgacatttattttccaagatgaccctgaactcatgctgttggtttcatatggtgtttgtgtgctttgcctagattcaaggcctgaggatttgaggaaaatcgggattttntttttcctatttggttttcatgtaaaagttctaaatgtcacttattttgctaaataagaccctttcacaggatagtgtgcgcaatacctgtccgtgtttccaagcagagttcaagttcatgtcttcacaagtagatgagagtcacttccagtcgggggaagcccgcctgagcagtgttttgagagtgcgtacattggaggactgccccacgtccgtttgcactctgccttgcaaaacttactgtggagacgtgccccagactggtctcagaccagagtttgtggcacaggaaaacctggccccctaaaaagaagttttggaattggaagcctgataatntcgggaggntgaggcaggagaacggcgtgaacccgggaggcggngctgcantgagc

SEQ ID NO: 349538 - DNA, 513 bp, Homo Sapiens
  misc_feature (27)..(27): n is a, c, g, or t
  misc_feature (39)..(39): n is a, c, g, or t
tcaaaaaaaacaacagttcctcatccngaaccctcggcnactgaaaaacctcccacccagggctgaacctcctctccctgaactggcccagaaaacaacaaaaaccccggcttaccccagaaaacagctggggtccttcctgccttaactcagttcccatcaaacctacccaaggggtaacagattcctggatgaattttttaaagggtctcaagttaaatgtttcattcatgattcacaaaaggcacttcaaaattcccacagagcccacagggtcactgttagtaggtcaccaatcctcctgtacaggaccgatggagaagctctaagacaatgggctatgtgtttcacctgatggggtccctggccatttgtaaataaatctcggatattagctagtttgtcatttatcttgcagtcaagcatacacaaaacagaaagacacacagtatgtttgcactttgaataaatgagattttgctgtatcatggcagtttataaagtattctcaag

SEQ ID NO: 349539 - DNA, 754 bp, Homo Sapiens
aaatgtctgcctgttttataacattgaatcacagaagctgtgacatatgctatactgctgtggtgtcagtaccaagtattactacaaaagagaatgtcttggcactgatggttttatgaagcttaaagtcagtgtgcatacatatcatcattcaaggttaagtaatcccagttcaacaacctaaaaatatcaaactggatcacacttaattttcttccatatcgtctacttcatcctcgtgtatcttcaaggctctcaccatttctttgactgcatgatacaaaatatttttaacctgaaagagatgttgatatttctaatcacttcagttcgacagaaattaattaaaaaatgacaacttccagatttaaaaaaataatagggaactaggaaagccaaatataagaaaaatgtttgaaagtgttaagccaaaagggacactataaatcatacaattaaatacatgttggtgttaatctttggttgtcaccctaatgtgaccaactaggcaatgactgcctaagctgttatacatgtatcatatttctgaatataaaaagcctgaagaacaggacctagaacacccaactcttacctgtagtttatcatcataattgatttcttccttcaaaagtctcagttcctgtgttaaatgaaatgactctacaagatgttctggagacacaaaatcttcagttacctgaatacagctgtgaaaattctgaacctatccccaaaagaaaaaccaaaaaat

SEQ ID NO: 349540 - DNA, 953 bp, Homo Sapiens
ggcattctctcaaaagcaggaatctcaagaaatttgaggaagaagatttggatgacattttaaggaaaagattgaaggactcaagtgaaatacctggtgctctgtggcatatttatgctgggaaagatgttgacaagataagggaatttcttcaaaaggtataagttagtttgcaaataatatctcttcccctcaagcaaggacttattcattgttgccgtaccttcacttggcattcaacaatataagaccattacataatttttacttcaaagtagatgggagtttttgttgaaagtcaaaaccctgtttctcttgctcctctttgaaagtctgttaacattttgagggttttgaatggtgatttgttcccagttggtagtgtgcctccattccctgttaataaaagactgatctgttcttgagccagatattagttgggtggcgaaaagtagctatctggagtcgcgggatgtaaaaacaaatatttcatggaaacgtctaaagaaggtaggatctttattttctttgaatctgatagatatttttggctgctgacctagggaatgattctactctatcacatctgatactatgatacttactgagtagactcagattttgagtaatccatacccttgactgtagttgtcatatactctgaaagaaatttatatatcaacctgaaataattggttgaaaccctttgctcaggtactttttaaactccgtaattatggaaatttgttttaagaaatgttcagtgctgatacatcatctttctgaaaggatgtaagttctgtgatcaatgtgaagtaaaagagtcccttgaaattgatttttcaagtgttagaaggttagccatgtaaaggtatttatacttacctcaaaaaaggatcaataaatgtttatgaaatccatacatatgaatggtttggcttttggtaaaaaaa

SEQ ID NO: 349541 - DNA, 1538 bp, Homo Sapiens
  misc_feature (518)..(530): n is a, c, g, or t
caatttttgataaagtccttttaatggaaaatgtaaaacccctttcaactttaatgtacaaagccatatgtaacacttgcactttaacaaaagcaagccaatgttttaaaaaaatacatcattaaatgtatatatgtatatatttacatagcatattaagtttaatatttagctttaaaagttcacataaattttaccaaaatgagacaattttaaataaattacaccttttgaaaatgtttaattgtacagtcaatagcttcaacaaaatattgaagtgtctgtatttagtatctactttatatactttatactttacaaattttacaattatttggcagtaattttctgattatgacatgactgctgtgcgattcagcaatttcccagatgcaggcaatagctggtgtttgtgtcctattctcacagtaactgtctcaatgtagtgaaaaatatcagtaattttagtaaactgtacaaggtcacatttacacttgatcaacaatatagcatagaannnnnnnnnnnnnaccaaaaataaatacatcattttaaatctggcattttcacaaacatcatatacactataatacaaaacagctatatagtgctgcttttaaaattctgcttgttttataacattgaatcacaggagctgtgacatatgctatactgctgtggtgtcagtaacaagtaattactacaaagagaatttcttggcactgatggttttatgaagcttaaagtcagtgtgcatacatatcatcattcaaggttaagtaatcccagttcaacaacctaaaaatatcaaactggatcacacttaattttcttccatatcctctacttcatcctcgtgtatcttcaaggctctcaccatttctttgactgcatgatacaaaatatttttaacctgtagtttatcatcataattgatttcttccttcaaaagtctcagttcctgtgttaaatgaaatgactctacaagatgttctggagacacaaaatcttcagttacctgaatacagctgtgaaaattctgaacctgatgaagtgctcccgctggcaaaacaatagcatcaccaaggaactgaataagagtacaggttctgactccatattcttcaagcagcctttgacggagctttttgttcacataccaactttggtcacgtattggatcatgttctggtagaacttcaaggccttgttcttttgaaatctgaaatatgaattaaaatagacactccaatttaagtaaggaaatggtaaatcctgttcagttaaatttcaattttatttgtaataacaaatcttttcttctcagaatcaatggaacaactgaatgagcttcttcagttaaaaaataacattctgcaataatttggaaagccaaagaatattaaaacaatacagcaatgctgaaatgctcttaacagtttactacttccttctcaccacctccttccactatgaagtttccatctatctggtttccttccttataactgtttcaaaagtatagcacatggatgacc

SEQ ID NO: 349542 - DNA, 296 bp, Homo Sapiens
accaaaagccaaaccattcatatgtatggatttcataaacatttattgatccttttttgaggtaagtataaatacctttacatggctaaccttctaacgcttgaaaaatcaatttcaagggactctttaatcagttaaataatctgctttagaaggcacaaatgatcatacttcagattaaaatacaggtaagtattcagggataaaatggtacaaaaaaggctgtaactcttttacttcacattgatcacagacagaacttacatcctttcagaaagatgatgtatcagcactga

SEQ ID NO: 349543 - DNA, 577 bp, Homo Sapiens
  misc_feature (497)..(518): n is a, c, g, or t
gccactctcccgaaaccagagggatggggccggctgtgcagtagaacggggatcgaaaagaggaaaacaagggcacgaagaccagcgagaaagaagaggacacctgggaaaggcggaagcagaagacggggaagggaaaagaaacccatagcaggtggaaaccagatctagagcaacacccgtcaggttcacagtttgtttttctagaagagaagaaagtacctgaggattgctcttttttcctaccgttaatgaaaactacttttgtcttcatcataaaagaaaaaactaaggggaggtaaaaggcagtctcctgttttattagggggaagaggtgaaagggaaatccaggctcacttttcctgaataagccactgcctggtgcacagagcagaaccatcctggtttctgaagacacatccctttcagcagaattccagccggagtcgctggcacaggtctatttttatatttaaatgtatgtctcccctggcccnnnnnnnnnnnnnnnnnnnnnnagcaacacttttcttgtttgtaaacgcgagtgaccagaaagtgtgaatgcggagtagga

SEQ ID NO: 349544 - DNA, 1393 bp, Homo Sapiens
  misc_feature (248)..(248): n is a, c, g, or t
  misc_feature (451)..(451): n is a, c, g, or t
  misc_feature (1029)..(1029): n is a, c, g, or t
  misc_feature (1039)..(1039): n is a, c, g, or t
  misc_feature (1041)..(1041): n is a, c, g, or t
  misc_feature (1048)..(1048): n is a, c, g, or t
  misc_feature (1063)..(1064): n is a, c, g, or t
  misc_feature (1080)..(1080): n is a, c, g, or t
ttccgttagcggcgttggggtttggctgcagtggcagtgctttctcttctgctcacgggggacccgctcaggctggaggccagccagctcctgccgccacctcggtcgcgatgggggcgcaggaccggccgcagtgccacttcgacatcgagatcaaccgggagccggttggtcgcattatgtttcagctcttctcagacatatgtccaaaaacatgcaaaaacttcctttgcttgtgctcaggaaanaaaggccttgggaaaacaactgggaagaagttatgttataaaggttctacgttccatcgtgtggttaaaaactttatgattcagggtggggacttcagtgaaggtaatggaaaaggtggagaatcaatttatggtggatattttaaagatgaaaactttattctcaaacatgacagaacgttccttttatcaatggcaaatcnaaggaaacataccaatggttcccagtttttcattaccacaaagcctgctccacacctggatggggtgcatgtagtctttggactggttatttctggttttgaagtaatcgaacaaattgaaaatctgaagaacgatgctgcaagcagaacatatgcagatgtccaagttattgactgtggagtacttgccacaaaatcaataaaagatgtttttgagaaaaaaaggaagaaaccaactcattcagaaggctcggattcctcttccaattcctcctcttcttcagaatcatcttcagaaagtgaacttgaacatgagagaagcagaaggaggaaacataagaggaggccaaaagttaaacgttctaaaaagaggcgaaaggaagcaagcagttcagaagagccaaggaataaacatgcaatgaacccaaaaggtcactctgagaggagtgataccaatgaaaaaaggtcagttgattccagtgctaaaagggaaaaacctgtggtccgcccagaagagattcctccagtgcctgagaaccgattttttactgagaagagatatgcctgttgttactgcnagacccctgnanccattcntgatgttgcacccanntgtaagtgatcagaanaccatctgtatcaaagtctggacggaagattaaaggaaggggcacaattcgctatcacacacctccaagatcaagatcctgttctgagtcagatgatgatgacagcagtgaaactcctcctcactggaaagaggaaatgcagagattaagagcatatagaccacctagtggagaaaaatggagtaaaggagataagttaagtgacccctgttcaagccgatgggatgaaagaagcttgtctcagagatccagatcatggtcctataatggatattattcagaccttagtacagcaagacactctggccaccat

SEQ ID NO: 349545 - DNA, 395 bp, Homo Sapiens
cagagtgtttgtttttaggtaagagtacattggtgttttacacgtacccttttgggttcattgcatgtttattccttggctcttctgaactgcttgcttcctttcgcctctttttagaacgtttaacttttggcctcctcttatgtttcctccttctgcttctctcatgttcaagttcactttctgaagatgattctgaagaagaggaggaattggaagaggaatccgagccttctgaatgagttggtttcttcctttttttctcaaaaacttttaagaaacattaataaaaacattagtactaaattcagtgcctacctttcagagtaaaaaatgtgattactgaatatcataaaatatgctttacatacagcaaacaaaaaatgaaatgtaga

SEQ ID NO: 349546 - DNA, 1086 bp, Homo Sapiens
aaaccaggagtgggtaacaaaagatgccatgggcttccgatgaaccttgctgaaacatcataaggatttctgagctcttagatatcaactcactcttactacaagcccgcaactggtgctccccctcctgaagtaaggattccaaaagctctgtttcttgggttagagatgtcttctgacccatcagtgttataagcttattcttcagctgtgtgtctaaccgtgcaatcatcatctccactgcattcctaatttcccgaacacgctcatcttttgcatttcttacagcttctacattcctttccacttcttgaactaagctgatcagtgtccatgagacgcccgaccgaacgtttggctacctcttcagttcacgtttagtgacgtgttgctcataaatgttctgccaaaggttttaaaggtatgtccgccatgcagtcctccccaaagtgcacaactgatggcagatacacgttcttacaagtccagcaaaatacactaagtttttcatggtgattgtcacatttgtccttgtcattttctgtcatgtttggtgagactgcagagttgaagagtatcaagctgttgtgttacttcttctgcccaacgacaatttactagttctcgtagctggagtggagcacggcaatgaggacattgagctctctgctctgtcagccagcgcctaatacagctgaaacaacacagtttggagcaatgaggacacaggcgtgcatcccgcaatttctccatacaaatgaaacatcggaaaacctcagcaatgctctccacgctctgttcatccattgcctccggctctcggcggggccgctggcgacccgcaggctccgcagtctgacctcttaggcgccggcccgaggtcgccagatcaaatcgccgataaaagcccggcgcccacgtcagggggctctgacaaccgccccacctgcgcgccccatctcttcaggtccagcgccgcctacccccatttcgccatttttaccggcgcgcccgccccgaggcgcagaagtagggcgaacggtggccgcagctcctttctcccggctcagccgccgccagcagccg

SEQ ID NO: 349547 - DNA, 712 bp, Homo Sapiens
  misc_feature (139)..(185): n is a, c, g, or t
  misc_feature (301)..(309): n is a, c, g, or t
  misc_feature (604)..(604): n is a, c, g, or t
  misc_feature (615)..(615): n is a, c, g, or t
  misc_feature (641)..(641): n is a, c, g, or t
  misc_feature (652)..(652): n is a, c, g, or t
  misc_feature (660)..(660): n is a, c, g, or t
  misc_feature (672)..(672): n is a, c, g, or t
ggagaggcagtgtctggatcactgtgaatgcattgccccattggtcagttggggacactgttacaaatccactgaagtcctggtaaaactgtcaagagtaacaggcctcttctgttctaccctgctcacttccacggtnnnnnnnnnnnnnnnnnnnnnnnnnnnnnnnnnnnnnnnnnnnnnnnaatttttttaagtaattaaccgtttaaattttttcctaaagatttaacatgatttttccctcctatgtaaagtttactggagagacttgaattacttaaattcatgttaatatgannnnnnnnnaatccaggtcacattttaacaaagtttattatgaaacaaatgaaatttgaactctaaaatggtactccttggcttcctcaagtcacaatgaactttatattttctttgtccttaaggactaagatagttgttttatttcagccgaatcacagagataaccactcctgcaggcccccacagctggcccaaaggggctcgtactttctgacctgggctgtgttagggactgattgaggaaatgcagggctcccaaattttaaattgcctttatttaaaaacacaaactacaggaaanggggtttaggngtatacggcattttcatccaaacacnttagggggggnaaaatccnttccatttaggngtttaattactccggcttgtatggtggggttggcggttcc

SEQ ID NO: 349548 - DNA, 844 bp, Homo Sapiens
caacagtttttaatgaaacttgaaaaactaacagatattagacccattcctgataaagaatttgtagaaacttatattaaagcttattacctaactgagaatgacatggaaccggtggatcaaagagcacagggaatattcaacgaagcagctgaccaatctggtgaatgtttgcctgggatcccatatcaataagaaagcaagacaaaaacttctagcagctatagatgatatagacagacctaaaagataatgaacacagctctctttcctcaatggcattgatcctcactcaacatatatgacctgaaagccagtttttttatgcacttctgacaactatctgctaagaaaactttgtgcatgtttttttgactggaaagtggaaaatattgaaatgtgtgtggtgttctcatgacttttatatgctgtggtctcttcaacttttggtctcatttgttgtaatctgaaatgatgttgccgccttgtcataacaatggttatgtgactacagttatacattttacagaagaatgtaccataagtatataattagaagaacagtggcttaatatatgtatgggaagtttatggaaaatgaagttggcacttttctaccctctgagcttggttcttaataagcataatgtgagggtgaatatgtagtatctcctaattatgagcactgcatgagaattaaaaaacacatgtaagtaaaatagttgaaaaatcagtatgttctctgtttttaaaatgtcaaagtttatgtcagggttaatttagttataacaaagtgatcataatggtgaaatttaataaatatactctagtatgatcagcctaa

SEQ ID NO: 349549 - DNA, 398 bp, Homo Sapiens
ccccatttgttgtaaccctgaaatgaatgttgcccgccctggccataacaatggttatgtgacctacagttatacattttacagaagaatgtacccataagtatataattagaagaacagtggcttaatatatgtatgggaagtttatggaaaatgaagttggcacttttctaccctctgagcttggttcttaataagcataatgtgagggtgaatatgtagtatctcctaattatgagcactgcatgagaattaaaaaacacatgtaagtaaaatagttgaaaaatcagtatgttctctgtttttaaaatgtcaaagtttatgtcagggttaatttagttataacaaagtgatcataatggtgaaatttaataaatatactctagtatgatcagcct

SEQ ID NO: 349550 - DNA, 1402 bp, Homo Sapiens
  misc_feature (281)..(289): n is a, c, g, or t
ccatatcatattgaagatatgaagaggtattttccagcttcccaagtttgagagttgggcatttacctcttacacttcagtcaacaaacaaactagtaattcctaatgcataattaattatggatgcaagataagattaagtttctggagttttgttttgacttctgaggtgctaaaaaataccatgtaaattctccctaccagctagaagggtagcaagacgttgtagagtgcttatcagagagtaccatttacttcaattgatcaatataaatatatcnnnnnnnnncatcttaatgagtttctcataaagacacatcttggggcataccaaccttcatattcattcagtgtatccattggtgttaatattaacaatttcaactaaaaacaacaaacataatttttctaagtgtttcgagctgtgagatgtcaatttctacaatttagtttctagacatgctgtatatttaataaactttatgtaaactttaaaatattgcactgcatttatgaaaaaagctttctttgcctactgcagctatctaacattttatgaaactgacgcatgtccttcattattgaggctaaaagctcttgttcagattgcttgaggtttgaaaaagaggtgtgctagctttgcttagtttatttcttatttttggtatacatatacatatatataatattagaatgtgtgtactggaaatgctatgataggtattttgtgttaatccaaatgcaatgatagtttcttgtatgaatgtgcaagaggcctgtgaccgaatgctacgtttttatggtagtttaagattataaaagtagaaatgcaacaattcccagtttttggataggttctaaatttctgagatttgattcatggcagatattctctgttgttgttgttttagatgggctcattacataacgagttaattgtcactagtaggagactgtgaaggaattttggttaaaccttcaaaaatgttactgtgatggaaaatcatctattttcccgaaaatatttatgaattaatttactatagaattatctctctaattatcataattgggttacaatttaagctccccttttaaatgttatattttaaaatgttattactctataaaagaaaattgcttgctatatttacaccttctttcctaggaaagctttcatccttaaattgttgtattcctaccctctgaagacatttaaaataagcttttgtgcctgcagcagagcctgcagaagctaatacaagggacactggtcttttgacaaaataaacttgtgtaaattttgatactgtattaaaactatttttttaaagttctgcataaaattgagtattaagtatatgtgttcatcttagcaatggtaataaattatttaatctcg

SEQ ID NO: 349551 - DNA, 1205 bp, Homo Sapiens
ctggaccggtccggaattctcgggattgactggcgaggatgagctagaggaggtgggagcgcggagggccgcccagcgcgggcactggcgctccaacgtgtcagccaacaacaacagcggcagccgctgtccagagtcctgggaccccgtctctgcgggcggccacgctgagggctgccccagtccaaagcagaccccacgggcctcccccgagccggggtaccctggagagcctctgcttgggctccaggcagcctctgcccaggagccaggctgctgccccggcctccctcatctatgctctgcccagggcctggcacctgctccctgcctggttacaccctcctggacagagacagccagtagtgggggtgaccacccgcaggcagagcccaagcttgccacggaggctgagggcactaccggaccccgcctgccccttccttccgtcccctccccatcccaggagggagccccacttccctcggaggaggccagtgcccccgacgcccctgatgccctgcctgactctcccacgcctgctactggtggcgaggtgtctgccatcaagctggcttctgccctgaatggcagcagcagctctcccgaggtggaggcacccagcagtgaggatgaggacacggctgaggccacctcaggcatcttcaccgacacgtccagcgacggcctgcaggccaggaggccggatgtggtgccagccttccgctctctgcagaagcaggtggggacccccgactccctggactccctggacatcccgtcctcagccagtgatggtggctatgaggtcttcagcccgtcggccactggcccctctggagggcagccgcgagcgctggacagtggctatgacaccgagaactatgagtcccctgagtttgtgctcaaggaggcgcaggaagggtgtgagccccaggcctttgcggagctggcctcagagggtgagggccccgggcccgagacacggctctccacctccctcagtggcctcaacgagaagaatccctacccgagactctgcctacttctcaggacctcgaggctgacgccgaggacacctcaggccagagaagaagtgcggcggggaccgagccccgggccagagctgggctgcggagcactgggcaggcgcctgagcaggactgctcaggctggggtaccgggaggcacaaggctctgcccgg

SEQ ID NO: 349552 - DNA, 968 bp, Homo Sapiens
gggtccgtgtgtgtcgtctgagtcctttggcgttcgttttggatagacctgcccctccgtgacccgcctgctgggcacataagttaggcataatcgagaccctgcttcacctgcctgcgcccataggagctccggcccaccgtcatttgcccggcagccggggggtccctcatgcacagcatcgtcgggtctgtacccgctggtcatggctgtcatgatctcctctttggcgatataggcaccgccttcttggattctaataccggttttcaagtgaattaaaatttctcccatagagttcaagaaattctacaagaagcattccaaggttttcatcagctctccgggcatcaattcttggatgcaactgtagaaagctaatggccattaaaattaggctgtatgagctaattccacctgtaaaaacttcattcaggtccctctgcagaaggaactgtgttcaatactaaaatcaagtaaggcagcaatgaatatttcttcatgtaattcttgatgaactccgctgcccggacgcccgtctccatgttaaagctgatgtcaactttcacttcagtctcctgatctgtgagctttattattggtaccgtagccttgtcaaggactttgatggaacacggctcagccacgttgtgcttccgcagggcttgctccagcagctgtaaaggaggacgctcccatttcccgaagaccaccaggtctatgtcgctagttggaagataaagacctgtactaaagctgccaaatatctgtacatcagcacgtcggccaaaggtctttcaccacagtttcgatccgtttcaccacctctcttctcatagctgcttcttcaggacaaggggacatgaagttataaaagtcaattatttcctcatgtagtccctggatgcccgggctgtacgcgcggctattccaccgggtgccgggccgcggcgcctgggccccagaac

SEQ ID NO: 349553 - DNA, 716 bp, Homo Sapiens
atataatgcagctaaccaaggactcctgtgtttctataagctaatgctccagaaactttgccaacctgttagtgtacacacactgaggggagtgctcccggtgaatattatcatagggctttattatattcttggtcttcatttctgatcaagtaaatacaccagcagttgtcattcaatgcaggtttttgtacttaattatatggtgatttttttaccttttaagagcagaaacggaaattgacctccccgccatgtgtttaatattcctcctgcttttacttttgtcattttcttgataatcgtaagccttgagagtgtttgtgaaaaagatttatttcctgttatgtatacataattaaatgaaaattcttcagaaaaaggttgataaattgaattgtggttatgaaactaatttgcatttttatttgcttaagaaagaaagctgtgatagattccagatatgctttttgatgttttcctctgctccagctccaagaagtcagcacacctgcattttagctctgcatgcagccccagcaggctgcgtgtttaagaatttcattgtttaactggctggtgtgagaagtcttccgttagcatagagtggaaggagtactatagttggttgggttagtcgttgtttatcgtttttgcttttattgccaagaggtgcttgtttacaagtatgtctaataaaatgacattctaaagtt

SEQ ID NO: 349554 - DNA, 533 bp, Homo Sapiens
  misc_feature (96)..(132): n is a, c, g, or t
ggagtgactttggtacctggcccgaattgataacgactgaattttagaaccaacatttttcaaatgtatttttgatgaaatgcctacttctccctnnnnnnnnnnnnnnnnnnnnnnnnnnnnnnnnnnnnnctatctccaggcagatccacacaggtgtccttggagctctactccctgaagccaaatgtcagtaagatcctgcggatttccagatgaaggaagcctcttgtctccccccacttttttcagtcggcccgctagctcccacacacaagcccctctcgcaagacaaccacctggctgaaatttagccaggggtcaaatgtatccatctcattttcacgtgcaataatgtgcctttctgatcaatcttcacatccttgcatccattccttcctccctgctactcaagaagcaagaaaggagcacacacatcctcccaggcagtccagaggaaaggcaggcgtgacaaagaacacagacacagtctaatgacaatttagcctgtcttctattccttgaccttcttt

SEQ ID NO: 349555 - DNA, 445 bp, Homo Sapiens
  misc_feature (148)..(148): n is a, c, g, or t
gtctgtctgtcctgagaggtggatgaattgaagctctagtttctctacccgctccttcaggtccaccttctccttccataaagtcgctgtggagccaaaataatggggtcacatgtcaggagtcacctgccttgtcctgcccccccgncccccttgttggcccatgccaggacctactcacctgcagcttctccatggccccctgcagggcccggtgggtctccccaaacacagactcacccccactctctggggctggggccgctacctctggctttattctgggacgaggccactgggtgagccaggggctggcagcacaccctttgttcctcctgggcattggctccagcggagttgaaaaatgccacctgaagacaagaggtgagtattcttgtaggggtatacacataacaactgtggcaggcagatggagcatagcccc

SEQ ID NO: 349556 - DNA, 407 bp, Homo Sapiens
  misc_feature (353)..(353): n is a, c, g, or t
ccttctgccatgattctctactgagatgaagaaagaaaaagaatacctgctcagctccagagacacgtaaagggacagagattgggggacagaaggaagtgcattaattccttccacgacccctgaagagcagcggtgggtctgagcatcctatctccaggaagcaggccacgcaggcaagccagctgccacctcgtcctgtgcaaagcacacgcaccgtccccaaaagatttccaaagatgatgttaaacccagccacggttctgatctccaggaaagcaattgctgtggtacaaaaggaaaagggctaaaagagaacagtgggagctctctttcccaactaactcacgcantgtacgcagaggctttcagcacagcccagggtgcccgggactgaaaacttcttt

SEQ ID NO: 349557 - DNA, 988 bp, Homo Sapiens
  misc_feature (796)..(796): n is a, c, g, or t
acgcgaggcctgggtggcgaattcggcacgaggccctcttgcgtgccccggccacccccgggcggcttgtagccggtgcgcggggtggctggggctacgtgcagagctgtcgcggagccggagcagcagcggtgaagcccctcggctcggccgagaccgccgtgcccactgctcgcctcggttgccgccgctttagccgcagccgctgctgccgccgccgggggagaggcagcctattgtctttctccgcggcgaaggtgaggagctgtctcggctcggcccgcgggggagccccgggagccgcacggtggcatttttcaactccgctggagccagtgcccaggaggaacaaagggtgtgctgccagcccctggctcacccagtggcctcgtcccagaagaagccagaggtagcggccccagccccagagagtgggggtgagtctgtgtttggggagacccaccgggccctgcagggggccatggagaagctgcagcgactttatggaaggagaaggtggacctgaaggagcgggtagagaaactagagcttcaattcatccacctctcaggacagacagacaccatagggagaaagtacatcagccagggggcagtgtcagagacgcagcactgggagaggaggacatcgtcaggctggcccaggaccaggaggagatgaaggtgaacctgcaggaactgccggggcaggtgttgcagcttgtgggagaccacaaggaggggcatggcaaattctgaccattgccccagaaccctgctgatgaggcccactctanggagccccaatagcccagggagctgggggtgtgcctgacgaaccagggtgggactcctcaggctttttatccctagattccccactgggatttggctgaccagaataaaaaggaacttggggaacccgtggacttattcaccccccttaatctctggcaaggggggaattttggggctcctccggggaacct

SEQ ID NO: 349558 - DNA, 3690 bp, Homo Sapiens
  misc_feature (3440)..(3440): n is a, c, g, or t
  misc_feature (3540)..(3540): n is a, c, g, or t
  misc_feature (3614)..(3614): n is a, c, g, or t
  misc_feature (3617)..(3617): n is a, c, g, or t
tagtgaactagtagaacacccgttgggtttttaaagaaaagcaggctggtaccggttccggaattccgggatatcgtcgaccacgcgtcggcgagcggaggtgtgtgcggactgcagcgccccggaccctggctgggcatccatcagcaggggtgtgctggtgtgtgacgagtgctgcagcgtgcaccggagcctgggacgccacatctccattgtcaagcaccttcgccacagcgcctggcctcccacgctgctgcagatggtgcacacgcttgccagcaacggggccaactccatctgggagcactccctgctggaccccgcacaagtgcagagcggccggcgtaaagcaaacccccaagacaaagtccaccccatcaagtcagagttcatcagggccaagtaccagatgctggcatttgtgcacaagcttccctgccgggacgatgatggagtcaccgccaaagacctcagcaagcaactacactcgagcgtgcggacaggcaacctggagacatgtctgcgcctgctctccctgggtgcccaggccaacttcttccacccagagaagggcaccacacctctgcacgtggctgccaaggcaggacagacactgcaggccgagctgcttgtagtgtatggggctgaccctggctcccctgatgttaatggccgcacacccattgactatgccaggcaggcggggcaccatgagctggcggaaaggctggttgagtgccaatatgagctcactgaccggctggccttctacctctgtggacgcaagccggatcacaagaatgggcattacatcatcccacagatggctgacagccttgacttatccgaattggccaaagctgctaagaagaagctgcaggcgctcagcaaccggctttttgaggaactcgccatggacgtgtatgacgaggtggatcgaagagaaaatgatgcagtgtggctggctacccaaaaccacagcactctggtgacagagcgcagtgctgtgcccttcctgcctgttaacccggaatactcagccacgcggaatcaggggcgacaaaagctggcccgctttaatgcccgagagtttgccaccttgatcatcgacattctcagtgaggccaagcggagacagcagggcaagagcctgagcagccccacagacaacctcgagctgtctctgcggagccagagtgacctcgacgaccaacacgactacgacagcgtggcctctgacgaggacacagaccaggagcccctgcgcagcaccggcgccactcggagcaaccgggcccggagcatggactcctcggacttgtctgacggggctgtgacgctgcaggagtacctggagctgaagaaggccctggctacatcggaggcaaaggtgcagcagctcatgaaggtcaacagtagcctgagcgacgagctccggaggctgcagcgagagatccacaagctgcaggcggagaacctgcagctccggcagcctccagggccggtgcccacacctccactccccagtgaacgggcggaacacacacccatggcgccaggcgggagcacacaccgcagggatcgccaggccttttccatgtatgaacctggctctgccctgaagccctttgggggcccccctggggacgagctcactacgcggctgcagcctttccacagcactgagctagaggacgacgccatctattcagtgcacgtccctgctggcctttaccggatccggaaaggggtgtctgcctcagctgtgcccttcactccctcctccccgctgctgtcctgctcccaggagggaagccgccacacgagcaagctttcccgccacggcagtggagccgacagtgactatgagaacacgcaaagtggggacccactgctggggctggaagggaagaggtttctagagctgggcaaagaggaagacttccacccagagctggaaagcctggatggagacctagatcctgggcttcccagcacagaggatgtcatcttgaagacagagcaggtcaccaagaacattcaggaactgttgcgggcagcccaggagttcaagcatgacagcttcgtgccctgctcagagaagatccatttggctgtgaccgagatggcctccctcttcccaaagaggccagccctggagccagtgcggagctcactgcggctgctcaacgccagcgcctaccggctgcagagtgagtgccggaagacagtgcccccagagcccggcgccccagtggacttccagctgctgactcagcaggtgatccagtgcgcctatgacatcgccaaggctgccaagcagctggtcaccatcaccacccgagagaagaagcagtgacctctctccccacaccctcacctgcaccctaggacctcactggccataggagctgggccactccagacattaatccccaccccaacagagccactggcacaagtgcccttagtgctgccacactccctggcagccaggtgccctggtgcccacccctgtcgagcccctaaggatggggaggtgggggggcaggagcttctgtcccccacattccatgcacctcccctctgtatatagcatctcccccctcctagtgagcaggggcctgcaaggcatcactcccagcccctcgccttctagggcaccctcagcaaaggggcaggtggggacactccaagtggggcagctctccgtacatgcgccccacccccatgagccagttcagccctactgggggctgagcgggggcatcccctcctttgtacatagtctccatggatgtccctgccctgtagccaccagccccttgctgctctccctttaatgccatatggcccctgcctagggcacaggccccaacctgtgtgctggggtccccagcagcaaacactggaaagtctgttttatttattttctttcttcttccccaccccttaattttaactttgtggtaactgagtgcccccgcgtgcctgcgtgttgagtgtgtgggcggcagtgccgttccggaggcctggtccatctggagttttgaggggtgaggggaccagagcagtgggaccagcatggggatcagcttcccttccccacctggagccagggactgtccgggtagccagttttggtcctgccagctgcctccctgatccctccccactctcgccccttctctatgaacttaaatcaaaaaccacttccctccatctcctcctgctcctgcgtggagggggaatgtgtgctggctagggtggaggactgagcacctgagcctggggctggctcccccggggtccccgactcagctggtggctgtggagctgagtcccctccccgtaacctctgcaaggccagcacccaccatcactacctgcacctgctgtgggtcccaccctctgggagccctggggacccttggctgcancctgggaaaaggttggaaaggcacacggggggacccaccaaggtctcttccccatcccggttttttccctgggggccaggcccttaaccggtgtgggggnggggttgggcttgccaagaaaggggccatggaacatttgggattcaaaaattaaaaaaatggccccttgggccnatncccatttttgcaacggcccaacatcaccgcgtcgaaggcgtaaaacaggaaggggcgcggcatgagaagtaaa

SEQ ID NO: 349559 - DNA, 1498 bp, Homo Sapiens
  misc_feature (858)..(912): n is a, c, g, or t
  misc_feature (962)..(971): n is a, c, g, or t
  misc_feature (1150)..(1201): n is a, c, g, or t
cgggctgatgcgggggcaatcccctccgtgtgtacactagtcgtccatggaatgtcccgtggccctgtgagccatccagcccctttgctgctctcccgtgtaagtgccatattggccccgtgcctaggggcacaggccccaacctgtgtgctggggtcccgcagcaagcaaacacctggaaagtctgtttatgtgaatggtttctttcttcttccccaccccgttaattttaactttgtggtaactgagtgcccccgcgtgcctgcgtgttgagtgtgtgggcggcagtgccgttccggaggcctggtccatctggagttttgaggggtgaggggaccagagcagtgggaccagcatggggatcagcttcccttccccacctggagccagggactgtccgggtagccagttttggtcctgccagctgcctccctgatccctccccactctcgccccttctctatgaacttaaatcaaaaaccacttccctccatctcctcctgctcctgcgtggagggggaatgtgtgctggctagggtggaggactgagcacctgagcctggggctggctccccggggtccccgactcagctggtggctgtggagctgagtcccctccccgtaacctctgcaaggccagcacccaccatcactacctgcacctgctgtggtcccaccctctggaggcctgggaacctggctgcagcctgggaaggctggagaggcagacggtgggacccaccagctctctccccatcccgcttcttccctgggggccaggccctacctgtgtggtggtgggtgggctgtcaagacgtgtcatgtacatttgtatcaaaaataaagaagtgaccatgnnnnnnnnnnnnnnnnnnnnnnnnnnnnnnnnnnnnnnnnnnnnnnnnnnnnnnncaacgggcgggcagcaaattctatctaggggggggcgaaaagagagaagnnnnnnnnnngaagcacacgtcgaacacaaaagagggacgcgaagaacccacactattatataaaacaagagaacgagggacaccaactagagcgaggggcgacccacaccaaaaaagaggacgacaaactaaaaccaaatcaagaaacacccgagaggaacacacacgcgactaaacaaacaagaagnnnnnnnnnnnnnnnnnnnnnnnnnnnnnnnnnnnnnnnnnnnnnnnnnnnnccccagcaaaccccaccacgagccgaaccacgaacaacgaccagtacgacgtatcctggccaggataacacgaaaaacaatcagacaaagaaaaaacagccaaacgctatgagcacgaagaacaccgtaaatcaggataacagatggcgtaaaaaagcacagcattgggcgcagatgaatggatatcagtagcagtaggaagcgagacaacaggcgcggcgacgcgaggaaaacggatggaggaacaattagcaaagcgactcaggtaaaggcggaacgaggacaacaacgaagata

SEQ ID NO: 349560 - DNA, 820 bp, Homo Sapiens
tacttcaggaagacaacccagttgacaacgacaacagtttgcagttaaatgctcttgtctttcagtcttcctaatttctctaatattgccaaattttctttttcaattccttcatcctccaactttttcccactaatgggctctgctttcatctcgtagtgatctaagtcttctatatcctgtggagggggctggtgaaggagttttcagtcccgggcaccctgggctgtgctgaaagcctctgcgtcacactgcgtgagttagctgggaaagagagctcccactgttctcttttaaacccttgtccttttgtaccacagcaattgctttcctggagatcagaaccgtggctgggtttaacatcatcattggaaatcctgctggcctgcttcctggagataggatgctcagacccaccgctgctcttcaggggtcgtggaaggaattaatgcacttccttctgtcccccaatctctgtccctttacgtgtctctggagctgagcaggtattctttttctttcttcatctcagtagagctatcaaacagggacctctgacgcttcacattatcacgtaagaaatgtttcttgcccagcagcccccagaggatgaacagctccctccacctgaaaggggaagagggcccaagctgcaggcgccctggcctatcgaggccgtggacaggaggcacccgaatgtctccccagaccccaccctgctgcagaggcctctgtagcccatcaccctgcagcgctgctgttcccgctgcttcttggagaacaggggcaatttaatctacaaatcctgtaaatccttgtt

SEQ ID NO: 349561 - DNA, 454 bp, Homo Sapiens; identical to SEQ ID NO: 258334

SEQ ID NO: 349562 - DNA, 1029 bp, Homo Sapiens
gagcgaggcctgggtggcgaattcggcacgaggcccatgcagccccatcaagtcagagttcatcagggccaagtaccagatgctggaattgtgcacaagcttccctgccgggacgatgatggagtcaccgccaaagacctcagcaagcaactacactcgagcgtgcggacaggcaacctggagacatgtctgcgcctgctctccctgggtgcccaggccaacttcttccacccagagaagggcaccacacctctgcacgtggctgccaaggcaggacagacactgcaggccgagctgcttgtagtgtatggggctgaccctggctcccctgatgttaatggccgcacacccattgactatgccaggcggggcaccatgagctggcggaaaggctggttgagtgccaatatgagctcactgaccggctggccttctacctctgtggacgcaagccggatcacaagaatgggcattacatcatcccacagatggctgacagatctcggcaaaagtgcatgtctcagagccttgacttatccgaattggccaaagctgctaagaagaagctgcaggcgctcagcaaccggctttttgaggaactcgccatggacgtgtatgacgaggtggatcgaagagaaaatgatgcagtgtggctggctacgccaaaaccacagcactctggtgacagagcgcagtgctgtgcccttcctgcctgttaacccggaatactcagccacgcggaatcaggggcgacaaaagctggcccgctttaatgcccgagagtttgccaccttgatcatcgacattctcagtgaggccaagcggagacagcaaggcaagagcctgagcagccccacagacaaactcgagctgtctctgcgggaccagagtgacttcgacgaccaacacgactacgacaggggtgggcctctgacgaggacaccgaccaggaaccccctgcgcagcaaccgggggccactcggaaacaaaccgggccccgaaacatggactccttcgggaattgtcgga

SEQ ID NO: 349563 - DNA, 984 bp, Homo Sapiens
  misc_feature (879)..(879): n is a, c, g, or t
  misc_feature (892)..(892): n is a, c, g, or t
  misc_feature (916)..(916): n is a, c, g, or t
  misc_feature (949)..(949): n is a, c, g, or t
  misc_feature (961)..(961): n is a, c, g, or t
  misc_feature (968)..(968): n is a, c, g, or t
gagcgaggcctgggtggcgaattcggacgaggagggattctgatgaagtatggtttggagtgtgccatatgcacctgttatcactgcagtgccttaaggcaaggggtagtgcagccaggtgtatccaaaaaatcaccctggctgctgggtggaacaggattgtagggacaaaactagaaggagggagattaagaaacttacaaagcccaggcaacaggtgattgaggaacctggggagcttcactaggactggagggtgagggaggcttcaggtgactgccaggtggctgacactggtggtggacaaacaggtcactgagaggaagagccagtgcggagctcactgcggctgctcaacgccagcgcctaccggctgcagagtgagtgccggaagacagtgcccccagagcccggcgccccagtggacttccagctgctgactcagcaggtgatccagtgcgcctatgacatcgccaaggctgccaagcagctggtcaccatcaccacccgagagaagaagcagtgacctctctccccacaccctcacctgcaccctaggacctcactggccataggagctgggccactccagacattaatccccaccccaacagagccactggcacaagtgcccttagtgctgccacactccctggcagccaggtgccctggtgcccacccctgtcgagcccctaaggatggggaggttgggggggcaggagcttctgtcccccacattccatgcacctcccctctgtatattagcatcttcccccctccttagttgagcaggggcctgcaaggattcaactcccagccccttcgctttttaggggcaccttcaggcaaagggggcaggttgggggacatttccaagtngggggcagttttncgtaacatggcggccccacccccntggaggccagtttcaagccttatttgggggttnaagcgggggggnttccttntttttgtaacatagtt

SEQ ID NO: 349564 - DNA, 957 bp, Homo Sapiens
gcctgggtggcgaattcggcacgaggcagcggtgaagcccctcggctcggccgagaccgccgtgcccattgctcgcctcggttgccgccgctttagccgcagccgctgctgccgccgccgggggagaggcagcctattgtctttctccgcggcgaaggagatggaggaggacatctggacagtgagcaggaggcgcttcggcccatgccgaacatcccaggggacctggagagccgggaggccatggtggcatttttcaactccgctggagccaatgcccaggaggaacaaagggtgtgctgccagcccctggctcacccagtggcctcgtcccagaaaaagccagaggtagcggccccagccccagagagtgggggtgagatctgtagtacggggacgacccaccgggccctgccagggggccatgcgagaagctgcagcgacttaatggaaggacgaaggtggacctgaaggagcgggtagcagaaactagagcttcaattcatacacctctcaggacagacagacaccatagggagaaacgtacatcagccagggggcagcgtcagagacgcagcactgggacgaggaggacatcgtcaggctggcccaggaccaggaggagatgaaggtgaacctgcagggagctgcggggcagggggtgcagcttgtgggagaccacaaggaggggcatggcaaattctgaccattgaccaggaaccctgctgatgagcccactctaggagccccaatagcccaggagcttgggtgtgctgacgagcagggtgatcaccactggattgctgacagatagaggacgtgggaccgtgactatcacccctatctgcagtggatttggctctcggcactccccagctgggagctggatacctgccctggcagcatgactcaaactgcatgacagtggccggcacaccccctgggatggctcaaagg

SEQ ID NO: 349565 - DNA, 996 bp, Homo Sapiens
  misc_feature (684)..(742): n is a, c, g, or t
agcggtgcgggggcggcgtcgctgttgcccttttaagccgcggggccgccgcctcctgccgctggagtcggttacaaaggaagcgccacccaggccgccacacgccgaggcttccgcgcccctcgccattttccagcagcgctcgacgaggcggagccgcgagagcgcggccaggccggccccgcggggcggtcgcggccgtgacggcggctccgggcccggctccccttccgcgcccggctccccttccgcgcccctcccgccggagatgaggggaagatgtccgtgtcagggctaaaggccgagctgaagttcctggcgtccatcttcgacaagaaccacgagcgattccgcatcgtcagtgggaagctggacgagctgcactgccagttcctggtgccgcagcagggcagcccgcactcgctgccgccgcaagctcacgctccacgtgcaacatcacggaatcctatccatcttcttcaccgatatggtttgtggattctggaagacccaaatctgacatcagttctgggaacgtctagaagatactaagaacaacaattggcttcgtcagcaattgaagtggttgatatgtgaactctgcagtttatataaccttcctaagcacctggatgttgagatgctagatcaaacaatacccacgggtcagaatgggacaacagnnnnnnnnnnnnnnnnnnnnnnnnnnnnnnnnnnnnnnnnnnnnnnnnnnnnnnnnnnncttagatcactatgagatgaaggaagaagagcctattagtgggaaaaagtcagaggatgaaggaattgaaaaagaaaatttggcaatattagagaaaattaggaagactcaaaggcaagaccatttaaatggtgcagtgtctgggtcagtgcaagcttcagatagacttatgaaagagctcagggacatatacagatcacaagagttataaaaagggattattcagtggaatcataaatgacaggtatatgatg

SEQ ID NO: 349566 - DNA, 765 bp, Homo Sapiens
gtgagattctggaaacattccaattttaccttttccccttgactccagactttttaacactggtctgctactgttaagttgtatgccattttgttaggccttctcaagtgggaatcaggaacgctgctgtgctctagagatgttttgttcttcctgtagggctgaagcagtgcctactcgatagaatcagtcatcatgcaaataaaagccacctgagtcaaaggcaaagccagagtgcagcttggagcaaagaagttaaaagcatattggcagaggaagagccctggcattccagcaggagctaacaggaaaaagaaaatcaatggcagtagccctgacacagccactttctggtggttaccactcacctggggatagccagtaccaagaactagcagtagccctggattcaagctccgcaataatcagtcaactcactgaaaacatcaattcactggttcgcacatctaaggaggagaagaagcatgagatacatctggtacagaagcttgggaggagcttgttcaaactcaaaaaccagacggctgaacccctggccccacagcccccagcagggccatctaaggtggagcagctacaagatgagaccaaccacctaaggaaggagctagagagtgtgggaagacagctccaggctgaggtggaaaacaatcagatgttgagtctcctgaacaggagacaggaggagaggctacgtgaacaggaggagaggctacgtgaacaggaggagaggctgtgtaacat

SEQ ID NO: 349567 - DNA, 1059 bp, Homo Sapiens
ttactgcctctttgacaaattcagaaaataactgcatgacacttgctgccatgaaagtaatgctcattggttttgataaccaggatgtctagtgtttaacatatttcaaactcttgctatatgtagtcaaatactgtcaaaatagatctgcccccaaaatgaagcatattttggcacctgtgctgaatgctgctacaaagaccagcaagtgcaaataaaaataacagtcatgatttagtcacattcataacttttcatagaaaaatataaatatattccctgaattgtaagacaaaaaaataattttaacagccagctttcaccataaatgccagtccatttcctcttaaatgaactggctttccctcaaggtcataaggtgcaaccattgaaatctaacacattttctaaacttctgtcatcatccccatcatggtatctcacagtccttctaccctgatttctcgtttttatttttgaacgtcgaagaactcttttagattttgcatagtccaaatcctcccagtcattatcatccacacttaacctagggcgtttgctttgtctttgacgtctcacagttttagataatgttagctgtaaaagttttaccttttctaactacttttgctttccctttcgttttcctccttttggtttttgtataatcagtacagtcaatatctgattcagttacagatccccaatctgatgatttggaactagtatcaggtctaaactttgaattcccagttgtttcagagattttcacattttccaatttcaggaatgcgatctcttcctttttacttccttctctcctgtttcctgtgaatcatgaatcacttttgtcttactaaaaggaccctttccataggtcctgagtcttctgccattccacctgcgcagcccataattcagttccacttcaaaattattctctgcagtagctttttgtgccaaggttgactctgaagaaaatgtcctatcagtctcactccctggaatatgactttttgaatcttctcctgaagatgtaacagaggaactttttccgct

SEQ ID NO: 349568 - DNA, 380 bp, Homo Sapiens
attcacttaactgagcctcagcataaacaactgggtaattttaagcataaaatcctcctgactaaaccaaaatcccaatgtctgtgaacgttcgttgaagaaagctggtaggacgtaaaaccaaaaccaagtgcaagttccccagggaaggaagccgcattccttctgaacctcatgcttgacctctccggggatttgcttctgccatttcgcctgtacgcaattacacttttcttttccaattgtcaacgcaacattgatgaaatacgagctgcttcttgggtagtatttaaaaacggcagccaaaaatctctatcaaacaaagctgccgtggctgcttccattagcacagtggcagcaatgctggggaggaacaaaaa

SEQ ID NO: 349569 - DNA, 2149 bp, Homo Sapiens
  misc_feature (132)..(287): n is a, c, g, or t
gcgggttcttggttccaatgagggacttagcagaagcctccaggggccagcagggccagtgtgaaactgggagaaatgaagccctctgtgtcctgtgtgtgtggtggggtttaatgcattagcaaatttaannnnnnnnnnnnnnnnnnnnnnnnnnnnnnnnnnnnnnnnnnnnnnnnnnnnnnnnnnnnnnnnnnnnnnnnnnnnnnnnnnnnnnnnnnnnnnnnnnnnnnnnnnnnnnnnnnnnnnnnnnnnnnnnnnnnnnnnnnnnnnnnnnnnnnnnnnnngtaactttcgatgtgatcataccaggaaagttttgcgtggtcaccatgccaagaaaatgactttggttgcccagcagatccacagcgactctttctcaagggctactgtggattctagattgaggaaaggggccacttaggactcagtgctggtatcctccacagtcctttctcccagactctggccctccctttgggacccaggaaatcccctctagggtgacgctgctggctaggaagactgaggtctgctgcgccaaggggcctcaagttagaagggccatgccgtcagtggatgactttgagcgctgatcctagggacctgccaggtcctcacttcctgccctgggtgcacacatgaatggggcagccagcaggaagcgggagaggctggaaccaggagcctgccctacctgcatggcaggacaactctgaggcccttctgccatattctctgctacccaccagagaaaataggctgccttctagaaagatttgtttctaaaagcgtagaccctggggaagtataatgtcaccatgctcaccaggcgaggtttcccatatgacctccctgccccgacctcgtaggttgctcctttccccatctgtaaggtagagatgtctgccccggagctaccagctggggatggcatccaggccatgtctcctgcaggatccaagtgctgttgtccccagggtgaccctgcctcctgctggggcccatccgctttgctgtgctgcacaggctgttttcatctgcatggtttggggtctttgtccttgtgccttttcttccccatcgccactgtacaggattttccacattgcccactgcctccttttctacatcgtctcatctccctgggcctttcccgagccctgtaaatgtgtactttttcaacgtgcctcccccaggtgaggccagctctcccgggcacattcgtccacaaggatcaggccccacttacccttggctcgctcagcctgtagacttggtaactttgtacagaatctttcattattgtcttaagcatggggggctaggacccacttagtccctcctccagcctgcagctaatttaggagccttgcattccagaaaagggcaactttgtgtaaagcagcttctcccacagagctttccctgcattgttagtgatgtcgggcaaagcatcactctttaacctggggcattggccccagcagggatatcatgggaccgcagccgctccgtgcactgtctctgcccccagaggaagccctgtccatggttcctggtgcacggccacaggcctgccttgaggccaccacatctggtgtctagaacagctgcgggccccacttgggcagaaggaagaggtgctagctgctgcccctgcctgctgtgaacacctgcccagcccttccttgtctgctgaggtgctcagaccagagtgccattaaataccaactgatgtcacggagcggacggtgcattgccaaggactcacagctgtgggctcccttccagctcctcccactttcttggctgggtcttctgaggcctacgtggaatgaactacacatgtggcctcatgcccaagggtttgttagatggcctctgactctgtgggattcaacttgacttttttgccccaggaggctctgtctggaaacaggcttagctttagtgctggggtgggacctgccctgtgggccccagggaggggacagtgggggtgaggccctgaggctgtccagggtctgagctctttgcctccaacctgcttctgccccaaaaggaacaggctgttggtggcaggctcctcccggggagctgtactgtacagaccaaggtgtaaataaacagtttgctcttctaa

SEQ ID NO: 349570 - DNA, 937 bp, Homo Sapiens
  misc_feature (52)..(88): n is a, c, g, or t
cggatgatagactcactatagggcgaaccgcagcttatcgcggtggcggcgnnnnnnnnnnnnnnnnnnnnnnnnnnnnnnnnnnnnnatcaggccaaatcggccgagctcgaattcgtcgagagcggctcttggaaagagggacactggaggggtgtgtttgcaatttaaatcactggatttttgcccaccctctttccaaataagaaggcaggagctgcttgctgaggtgtaaagggtcttctgagctgcagtggcaattagaccagaagatccccgctcctgtctctaaagaggggaaagggcaaggatggtggaggctttctgtgctacctggaagctgaccaacagtcagaactttgatgagtacatgaaggctctaggcgtgggctttgccactaggcaggtgggaaatgtgaccaaaccaacggtaattatcagtcaagaaggagacaaagtggtcatcaggactctcagcacattcaagaacacggagattagtttccagctgggagaagagtttgatgaaaccactgcagatgatagaaactgtaagtctgttgttagcctggatggagacaaacttgttcacatacagaaatgggatggcaaagaaacaaattttgtaagagaaattaaggatggcaaaatggttatgacccttacttttggtgatgtggttgctgttcgccactatgagaaggcataaaaatgttcctggtcggggcttggaagagctcttcagtttttctgtttcctcaagtctcagtgctatcctattacaacatggctgatcattaattagaaggttatccttggtgtggaggtggaaaatggtgatttaaaaacttgttactccaagcaacttgcccaattttaatctgataaacaagtgaatacattttatattttcttttggattgtaatcaaatttgat

SEQ ID NO: 349571 - DNA, 1105 bp, Homo Sapiens
  misc_feature (372)..(429): n is a, c, g, or t
aaggaggagggaagaagaaggaaggaggtgagaggtgtgccggagaggagaaaaaaacaaggaagaatggagaattgtcattacttaccataaccattttgccatccttaatttctcttacaaaatttgtttctttgccatcccatttctgtatgtgaacaagtttgtctccatccaggctaacaacagactgagaccaacaacaaaatgcagaacatagcaataaatacaattcagatttctgatacggaagacgatgtgatttttgaaagagttgtataattgaataaatcatgatcagttaattatcctattgttatttctattacttctagattttctattatgtaaatttgaattcataatttgatnnnnnnnnnnnnnnnnnnnnnnnnnnnnnnnnnnnnnnnnnnnnnnnnnnnnnnnnnnagtgcttgcagctagtcgtccctctaaagaaagccttagaatgaggcaaactgtctatttagtcaatctgaggcaacctggggaattaaacaaaatgcaatctctctttcaaacaaaccttattaaatattttctgaaatacaagtttgatataaaatgtgaacagtatatggtaagagacaaatacaactgagatttatgctatagcaagtacccattgttcaaaatataacatatgcacattaaactaactttggtgtatttctccttggattgaaatactgaaaatattctacactttccaacatcttaaaaaaaacatgcattggaaatctttatctttattcccctctccccatccccactctgaagaagaagcagtttctcaccttacagtttctatcatctgcagtggtttcatcaaactcttctcccagctggaaactaatctccgtgttcttgaatgtgctgagagtcctgatgaccactttgtctccttcttgactgataattaccgttggtttggtcacatttcccacctgcctagtggcaaagcccacgcctagagccttcatgtactcatcaaagttctgactgttggtcagcttccaggtagcacagaaagcctccaccatccttgccctttcccctctttagagacaggagcggggatctt

SEQ ID NO: 349572 - DNA, 1590 bp, Homo Sapiens
  misc_feature (49)..(67): n is a, c, g, or t
  misc_feature (1014)..(1044): n is a, c, g, or t
ctgtgcatagcttatagcactgtattataggaatcagagtgtataagcnnnnnnnnnnnnnnnnnnncttcttggagaccatttccattatttatgattaaatcaatgaaactatacaatttccacattaaatacaaattagtagaagaattcctccaagtagtattgcatataagctacaactttaccccaactattttaatcactatgattcgagatttcctaggatttaacagcccaagattgggctgttactacctcagcaagaacaatcaccagtaaatacatgaactggggttatagctgaatttttagaaacttctccaggacaaaccacgtgttagaggaggtaagtagaaaaacttaatgtttgagctgtgctattcctaccaggaactatatcaaatatgcaaagttcaaacattcttagtaaaataatatgaaaggatctatatatactgtaaatttagcaaaaacacttttatgtacagaagcctaaatatcttaggaggtttagaataccaatgaagagaattgttaattcttcaaggctggtttcttatgaggattaaaaaccagcccttagtctcagatgcattccacctagatgtgttcacgaactccatagaataagaaatataaaccatgaatacgtactcttaatttccattcttcaacttaatgttctatagtacttcagatttttaaatccagagtttggtgtacacttaggaaattatagtaagagtagattagagaagatttgcttgttttccttttgaagccatgtgaaggtttattaccctgtgtattttcatcactgaaaagttccccggtgactaataaaataaaagtgtcacaagctacatgatggatctcttcttttaatgttgcatagagtttcagtttggctagtgagggctaactagctcagccctagtttcattttattagagttgaccactaaaaactaaataaggaagttaccagtaaagctaattcccaatacaagcnnnnnnnnnnnnnnnnnnnnnnnnnnnnnnncattcacataataaaatatatccttaacacaaaataagggtataacatattctgcagcatgacattttattttatttctcagctgtagctttttcattcagaaactggagaccatcttttcactgagttgttattccttcctcttcccttagcttagggatatgttgaaaaaggcttttcaacaagtattttattttttacaagttgctatgaaattaaaatttatatatatatcttaagtgtttataaagcactcaaaattgtagcttacatgtatatgacttctgaaaataaaaatcacacttctaacataatctttctgctctgcaaaaatattctacatacatgcatatgatcaaaacaatcttttcatgtttggggtatttcttacacatagtaaaagaaaagtcaacaattgtatcagtacttcccctgttaagataactgagtgccacctagtgttcaatttctgcaactactaagcttacaaattcaatactggctattaaaacccaggttctgaaaacggcattttggaaatccttt

SEQ ID NO: 349573 - DNA, 1034 bp, Homo Sapiens
  misc_feature (937)..(947): n is a, c, g, or t
gtttttctcaggcataagggctgtagtgtgaggattgggaggaactcgacctacttcgttaacccagtggcctgagccaatcacaaagaggattggagcctcactcgagcgctccttcccttctcctctttctgtgacagcctcttggaaagagggacactggaggggtgtgtttgcaatttaaatcactggatttttgcccaccctttttccaaataagaaggcaggagctgcttgctgaggtgtaaagggtcttctgagctgcagtggcaattagaccagaagatccccgctcctgtctctaaagaggggaaagggcaaggatggtggaggctttctgtgctacctggaagctgaccaacagtcagaactttgatgagtacatgaaggctctaggcgtgggctttgccactaggcaggtgggaaatgtgaccaaaccaacggtaattatcagtcaagaaggagacaaagtggtcatcaggactctcagcacattcaagaacacggagattagtttccagctgggagaagagtttgatgaaaccactgcagatgatagaaactgtaagtctgttgttagcctggatggagacaaacttgttcacatacagaaatgggatggcaaagaaacaaattttgtaagagaaattaaggatggcaaaatggttatgacccttacttttggtgatgtggttgctgttcgccactatgagaaggcataaaaatgttcctggtcggggcttggaagagctcttcagtttttctgtttcctcaagtctcagtgctatcctattacaacatggctgatcattaattagaaggttatccttggtgtggaggtggaaaatggtgatttaaaaacttgttactccaagcaacttgcccaattttaatctgaaaatttatcatgttttataatttgaattaaagttttgtnnnnnnnnnnnttttttttataaacaagtgaatacattttataatttcttttggaatgtaaatcaaatttgaataaaaatcttacacgtgaaaaaaaa

SEQ ID NO: 349574 - DNA, 1154 bp, Homo Sapiens
  misc_feature (870)..(910): n is a, c, g, or t
  misc_feature (1072)..(1108): n is a, c, g, or t
acagcaggtaagacattcgctcatggtctaattccatctgaatcacttgacataagttggcatccatcagttccattactaagtaaacatcttggaactcctccagcgttttctggggtgtgaagacatttaataaactaataatgtttttatggttcacacacttcatgaggaccagctcccggtacgctctcttggcatgtgtttggttctgaaagggttctgctgagcttcttaatggccacatttctgtcaaggacagcatcatacgcggcacaaactatgccctgagccccagagccaataggctttagattctggtagcgcttgagaactgtgaaggttgagtctcccacttccacactgtagaactggttgtcaactttgcttttgctcatgttgtaatgtttggcaatatatgacacatccacttgtttatcgaatcccttgttttacctgtaaggaacacacacctgacaaaaggcaattttcacatccaatgttggttcactgcagtagtataagaaatggaggctcataaataccacagcttgtatggtttctcatctataggaaacgggtctaattcaacagtttcttgcataagttgccatagtgaagatctgagatgggcctgctgttggtgtttctcacactagccattccgtgcctgagaactacgatcctgatccggcagtgtttgccccagaaatcctccctacttgtttttcattaaccacattccagactaacatggaagagattctttggagatatggagattgtttaaaattaacgatggacaggtgatttccaagaaaacccaatcttaaactcactcaagcccctaggaattgaggggtgaggacnnnnnnnnnnnnnnnnnnnnnnnnnnnnnnnnnnnnnnnnngtaagcatatagcaagcaccacccacccccataaaaataaaaagtgaaggggaggttaaagaaaatagaagaagagtggcttgctgaatcaccctctttcactgcctggaaaccattgcgcccgctctcgacgaattcgagctcggccgatttggcctgatnnnnnnnnnnnnnnnnnnnnnnnnnnnnnnnnnnnnncgccgccaccgcgatgagcgccggtcgccctatagatcgtatactt

SEQ ID NO: 349575 - DNA, 1054 bp, Homo Sapiens
  misc_feature (265)..(265): n is a, c, g, or t
  misc_feature (356)..(356): n is a, c, g, or t
ggaagcaagacaaaaaaggacagaaaagctggtttaggtcttcagtatgtttatttgtccctcacatagcggcttgatctgtctgcctgtgtgttcacatagttaaccagaaacgctaggaggaagttgtaccagtgggatacctccttaggtgccaaagttttattttgagaaataatattactttcctcttctgaaataaaaaaataataataagaatgaaacccccaaaccacagtgtgagtctcaggttagcatttgaaancatctccaacatctccagagacattgttattcctcaggaggtttccctgactccttaaatgtggctgatgtttcatggttaatttatttanttttaataaggtatgagcaatcgaaggggctgatcatctgagttttgtactgcagtagatgtaagagcaataactctgcccataaatttactgctgccaaatagttttagcaatatgagtttgtcttaaaagccatgaagcattaatgtcaatgtttagcaaaatctccagaatttagcttaaattaaattaaatgaaagtgctttcctgagcacttaaggaggcactgtgaaacatcttggttatgtacaaggcaataccaaggtgatctcagcaataatcaggcttcccttcttattcacttcgaagtatccatcacagttatttgcaccctgacccatgttggtgcctcactagagtggtgatatttcacctgaagaagtgaaagacaggaagtggatggttgatgagtgtgaactgattggcaaatagaatatccccaaaacagagcaaacaagaatgccagtgctctgaaaactgccttaaatataataatagggaactttctttctctcttcaagcaatagagaccacagggaactgcacccacctgcaccatcgccatgccagtggtgctgccattctgagattatttcacacagtcagattcagtacacgcagtcatttgtttaaaataaatagaagaacattcctttgtgcagcttgtcccctggaataaaaatggcccattttctcct

SEQ ID NO: 349576 - DNA, 947 bp, Homo Sapiens
agctggaaaaggacatcagggaagagtttctcaaagctatatccagcatattaggtctgtttcaacgtaagtcctactgttggttgcagtttcttcatgaattcaggacatggtgttccaagctggtggcaaaccatttctcccataatgcaccccacagaccataaatccacgttttccttgtagcccatgccaaggatgacctcgggtgctctgtagtagcgagtcactacataaggcgtcatcataaaactcgttcctgcagtcctggccagaccgaagtcaagaatcttcaaagtgcaatcagattttactactatattactgggctttaagtcccaatgaataattccagcagaatgaaggtgcttgattccacacagcatctgatagagaaggtaggacattctttcatgatctagccccatctgaatcacttggcaaagatttgcatccatgagctccatgactatgtaaacatcttgaaattcttctagggatttctgtggtgtgaaaacattcaaaaggccaattatatttttgtgattaacacatttcataagaactagctctctgtaggcccgcttggcatgagtctgattctgaaatggtcggcttagcttcttgattgcaacatttctttcaagaatggcatcataagctgcgcatactattccttgagctcctgagcctataggttttaaattctgatatcgtttcaggactgtgaatgtagaatctccaatctctacactataaaaattgttgtcacgcttgcttctgctcatgatggcaagcaattaatttaatggcttcatccaaaaattcaccaagaagccggcagcgcagcgaacggcgacagggaagcccgccagcggggacaggggccgtccggggtggtcgccgcggccgttacccagcgctgctcgcggctccgcaatccaagc

SEQ ID NO: 349577 - DNA, 1943 bp, Homo Sapiens
agcgggcctacagagagctagttcttatgaaatgtgttaatcacaaaaatataattggccttttgaatgttttcacaccacagaaatccctagaagaatttcaagatgtttacatagtcatggagctcatggatgcaaatctttgccaagtgattcagatggagctagatcatgaaagaatgtcctaccttctctatcagatgctgtgtggaatcaagcacctccattctgctggaattattcacagggacttaaaaccaagtaacatagtagtaaaatctgattgcacattgaaaatcctggacttcggactggccaggacagcaggaacaagcttcatgatgacgccatatgtagtgacacgctactacagagcacccgaggtcatcctgggcatgggctacaaggaaaacgtggatatatggtctgtgggatgcattatgggagaaatggttcgccacaaaatcctctttccaggaagggactatattgatcagtggaataaagttattgaacagcttggaacaccatgtcctgaattcatgaagaaactgcaaccaacagtaaggacttacgttgaaaacagacctaaatatgctggatatagctttgagaaactcttccctgatgtccttttcacagctgactcagaacacaacaaacttaaagccagtcaggcaaggaatttgttatccaaaatgctggtaatagatgcatctaaaaggatctctgtagatgaagctctccaacacccgtacatcaatgtctggtatgatccttctgaagcagaagctccaccaccaaagatccctgacaagcagttagatgaaagggaacacacaatagaagagtggaaagaattgatatataaggaagttatggacttggaggagagaaccaagaatggagttatacgggggcagccctctcctttagcacaggtgcagcagtgatcaatggctctcagcatccatcatcatcgtcgtctgtcaatgatgtgtcttcaatgtcaacagatccgactttggcctctgatacagacagcagtctagaagcagcagctgggcctctgggctgctgtagatgactacttgggccatcggggggtgggagggatggggagtcggttagtcattgatagaactactttgaaaacaattcagtggtcttatttttgggtgatttttcaaaaatgtagaattcattttgtagtaaagtagtttattttttttaatttcaagtgatgtaatttaaaacctaagttgtgtttcaaaacagcaacaaaactgtattgtattttttttgctgtaattaactgtataatgtaaacctaattattttatcatggtttaaattttttgcatatttgctttatcttatgctgctgatttttttaactgaatttgtaagattttgtttatcaaagcaactattatgtggtgacttgcctatatcatgaattatttaagatttttatagtatttttttaaattagaatttatttcagatgttttgttcatgatactatcccttcagggttatgtgcttatcaatgaaataaccccagaggagtgagggaaaataacgtgtagccagttatattcaggaataactactgtaaatgatgaacgtgttaggagacctccaatatttgctacttgccaatcctaatttagttacaagaattggtaggcaatcctacttaattttggcaaaagccccgtcatctaaatggcagaataactcagagcatgtctttgaagatgctgggcgtctaccaccaccttatgtccccaccctacccaacaaaaataagtaaaaagaatatggtgtattctacaaatttgtggcatgctcaaagtttatgatcacataaaggcaagaggatacttcatgaataatacatttcaatgcaaataaacagatggttcacttctactagc

SEQ ID NO: 349578 - DNA, 3232 bp, Homo Sapiens
  misc_feature (161)..(201): n is a, c, g, or t
  misc_feature (1979)..(2028): n is a, c, g, or t
agcgggtaggttccacaatggtacaggcagcatcacgctgcacaatggtttccaggcagtgaaagagggtgattcagcaagccactcttcttctattttctttaacctccccttcactttttatttttatgggggtgggtggtgcttgctatatgcttacnnnnnnnnnnnnnnnnnnnnnnnnnnnnnnnnnnnnnnnnngtcctcacccctcaattcctaggggcttgagtgagtttaagattgggttttcttggaaatcacctgtccatcgttaattttaaacaatctccatatctccaaagaatctcttccatgttagtctggaatgtggttaatgaaaaacaagtagggaggatttctggggcaaacactgccggatcaggatcgtagttctcaggcacggaatggctagtgtgagaaacaccaacagcaggcccatctcagatcttcactatggcaacttatgcaagaaactgttgaattagacccgtttcctatagatgagaaaccatacaagctgtggtatttatgagcctccatttcttatactactgcagtgaaccaacattggatgtgaaaattgccttttgtcagggattcgataaacaagtggatgtgtcatatattgccaaacattacaacatgagcaaaagcaaagttgacaaccagttctacagtgtggaagtgggagactcaaccttcacagttctcaagcgctaccagaatctaaagcctattggctctggggctcagggcatagtttgtgccgcgtatgatgctgtccttgacagaaatgtggccattaagaagctcagcagaccctttcagaaccaaacacatgccaagagagcgtaccgggagctggtcctcatgaagtgtgtgaaccataaaaacattattagtttattaaatgtcttcacaccccagaaaacgctggaggagttccaagatgtttacttagtaatggaactgatggatgccaacttatgtcaagtgattcagatggaattagaccatgagcgaatgtcttacctgctgtaccaaatgttgtgtggcattaagcacctccattctgctggaattattcacagggatttaaaaccaagtaacattgtagtcaagtctgattgcacattgaaaatcctggactttggactggccaggacagcaggcacaagcttcatgatgactccatatgtggtgacacgttattacagagcccctgaggtcatcctggggatgggctacaaggagaacgtggatatatggtctgtgggatgcattatgggagaaatggttcgccacaaaaatcctctttccaggaagggactatattgaccagtggaataaggtaattgaacaactaggaacaccatgtccagaattcatgaagaaattgcaacccacagtaagaaactatgtggagaatcggcccaagtatgcgggactcaccttccccaaactcttcccagattccctcttcccagcggactccgagcacaataaactcaaagccagccaagccagggacttgttgtcaaagatgctagtgattgacccagcaaaaagaatatcagtggacgacgccttacagcatccctacatcaacgtctggtatgacccagccgaagtggaggcgcctccacctcagatatatgacaagcagttggatgaaagagaacacacaattgaagaatggaaagaacttatctacaaggaagtaatgaattcagaagaaaagactaaaaatggtgtagtaaaaggacagccttctccttcaggtgcagcagtgaacagcagtgagagtctccctccatcctcgtctgtcaatgacatctcctccatgtccaccgaccagaccctggcatctgacactgacagcagcctggaagcctcggcaggacccctgggttgttgcaggtgactagccgcctgcctgcgaaacccagcgttcttcaggagatgatgtgatggannnnnnnnnnnnnnnnnnnnnnnnnnnnnnnnnnnnnnnnnnnnnnnnnntcaagaaaacagcaagggagagaatccaagcctaaaattaaataaatctttcagcctgcttcttccccagggttctgtatggcagctaagctcaaatgtatatttaacttctaggtgctcttgctttggtcttcttccaatgatgcttactacagaaagcaaatcagacacaattagagaagccttttccataaagtgtaattttaatggctgcaaaaccggcaacctgtaactgcccttttaaatggcatgacaaggtgtgcagtggccccatccagcatgtgtgtgtctctatcttgcatctacctgctccttggcctagtcagatggatgtagatacagatccgcatgtgtctgtattcatacagcactacttacttagagatgctactgtcagtgtcctcagggctctaccaagacataatgcactggggtaccacatggtccatttcatgtgatctattactctgacataaacccatctgtaatatattgccagtatataagctgtttagtttgttaattgattaaactgtatgtcttataagaaaacatgtaaagggggaatatatggggggagtgagctctctcagacccttgaagatgtagcttccaaatttgaatggattaaatggcacctgtataccaatttgtagaaagaacatatgtgatacttatgtaaagtgtggggggagtgggtaacagttttcaggcacaaaatggtttggccttctgaaggcaggtgtgaataaaagctgagagtcttttctgtgacagtaaagagtaggagagactggagggtagtgtgtggtgtggactaagactgaaaggaggttattacccagatactaggagacactggtgtccctgttttagagatttggctctatacccatttgtcatttctcaattactggtcacaacaagaggccactggagaaagtggcaggtggtgaagcaaggttattgtgtgtgcttttgatgataagaatctctctctggaactgagcagaattgcctccatgtgaattccttcaacaaaaaaatgagcctgcctagactactttcagattgtggattgtgttttccatgtgtgggctgcttccctgattcatactctgccaaagttttattttgagaaataatattactttcctcttctgaaataaaataataataataagaatgaaacccccaaaaaaaa

SEQ ID NO: 349579 - DNA, 477 bp, Homo Sapiens
atgaggggatacaactgttcataccagtcctctcttgggtgagagggaatggcatctgttaatgaaggttccttttctccatcattgttgccgccactgccttcactgccaccatctctttcaatcagtttgtccaccatagcaataatgcagttcaggctcttccccacattggcccacaccctgtcccactcttcctcatcatagtctgaatgatgtggtatggagtcctgccctctcatcactgggggttggtcttggggactgctctcctctgggctgctcttaggagagggtggcttcttaagaatgcctcctggccttgcagtgtagagtgctaaaagagcactcctgacaagttgatccttgaaggcatgtacaaaaagctctgttttttctgaaagcatctttaaagaattcttcaagctgtctggagaatgctggcttgcagaattaagcagtaggtctgcatgggtc

SEQ ID NO: 349580 - DNA, 466 bp, Homo Sapiens
atgagggaattttaataggtgatatttactattcttttcagttgtttaattctcttaaaccatatgactttgaaaccgtaagagtatatgggttggatcagtgactaaatgactgaaatcaatgatttcaggggtagactttgttcacttattgagaaattccttagcatactgcctggctttgaaaatgttaatgtatcttggaatatcacaaaatatgcataataatcaaacatcttagttaattaacttaacggaaagcacagaaatggcaaggtttccttaagcttaatatctttgtggaaaagcaaagacattcccaaagataagttccttggaatatgtttgtttaaatcttccctacctctgaaaccatctcttctgtgatttcggcgttagcctcataaaaatattgaattcctactgtgtgtaaaaggctgcaagatctcatttatctaaaatgtat

SEQ ID NO: 349581 - DNA, 1455 bp, Homo Sapiens
  misc_feature (19)..(19): n is a, c, g, or t
  misc_feature (30)..(30): n is a, c, g, or t
  misc_feature (67)..(67): n is a, c, g, or t
ttaaccccaagaagaccanacctttgtgcntacctctcctaaagtcccttaaaccaagtgctttccnaagcagaggtgccatgagccttacaactgtggttgcagatggaggcgcctccattaggatctcttccctcttccacccagagctctgcccccagtcagtggctgcagcatgggcccttttgtccaatcccagggcttgttccctaagtcaacctcagcacatgcccagctcagccatgtcccttcactcccctacaggctggaactgccaaggtggtgcccacccaaggcggctgtctgccatgacaacaggagcgtgtgcgtcaggctggtcctgccgcactttctgggttttgttttccactcctcctcattgctcatcacatacttacctggggacaatgaaataggtctttgctattccctagaagtcaccaaaatgctttaggacattaagttagtcccagggtcacactatactaggccagcgagtcaccccttcactaactcccatctccagtgataccctggtatgcactgaagcctacttaccaaaggggtaccatgtggaccagacagcagtcacaatacagtccaaagaatgtcaaaaccatggaaaacagaactttccttcacatgcactgttgaacactactgcctgtcccttttatcaatcaatacccgttctcctaaaatttagagaaattataaccccaaaatatgtacaaagcatctcccttcccccactttcttagcctgatcccctatcactgaggtctccctctggggctgcgcctcatcctccttaggctggagactaacgtatcttccactagagccaccatggggtcctcacctctccaatgtggggcttcttccaagtccaaggtggagggcaagccccgtgaccctctctcatctgctccgtgttccaaagtgcagggagctatcaagaaggtcctaagtgcataccagcactcgtcccaagcccacacacataagcaccaagagaaaaaacacaaatcaccatgccaaacaaagctggagcagctgcttggattgggtgcccataggcagagggcccggctgcagttgtggacagggagtgtgtggacagggagtgtgtggacagggagcgtggccggcctttcccaggcagctgtagggtgtgaagcagcacaggcctgacacagacatggcagggctctcaaaaagccacttgagtagagtgagggctggcgacacagcagagttcccaccctgcttccatgctgggctgggccacatggaaaccttccaggtgccttttcccaggtgccactgtaccccttcacttgggggcacctctcctggcaggtactagtcttaccatatagctgctggagacagaagagaactggcgaacgcgtgggtcgacgatatcccgaactccggggcgtaccacccgtg

SEQ ID NO: 349582 - DNA, 1867 bp, Homo Sapiens
  misc_feature (506)..(506): n is a, c, g, or t
  misc_feature (509)..(509): n is a, c, g, or t
  misc_feature (511)..(511): n is a, c, g, or t
  misc_feature (520)..(520): n is a, c, g, or t
  misc_feature (599)..(599): n is a, c, g, or t
  misc_feature (604)..(604): n is a, c, g, or t
  misc_feature (626)..(626): n is a, c, g, or t
  misc_feature (640)..(640): n is a, c, g, or t
  misc_feature (679)..(679): n is a, c, g, or t
  misc_feature (776)..(776): n is a, c, g, or t
aacgcctcgtcatggctgccccacttgccagcccagctggagggcacttgggcctgccctgcctgtgccctgcggctgcttgcacacggaacagctcaccgtgctgctgggcctgaggcaaccctgggctgcggctgcctgggcgctatgaggtccgggcagaggtgggcaatggcgtgtccaggcacaacctgtcctgcagctttgacgtggtctcctcagtggctgggctgcgggtcatctaccctgccccccgcgacggccgcctctacgtgcccaccaacggctcagcctcggtgctccaggtggactctggtgccagcgccacggccacggctcgctggcctgggggcagtgtcagcgcccgctttgagaatgcctgccctgccctggtggccaccttcgtgcccagctgcccctgggagaccaatgataccctgttctcagtggtagcactgccgtggctcggtgagggggagcacgtgatggacgttgtggtggaaaanatngncagtcggtnccaaccttagcctgcggtgtgacggcggtaagaacccatctgtggtctccgcgccacgcccatccccgtggcccgtgtnctgcnggtagtcccagtgatgtacagncccgtggtggaggncggctcggacatggatcttccggtggaccatcaacaganaagcagtccctgaccttccagaacgtggtcttcaatgtcatttatcagagcgcggcggtcttcaagctctcactgacggcctccaaccacgtgagcnacgtcaccgtgaactacaacatcaccgtggagcggatgaacaggatgcagggcctgcgggtctctacagtgccagccgtgctgtcccccaatgccacgctggcactgacggcgggcgtgctggtggactcggccgtggaggtggccttcctgtggacctttggggatggggagcaggccctccaccagttccagcctccgtacaacgagtccttcccggttccagacccctcgggtggcccaggtgctggtggagcacaatgtcacccacacctacgctgccccaggtgagtacgtcctgaccgtgctggcatctaatgccttcgagaaccggacgcagcaggtgctgatccgcagtggccgggtgcccattgtgtccttggagtgtgtgtcctgcaaggcacaggccgtgtacgaagtgagccgcagctcctacgtgtacctggagggccgctgcctcaattgcagcagcggctccaagcgagggcggtgggctgcacgtacgttcagcaacaagacgctggtgctggatgagaccaccacatccacgggcagcgcaggcatgtgactggtgctgcggcggggcgtgctgcgggacggcgagggatacaccttcacgctgacggtgctgggccgctctggcgaggaggagggctgcgcctccatccccctgtcccccaaccgcccgccgctggagggctcttgcagcctcttcccactgggcgctgtgcacgccctcaccaccaaggtgcacttcgaatgcacgggctggcatgacgcggaggatgctggcgccccgctggtgtacgccctgctgctgcagcgctgtcgccagggccactgcgaggagttctgtgtctacaagggcagcctctccggctacggagccgtgctgcccccgggtttcaggccacacttcgaggtgggcctggccgtggtggtgcaggaccagctgggagccgctgtggtcgccctcaacaggtctctggccatcaccctcccagagcccaacggcagcgcaatggggctcacggtctggctgcacgggctcacgctagtgtgctcccggggctgctgcggcaggctgatccc

SEQ ID NO: 349583 - DNA, 828 bp, Homo Sapiens
gagaggtgccaccaataggttaggtacgaggctgggtggcgaattcggcacgaggcggccgaggctgcggccatggcagcatcttccctgacggtcaccttagggcggctggcgtccgcgtgcagccacagcatcctgagaccttcggggcccggagcagcctccctttggtctgcttctcgaaggttcaattcacagagcacttcatatctaccaggatatgttcctaaaacatccctgagttcaccaccttggccagaagttgttctgccagacccagttgaggagaccagacaccatgcagaggtcgtgaagaaggtgaatgagatgatcgtcacggggcagtatggcaggctctttgccgtggtgcactttgccagccgccagtggaaggtgacctctgaagacctgatcttaattggaaatgaactagaccttgcgtgtggagagagaattcgactggagaaggtcctgctgggttggggcagacaacttcacgctgcttggcaagccactcctcgggtaatggctgtgaagtgctgggctttgtctggggctccagggctggacatgcagacagtggtcacagtgcaattaggccagaaaggatcttgttcgagtagaagccacagtcattgaaaagacagaatcatggccaagaatcattatgagattcaggaaaaggaaaaacttcaagaagaaaagaatcgtcacgaccccgcagactgtcctccggataaacagcattgacattgctccgtgtttgttgtgattaccgagttaatacttacaaaaggataaaaataaactcctgcttcccaaggaaaa

SEQ ID NO: 349584 - DNA, 701 bp, Homo Sapiens
ggctggtaccggccggaagtaacgggatatcgtcgacccacgcgtccggctgcggccatggcagcatcttccctgacggtcaccttagggcggctggcgtccgcgtgcagccacagcatcctgagaccttcggggcccggagcagcctccctttggtctgcttctcgaagatatgttcctaaaacatccctgagttcaccaccttggccaggagttgttctgccagacccagttgaggagaccagacaccatgcagaggtcgtgaagaaggtgaatgagatgatcgtcacggggcagtatggcaggctctttgccgtggtgcactttgccagccgccagtggaaggtgacctctgaagacctgatcttaattggaaatgaactagaccttgcgtgtggagagagaattcgactggagaaggtcctgctggttggggcagacaacttcacgctgcttggcaagccactcctcggaaaggatcttgttcgagtagaagccacagtcattgaaaagacagaatcatggccaagaatcattatgagattcaggaaaaggaaaaacttcaagaagaaaagaatcgtcacgaccccgcagactgtcctccggataaacagcattgagattgctccgtgtttgttgtgattaccgagttaatacttacaaaaggataaaaataaactcctgcttcccaaggaaaaaaa

SEQ ID NO: 349585 - DNA, 326 bp, Homo Sapiens
ggtgtcccagcctctgcacctgccaacagagtgaacgaacaagctagcgaggcagtcagtgcacacctggagataaacacggccatgtgcagcaggggacgttgccggggtcgcgctggctggggagggctgtgtgcagagcccctgctgtaactgatgacaacagtcagggtctgtggtcaagcctgtgacatcctttctttcagtcgtcacgaccccgcagactgtcctccggataaacagcattgagattgctccgtgtttgttgtgattaccgagttaatacttacaaaaggataaaaataaactcctgcttcccaaggaaa

SEQ ID NO: 349586 - DNA, 825 bp, Homo Sapiens
  misc_feature (696)..(696): n is a, c, g, or t
  misc_feature (701)..(701): n is a, c, g, or t
  misc_feature (704)..(704): n is a, c, g, or t
  misc_feature (707)..(707): n is a, c, g, or t
  misc_feature (715)..(715): n is a, c, g, or t
  misc_feature (722)..(722): n is a, c, g, or t
  misc_feature (725)..(725): n is a, c, g, or t
  misc_feature (728)..(728): n is a, c, g, or t
gggggctgcgggaagatggcggcggccatggcagcatcttccctgacggtcaccttagggcggctggcgtccgcgtgcagccacagcatcctgagaccttcggggcccggagcagcctccctttggtctgcttctcgaaggttcaattcacagagcacttcatatctaccaggatatgttcctaaaacatccctgagttcaccaccttggccagaagttgttctgccagacccagttgaggagaccagacaccatgcagaggtcgtgaagaaggtgaatgagatgatcgtcacggggcagtatggcaggctctttgccgtggtgcactttgccagccgccagtggaaggtgacctctgaagacctgatcttaattggaaatgaactagaccttgcgtgtggagagagaattcgactggagaaggtcctgctggttggggcagacaacttcacgctgcttggcaagccactcctcggaaaggatcttgttcgagtagaagccacagtcattgaaaagacagaatcatggccaagaatcattatgagattcaggaaaaggaaaaacttcaagaagaaaagaatcgtcacgaccccgcagactgtcctccggataaacagcattgagattgctccgtgtttgttgtgattaccgagttaatacttacaaaaggataaaaataaactcctgccttccccngaaanaanaanaaaaaacnacaaaanaanaanaccttgtgcgggccggccttcggccctttcgagaaggctttttctaaaaaccaattcccgtttggggggcgccgggggcccccaaataggggtaaat

SEQ ID NO: 349587 - DNA, 1158 bp, Homo Sapiens
cagccaggtcggccgcccccaccaggtccagttccagagcccaggccggtcggccgggcccgcgtgccctcggcgggctgcgcagagcgcgggagcggtttggggctgggcatgctgggagcccctcgggcaacggccgccgccgccacagccacacagccgccgccactgcgtccgtccccggtgagcgccgctgacgcgcggagatgaaattcccggcctcggtgctggcgtccgtgttcctgttcgtggccgagacaacggcggcgctcagcctgagcagcacctaccgctcgggcggggaccgcatgtggcaggcgctgacgttgcttttctcgctactgccttgcgcgctcgtgcagctcacgcttctcttcgtacaccgcgacctcagccgcgaccgcccgctcgtactgctgctgcacctgctgcaacttgggccccttttcaggtgttttgaagtcttctgcatctactttcagtcaggcaacaatgaagagccttatgtcagtatcaccaagaagaggcaaatgccaaaaaatggcctctcagaggagattgagaaggaggtgggccaggcagaaggcaaactaatcacccaccgatcagcgttcagccgggcgtcggtgatccaggctttcttgggctcagccccccagctgaccctacagctgtacataagtgtcatgcagcaggacgtcactgttggaagaagtctcctcatgaccatatccctgttgtccattgtgtatggagccttgcgctgcaacatcctagccatcaaaatcaagtacgatgagtatgaagtcaagagtgaagcctctggcctatgtctgtatcttcctgtggaggagctttgagattgccactcgagttgtagtcctggtcctctttacctccgtcctgaagacctgggcggtggttataatactcatcaacttcttcagtttcttctagtacccctggatcctcttctggtgcagtggttccccattccctgagaacatagagaaggcctcagtagagtgggcaccaccattgtactatgcattctaactttactctatactgggtattaaccatgttcctgctggttctgctgtacagctgaaatttgacagccctgacctcatccagggcgttcccatattggtaaca

SEQ ID NO: 349588 - DNA, 1349 bp, Homo Sapiens
  misc_feature (1196)..(1220): n is a, c, g, or t
  misc_feature (1299)..(1299): n is a, c, g, or t
tccctcctccccgtctatcatcacacaaccaacaccacctcccctcggcacggtccggaatttcgggattttgggatctggggaggccgcctggttttcctccctccttctgcacgtctgctggggtctcttcctctccaggccttgccgtccccctggcctctcttcccagctcacacatgaagatgcacttgcaaagggctctggtggtcctggccctgctgaactttgccacggtcagcctctctctgtccacttgcaccaccttggacttcggccacatcaagaagaagacggcggaagccattaggggacagatcttgagcaagctcacgctcaccagcccccctgagccaacggcgatgacccacgtcccctatcaggtcctggccctttacaacagcacccgggagctgctggaggagatgcatggggagagggaggaacgctgcacccacgaaaacaccgagtccgaatactatgccaaagaaatccataaattcgacatgatcccggggctggcggagcacaaccaactggctgtctgccctaaaggaattacctcccaggctttccgcttcaatgtgccctcagtggagcaaaaatagaaccaaacctattccgacccaaaattcccgggtcttgcgggtggcccaaaccccaagctctaaccccgaacgagcaaaaggatcgcagctcttcctagattcttcccggccaaatgagcaccctttgccaaaacagcgcccaatatcgggtgggaaaaaaaacctgcccccaacgcgagcaactgccccaattgggcttgctccctttgaatgcccccctgaacaccctgttacccgccgatttggccttgtttgtagaaaacagaagtccccgcccttagagacctttgcaaaacaccccccaattgcacccgcggtccatggatgccccatcgtatccccgcctttaagtggccatacaccattcccgcgcaaaaactatttcccccaacgcgcgcttgggaaaaattataactctcaaacaagggcgctcgcgaaaaattcgccgcgcatggaaccactgagacccgcgaggcaaaaaccctcgggccaggttcctcccctccccacctaacgcgttacggtggcggttctcgcggcgtaaacgccccgaatagattataaatcgcacccccatcgacaaaaaannnnnnnnnnnnnnnnnnnnnnnnntctgtcccctaacaaacaccccccgggcactccacgcggcgaagaaaattcctcaccacctactccacaaataccgccncgcgtttctttcctgtcccacccctcatatattttaacaccccgtgtttt

SEQ ID NO: 349589 - DNA, 2536 bp, Homo Sapiens
  misc_feature (2533)..(2533): n is a, c, g, or t
gaaagaaagaaatcagaaaatcgaccacagtggtagccacctggcctaatgctgtgtttttgtacctgacaggggtcactcattttaggcacaactccttcattctttgtgaaattagtgagtttccttctacccgtcaccagattcaatatgttctattaatacaccgataaccacaggggaagggcacttgtcgctctcccacctggttaccacagtctccatgggtcttttgccgtgaccacaaataaaggaaacactcatcactagtatctaagtcgggctttacagtaactatgcaccttctgtgtgcttcacctcactctctacttcaaacagcccatggagggaggtattattatactccttatgttgacagtgaagaatctgaggcccagagaggttggggacttgagtaaagtcacacagccctgagaggcaggaccagggttccattcctgctctatccagttccaagcccttgtgttttccattatgtttagtgcctctttgctaacagcaacatctgcaagatttgtgttggttttgatggagaactctagctcatccacatgctagtgcccaagtggtggaggggccacctcagcaggtgggttctgaatgcagccaaggctgtccccgcaatgggtgagactcgctccaactgcccgccctcagagcaggtgcctaagtcctccctggcactggcaggccttacctcacattgctaaattaaagcaatgcaattcctcttgggtaagaggaattcctccttctttactaactgatccccagcaaggaaataaaatgttaggctttaaaaatccctactttgtcatatcagactatattctaaaactatatttgagcgaaacctgtcattgcgtctaatttcaaatatacagaatctccttaagagctgttgccttatttttttgtaaagcctctctgacatcaaatggggagaaatggtggcacctccagacaccctgaaactacacaccatttcttccctgctcagcttctgctcaggagttctgtgagctatgggaaggccattggttgtatttgctacttttactttcatcttcctctgctgtagagccatttaatgttattgtcatatgctgctggtgaggtaaaggtgggtccgggtgccttcccaggggttagaggatgttcaaagggccgatttcagcaggagttcagagggcttatgatggatggtgagagatttgacaaccaccagagcacatgtgctctgaccctctcctgggcattggttcctgctggtaccgggcggttcagaccttcaaataggttgctttcaaaagagctttcaggcacttattgagaattaatgtttaaacagacataatagcctagatgaactcccaagagatctattaaatcttgtgggctgaataaatatctcgtgcaggactgtgcaacagtagcccagagcatcctgcctgtgggcatccacctcccaggtgagggcagtgggaagctggcccgacggcagccagaacttgtttctcacctcccaccagcaaccccccacccaactctgggccccaggcacacgaagcacaagtctcaggggaccattcccacattgggggatcctgagggagcccatcaccgcctcttgcatacaactgtccactaggaggcacgcccagtgtgggagagatgtatggtcttgccttccacctgtaaaaactgcacatatgcaagccatttgcactctggaactgcatgccgtgaaaactcctaatggtgtggaacttagtttgaatttgaaatcacgccgcatgcacaaagggacaggcccaggcccgacctcaggtcatccgcccgctggctgcagagcatccctgggagccaaggcgaggcccgtggagcctgagctttgtgtagctcgagctttgtgtagctcgtgcacttattatgcaccacctcccttcagtcaccactcctcttcctccgccatcctcatttatactgattgcacaccccccgctcaaacaacaatgtccttattatgatgaccatctcgtagtggtacattccattcctatttaaggtaagcccaaagcccacttttggattttcccgactgtccgagaaaagttgtgtaagcgcctgcgttcttctgggtttggctagatagggttgtgtccctctatggaatggaaagtgatgtggggcaaaggtggtcattttctcgcacaatacaactcactgaggatgccttctgtagcaagtgagaaacacgatgagtacattcagaattacaataactcactctcactgggtaacttctcatgatagatttgtatgatcaatacgggtctatttttatgtcaactgaacactgtagggtaccttccagtctttttcaagattgttaaattgagacaagtaattgaataatttgtcctatttttattttaaaaaaagtgaatggactgaaatgttaaatgtgaatgtacatttcttaattgcaacttttctactgagtgttgcncta

SEQ ID NO: 349590 - DNA, 685 bp, Homo Sapiens
  misc_feature (77)..(77): n is a, c, g, or t
  misc_feature (80)..(80): n is a, c, g, or t
tgagcctttgtgtagcctcggagcttttgtgtagctcgtgcactttattatgcaccacttcccttccagtcacccantcntcttcctccgccatcctcatttatactgattgcacaccccccgctcaaacaacaatgtccttattatgatgaccatctcgtagtggtacattccattcctatttaaggtaagcccaaagcccacttttggattttctcgactgtccgagaaaagttgtgtaagcgcctgcgttcttctgggtttggctagatagggttgtgtccctctatggaatggagagtgatgtgggcaagggtgtcattttctcgcacaatacaactcactgaggatgcttctgtagaagtgagaaacacgatgagtacattcagaattacaataactcactctcactgggtaacttctcatgatagatttgtatgatcaatacgggtctatttttatgtcaactgaacactgtagggtaccttccagtctttttcaagattgttaaattgagacaagtaattgaataatttgtcctatttttattttaaaaaaagtgaatggactgaaatgttaaatgtgaatgtacatttcttaattgcaacttttctactgagtgtttgcactatactttctggaatcttatttaacaaaaataataaagggaaaaaattgcttgcct

SEQ ID NO: 349591 - DNA, 2268 bp, Homo Sapiens
  misc_feature (2022)..(2023): n is a, c, g, or t
gctgggtggcgaattcggcacgagggttctacgtggcttcctcccggcaggctgaagctgcctcgagtctggtcagccgctccccgtgtctattcccatttcaacgacgaccttgctgggggtcagcgtcattcgagccttcgaggagcaggagcgcttcatccaccagagtgacctgaaggtggacgagaaccagaaggcctattaccccagcatcgtggccaacaggtggctggccgtgcggctggagtgtgtgggcaactgcatcgttctgtttgctgccctgtttgcggtgatctccaggcacagcctcagtgctggcttggtgggcctctcagtgtcttactcattgcaggtcaccacgtacttgaactggctggttcggatgtcatctgaaatggaaaccaacatcgtggccgtggagaggctcaaggagtattcagagactgagaaggaggcgccctggcaaatccaggagacagctccgcccagcagctggccccaggtgggccgagtggaattccggaactactgcctgcgctaccgagaggacctggacttcgttctcaggcacatcaatgtcacgatcaatgggggagaaaaggtcggcatcgtgggggcggacgggagcctgggaagtcgtcccctgacccctgggcttatttcggatcaacgagtctgccgaaggagagatcatcatcgatggcatcaacatcgccaagatcggcctgcacgacctccgcttcaagatcaccatcatcccccaggaccctgttttgttttcgggttccctccgaatgaacctggacccattcagccagtactcggatgaagaagtctggacgtccctggagctggcccacctgaaggacttcgtgtcagcccttcctgacaagctagaccatgaatgtgcagaaggcggggagaacctcagtgtcgggcagcgccagcttgtgtgcctagcccgggccctgctgaggaagacgaagatccttgtgttggatgaggccacggcagccgtggacctggaaacggacgacctcatccagtccaccatccggacacagttcgaggactgcaccgtcctcaccatcgcccaccggctcaacaccatcatggactacacaagggtgatcgtcttggacaaaggagaaatccaggagtacggcgccccatcggacctcctgcagcagagaggtcttttctacagcatggccaaagacgccggcttggtgtgagccccagagctggcatatctggtcagaactgcagggcctatatgccagcgcccagggaggagtcagtacccctggtaaaccaagcctcccacactgaaaccaaaacataaaaaccaaacccagacaaccaaaacatattcaaagcagcagccaccgccatccggtcccctgcctggaactggctgtgaagacccaggagagacagagatgcgaaccacccaaaacacgcacaccctgcccctggtgccctgagacagacacacagcctcacgcccccaggaatgcaagtggtttcctggtgcttcccacggaggagttttggcagccagacttctggaggaattggttgtatagaagatcctagtgaccaaattcagcctactgcctcggatctctccagccgaagtctgtggactgcaagtctttgagatgcttctggctcccatcacctctaacatccttgtctgggtctaccaggaacgcttcatttccttggggctgcagttttgtggttgaggggcctggagaaaatcattttctccccttggcagtgtcccagggccctggatggtcctcttaccaacatctggtcttccaggcactcaaaagctgggaaccagcatctcagcgccagctctaccagttctcgttttgggccagaggcagcctctgcactcccacgcctgtcctcctggaagggacctggttggactaacggctaacctggacctggaactgtagggccaggggattgtctcagggccgacgttccacctgggggttnncctccccacccacccccacttcaggcttttcccttttttcttttggtccacattgtaagaaaacatcatgctgttattactggtcccaccatgatttgatgtgggggtaataattaagggagatgggcctcatggggaatttgaccctggactagaaaatagagactgaagagtggagccacccagcctggaaaggtaactattgccagtccctagccagaaaaaaatggggtttagggggcccg

SEQ ID NO: 349592 - DNA, 1798 bp, Homo Sapiens
  misc_feature (1695)..(1695): n is a, c, g, or t
  misc_feature (1748)..(1748): n is a, c, g, or t
  misc_feature (1784)..(1784): n is a, c, g, or t
aaacagaactgctatacgtacccatagagcacaatgaaatgagccaggaaattggacatatctaaatctctggccaaaacacaacttgactggttggcgtattacacaactttaaaatttcaggctgcaatgaagctcaatgaaatcatctgaaaactcatggcctttcagatagtgaggtgctacaaaatatcacttgattgtacccagccatttggtgccactgggcttcatgctcatgctgtgaagagcaaatgtgaaatatcatgaaatataaatcagaaaatctcaggttcctgcaccaaaatcattaagtagtatgaaaaggattgaagaaggctttgtcccatccctgaacaatgtcaacctctgtaatacaactcaaattatttcattttgtttttaaaatatagtcagcagtcaatacatttcaagtactttaacacagttaaaaaaggaaccaaaaaactcggaagacaatcattctctattaaacaccagtatatagttgataaaagatttactctgtatgggttggtgcatgagcataaaatacacgcaaactgaattacagacagcagacaactgtttttcctcctctcttggaggtggaaggctgaggagagaggtttttgttttcctacttcttaagtcagttaagtcctctccccagccccactcctcaaccttgattgggagaagaggcagggacattactgcccctggcacacaaaacaattagaattccaagtattcatttcacacagtagagaagatgacttttatcaaggaaaacagtgcgtccaagatatttttctcccaaacacaaaaccagaggcatttttgctcttttgataaggcagacacttgacttagtcatctcttttcttccaacagtgtttctgcaaccacagccaggactttctggttaacaactctgagcgtactttgtctttatcttttgaatcctttatctccggaagtcacatcatggagaagggagaagcacttataaaaaaatttactgttgtaatttgtgtccagtttgcatagaaacaaaaccaccaccaaatctggttcattcttagtcaatgggtaaattcagttaaaataccgataatttggtgtcactaggtaaacctcaggttttgcttgttagtttggttaactacttctgttcctttgaaagtaatgacatttttaaaaacttccctgggttcccagaatattgaaaggatttgatattaactgtctgtttagcaaatgtaaggtactattctgtgttcatgtcataaatatcaatatggatcataaacagaagtacacataggttttacctctactcagaggctgaaatgatgagttaagttgcttcaggagttctttgaaaggtatagagaggggcatgaaaccacagatacttgattcatgatcagaaaagaaagttttatctagagcttttataaaacaaaagtacctttaacttaagaagatcacgggttaagctgaatttactatacatggtttttaaacaatttattgatgcttccatgcataaagaaaaaaggaaagtcttcttataccagtttatattagggtaatagaaagctagataatatagactcatcattttaaggatagccctaaatacaaatgtgaagccagaatttggcaagtgaggttttaacacaatancatataattcaccactattattttaatgaaaaaattggggtcattattgactnatttgtataagttaaaagttttaggagtatcaggtnctgtaaaagtaaca

SEQ ID NO: 349593 - DNA, 606 bp, Homo Sapiens
  misc_feature (546)..(546): n is a, c, g, or t
  misc_feature (578)..(578): n is a, c, g, or t
  misc_feature (591)..(591): n is a, c, g, or t
tataagtgcttatcccttctccatgatgtgacttccggagataaaggattcaaaagataaagacaaagtacgctcagagttgttaaccagaaagtcctggctgtggttgcagaaacactgttggaagaaaagagatgactaagtcaagtgtctgccttatcaaaagagcaaaaatgcctctggttttgtgtttgggagaaaaatatcttggacgcactgttttccttgataaaagtcatcttctctactgtgtgaaatgaatacttggaattctaattgttttgtgtgccaggggagttaatgtccctgcctcttctcccaatcaaggttgaggagtggggctggggagaggacttaactgacttaagaagtagggaaaacaaaaacctctctcctcagccttccacctcccaagaggagggagggaaaaacagttgtctgctgtcttgtaattccagtttgccgtgtattttatggctccaggcacccaaccccatacagagtaaaatcttttatccaacttatatactgggtgttttaataggnggattggttgtcctcccgagttttttggggtncccttttttaacngtggtttaaaggtac

SEQ ID NO: 349594 - DNA, 400 bp, Homo Sapiens
  misc_feature (386)..(386): n is a, c, g, or t
tataagtgcttctcccttctccatgatgtgacttccggagataaaggattcaaaagataaagacaaagtacgctcagagttgttaaccagaaagtcctggctgtggttgcagaaacactgttggaagaaaagagatgactaagtcaagtgtctgccttatcaaaagagcaaaaatgcctctggttttgtgtttgggagaaaaatatcttggacgcactgttttccttgataaaagtcatcttctctactgtgtgaaatgaatacttgggaattctaattgttttgtgtgccaggggaggtaaatgtccctgcctcttctccccaatcaaggttgagggagtgggggctgggggagagggatttaattgatttaaggagtagggganaacaaaaacttttt

SEQ ID NO: 349595 - DNA, 618 bp, Homo Sapiens
cagaaaagtaaggaaacataactgggtaggaatgtccacttacgtttcacaaactcacttttagagtttcatgccactttcctcattcttctctttaagatactattatattgaacgtgggacccatgtctaaatacttgtatagataaatatttcttgtatattcttcccatacaagcaagacttgaatacagttgtagctagtcccacttttataataaaagcttccaaactctttatcataaactttgtctgtgagcttgggaatacagagaaagcaagttgatcattctgagacccttcctcatttgccctgaatcagttccccaagattggactgtactttaagctagttgttgtagcagtggtggttgttgttttatatcttgagatacttctagaacattctagaaacagggtattctaaaggcttactttatatgccatcctttttgaaccctcttattttagaaattattacacgtgcacacttatgatttcaaccttgtaaaataatttcaaattcatttcgtatccacattttactgcagtttccctatcatcatctcaatagttatagaactggttgaaattaaactgttttgaactaagaagtag

SEQ ID NO: 349596 - DNA, 870 bp, Homo Sapiens
agaaaagacatttctacatattttatatatctatgaatattgcatctctaatctaatctaaaaatgttgttttgagacaattcttctgtgatgcttcctcctcatgctcataaatgtttaaagtcttgggatttcattttcaggctgaaatagataacaagaaaaaaatttaagtttaaatgtttacattgcgttactaaattaataccaattcaaattaagtgacctatagtaaattaatggcaatgggggggaggggattttaaagtgattggcatattatgtgatactgtatcagtgatttagtgaaataatatgtatcatagcacaactctgttgggtattaaggcttcatcttagtatttccctgcgttgctctttgaaataaaattactaccataaaaataacctcttatcatattgatgtgtttaatttactcagttggcttctaatttgcgtaacaagattaaggtagtatttttgtactattattggaagcatgccttccctttttcacattattaaattgtatttatatttgtgcaattttaaactatgttttcaaataaactttgtctgcggcttcgaggtcttttcaggaatctttcaaaatgggatttggggatcagaactccttctgatcaaatggaatccaatttgtactactggctaaaggtccttttattaaatattgaatatcactacatatgattttgcatgagctatctggaaatcaggaatgcatttttggatataaaacaaaactttaaaaatcttcctcctttgttaattttttaagactaaaatattatttaacctgaaattgaattttgtgattctttttagaataaaaatattaaaataaaaaa

SEQ ID NO: 349597 - DNA, 1187 bp, Homo Sapiens
ggcgtttgccagaaaggaatactagtcacagtggcctttgtgagttgtctgcaactcagctcttcccccagcacagatctgttccccttatcctgcagaaaatcaagccctgactctgcactccccgaagtagtgatgttaattaacaactgaagaggtaactaaatctcacatgcaggtctaatgactaataattggagtacggctgctagacaactgcattttagtatttctcttccattctcctggttttgtagacccagaagattgaatgagtgacataaatctttagttcggggcaagccagggtgggctagggtggtaagctggaggacttcatccttcagttaggctgcacaagtaacattacctaaaaggcactaacatgctcaggttccccagaaagaggcgtaagaagggcctctccttagcagagcttccacctgccatccgtcttgggttcagtgagcttcaaggctcacaatggaagcactgtcatttccccagaaaagctgtgttccctatgctgaacacaccatacacattctcatctggaatctaaggagcagcttttaccctgatccagtatcctgaggaattttaagcctccactcaaatgacctgcctgtgttgtcatttccatgggaaagaactctttccacgagatctgctagttccaggcctctaagacaggaacgtatgtgccataagtgggtctacttcacagactcaatgaggcagaaattattgtagttttctcctatttcttctgcacccaactttctccttgtatttcaaaggccaggccatgtacactaacgtccttgaaatttgcagttctgtatgcttctattccaaatcattcattaccaataaaaacgaaataccaccctttccattttatagacctcatcccctatttctgtcagacagttatatgacagggtgactgtggaacctcttagttcatccaaagtctacctgaagtgctagactttcagactcttatcactgaaatccttaaggttgaggaggctttatttccctagcactggtgaagggcttcaactgtcaaacctcagaacaaatgcattagggccttagaaatgtcaatggggcaggaagaaaacacaatttctaactgcctgtttttgtataatttaataaaaaccttttaaacattaaaa

SEQ ID NO: 349598 - DNA, 439 bp, Homo Sapiens
  misc_feature (11)..(11): n is a, c, g, or t
  misc_feature (22)..(22): n is a, c, g, or t
  misc_feature (40)..(40): n is a, c, g, or t
  misc_feature (67)..(67): n is a, c, g, or t
ccccaacttcnccctggaattncaaaagggccccggcccngtacactaacgtccctggaaaatttgncagttcctgtatgccttcctattccccaaatcattccattaccccaataaaaacgaaaatacccacccctttcccaatttaatagaccctcatcccccctatttcctgtcagacagttatatgaacagggtgaactgtggaacctcttagttcatcccaaagtcctacctgaagtgcctagactttcagactccttatcactgaaatccttaaggttgaggaggctttatttccctagcactggtgaagggcttcaactgtcaaacctcagaacaaatgcattagggccttagaaatgtcaatggggcaggaagaaaacacaatttctaactgcctgtttttgtataatttaataaaaaccttttaaacatt

SEQ ID NO: 349599 - DNA, 1612 bp, Homo Sapiens
  misc_feature (998)..(1026): n is a, c, g, or t
  misc_feature (1089)..(1089): n is a, c, g, or t
  misc_feature (1093)..(1098): n is a, c, g, or t
  misc_feature (1100)..(1124): n is a, c, g, or t
  misc_feature (1126)..(1130): n is a, c, g, or t
  misc_feature (1133)..(1139): n is a, c, g, or t
  misc_feature (1142)..(1142): n is a, c, g, or t
  misc_feature (1144)..(1178): n is a, c, g, or t
  misc_feature (1183)..(1183): n is a, c, g, or t
  misc_feature (1190)..(1249): n is a, c, g, or t
  misc_feature (1334)..(1343): n is a, c, g, or t
  misc_feature (1394)..(1403): n is a, c, g, or t
  misc_feature (1416)..(1432): n is a, c, g, or t
  misc_feature (1474)..(1474): n is a, c, g, or t
ttttttatcaaaaaaacaaataaccgataagcatgaattacggtgagcaatgtcatcttgcataccacttcaacggtacaatggcctctgtccggacaggaaaggtgatggggtccctgaccgccccggcccctgtggaggggtgcacacagaaagggggctcgtgccaagctcaaggggcctcctaagaaagccggccgctcctgtgaggaagaccgggcccgggcacctgagggcttctccctctggacactgcgggccaggtgtacatagagcagcgcggcacagtggcctcacctcccgtcgggcactggcgggaccaaggtcgggggcaggcgctgcccagctggccgcacacggacattccaaagacctccagagaccaccccacccccacattcttttgaccagccttgtgagggcatcgatgctgccccgggctacctggctgctctgggcagggtgtgcgggccgggccgcttgggggagggcagctctgggcacgccgcacccacgccccccacctggggaaaacaggcggttcctgcccggttcttcctaaacgctctcgtctttttgtgtgtcttggtgactttagaaacaaacacagtggactcagtggctactggtattgtctcttcccacactgaactctggggaattgagtgcagggcacagcccggctcagcctgcccgctggtgggagcccctgggaagctgcggcgctcctttatctgatgtggtttagtaaaagcctcccacacacctccccgtggcctgggacgtggctggtagtgtttgtgtgggaagcagctcaagacgcggaccgcgtgacattaaggagagcgcaagggcggaccgggccctgtgtagagacccttccgcgccggcgttcccgctccgctaaagatttcaaatccaggggattccatgctcaatggatgaatgtagacacaaaacagcaacacttgtatgaagatgtaaagtgctgaacatannnnnnnnnnnnnnnnnnnnnnnnnnnnnaaaaaatctgaattgtgccctgtactgcagttacttgtttgaataaaagttttatttattgcncgannnnnnannnnnnnnnnnnnnnnnnnnnnnnncnnnnnccnnnnnnnccncnnnnnnnnnnnnnnnnnnnnnnnnnnnnnnnnnnnccacncaaaaannnnnnnnnnnnnnnnnnnnnnnnnnnnnnnnnnnnnnnnnnnnnnnnnnnnnnnnnnnnttttttttgtgacaaagggggccccctataagggggcccgattattaaaaattggggcgggggcccctttttttaaacaaccccnnnnnnnnnnaaaaactcgcaccttggggaacttttttggggaagaacctctttctttgtnnnnnnnnnnaaatattgggcgnnnnnnnnnnnnnnnnngaatttatccgcctctccgggaaaaaataaacatttttttanagggggaacaaggggggtaaaaaacacccgccacatttcttgccgcggctcaaaaggatttctcttctcccgggagcgcggtgttttttgaagaaattattattcccccgcggggcgggcgggcggggcctatacata

SEQ ID NO: 349600 - DNA, 1222 bp, Homo Sapiens
  misc_feature (152)..(172): n is a, c, g, or t
  misc_feature (185)..(185): n is a, c, g, or t
  misc_feature (234)..(234): n is a, c, g, or t
  misc_feature (284)..(284): n is a, c, g, or t
  misc_feature (288)..(331): n is a, c, g, or t
ggcgctcggaacccagcagcggcgctcctccgcggtgccggtcgcccgcgatgcccgcttagcagcgtgtagcagcggccagcatcaccacacccgcggcaccgcgctgccggccgcagagccgggccagagccttgcacccctgcctcagnnnnnnnnnnnnnnnnnnnnntgaaatgacttgntaatcggcgcagacaccaccaaggggactcaccggagtggaatccaagnggaatttggatttggagaagagtttcttgaacatttaccctcttccttgntggnnnnnnnnnnnnnnnnnnnnnnnnnnnnnnnnnnnnnnnnnnnncctctccccttctccgctcgtcattggagatgaacacatcgcgtttgcatcccagaaagtagtcgccgcgactatttcccccaaagagacaagcacacatgtaggaatgacaaaggcttgcgaaggagagagcgcagcccgcggcccggagagatcccctcgataatggattactaaatgggatacacgctgtaccagttcgctccgagccccggccgcctgtccgtcgatgcaccgaaaaggtgaagtagagaaataaagtctccccgctgattttctatgaggtcagaagccttgctgctatatttcacactgggggcgctttgctggggctggtttcccagaagattctgagccaatcagtatttcgcatggcaactatacaaaacagtatccggtgtttgtgggccacaagccaggacggaacaccacacagaggcacaggctggacatccagatgattatgatcatgaacggaaccccctacattgctgctagggaccatatttatactgttgatatagacacatcacacacggaagaaatttattgtagcaaaaaactgacatggaaatctagacaggccgatgtagacacatgcagaatgaagggaaaacataaggatgagtgccacaactttattaaagttcttctaaagaaaaacgatgatgcattgtttgtctgtggaactaatgccttcaacccttcctgcagaaactataagatggatacattggaaccattcggggatgaattcagcggaatggccagatgcccatatgatgccaaacatgccaacgttgcactgtttgcagatggaaaactatactcagccacagtgactgacttccttgccattgacgcagtcatttaccggagtcttggagaaag

SEQ ID NO: 349601 - DNA, 464 bp, Homo Sapiens
  misc_feature (290)..(344): n is a, c, g, or t
atggcccgccagatttttggtcagggcaaaaagcatccgggcttgatccccctctttggaatttatggaaccggaggtttcggaggacacatggatctcttgggtatggcattgttcaaacccaaagtttgttggggcagaaaaaaccccaaggcctgggaccaactgggtccccaagatccaaacaagtttttctcagtgaatgtgggttaccgccaggttaaaaaggaacctccagatttttaaaatagaagttttcccataaagctggtttagaaagaaggtctttnnnnnnnnnnnnnnnnnnnnnnnnnnnnnnnnnnnnnnnnnnnnnnnnnnnnnnngaggtgaacagaaactgaaacattttgtccacaacttcacgggacgtggccagactgggtttgcgttccaacctgcaaaacacaaatacattttttaaaatcaagaaaatttaaaaagac

SEQ ID NO: 349602 - DNA, 486 bp, Homo Sapiens
  misc_feature (77)..(133): n is a, c, g, or t
gaggtgaacagaaactgaaacattttgtccacaacttcacgggacgtggccagactgggtttgcgttccaacctgcnnnnnnnnnnnnnnnnnnnnnnnnnnnnnnnnnnnnnnnnnnnnnnnnnnnnnnnnnttcattgataattctaactcagactttaacaatggcagaagtttactatgcgcaaatactgtgaaatgcccgccagtgttacagctttctgttgcagcagataaatgccatgttgggcaactatgtcatagatttctgctcctcctctcttttaatgaaataacgtgaccgttaacgcaagtaactctttatttattgttcaccctttttttccttaaggaaaggactcttccaaatatcatcctatgaacagctcttcagaaagcccattgaaagttaaactatttaacgtgaaatccattaactggaataattgagtttctttatttttacaataaattcactgagtaaat

SEQ ID NO: 349603 - DNA, 975 bp, Homo Sapiens
atcacaaagagcaatgggaagaacaagctccctttctccttttctcagacacctttggtctaaagttgttctttttctagttcttccctcccctgtaatttttaattatcagaaataaataccagtgcatttcaggtggtcgtctgtgttagagtgcataactgaagttattagtggcttgggagtttgcacatataactggaggtaaacagcagattactacacctaatctcaccctgagcatttctcctctgtcaagtctaaattctgccatcgtcttttgcaaaaacaagcagacatccccaccaaaggccaaaatataatgataactgacagtgaacagaaacccattgtaaagacaactattccagctttcaaattcactgtgactggatactattagttttttgagtttataactccccagaattgtcaaaagtaaccttgtagccaatccgcttgcagacactaaaaaccacctgaaataggccacccagggtaccaaaagcagtgtcaaagagcagtgagacagtgccaccaaggcccagtgcaatgtccttgcaaacaattggaatagcgcccatggtgtacacagggaaagtggccacatccacaaggacacggacagggatgctcagaactcggcaaatggccttcagcagacaacaaaggatccggaggagagccctgatgactttggccacgaccttgagcaccttccagggaatgctcaccaactcttccccaatggccatgaagtatgagatggtggctgagcccaggcggtaaaggcaactttctatgccattaatcacctgcttggtaacacaccacaggaaatagacatgttcttcaggattgctaccacaggtaataaattaattgaaaaagcttgatgaatggggtagcatgaagcccatgagttttcccaaaagctactacttccctcagatgcctctggaggcaacagagtag

SEQ ID NO: 349604 - DNA, 576 bp, Homo Sapiens
ccgggaaccggccggtcccaacacccaaatcaggagtggctctgctccaccagcaactcctgtgatggtgcctgattccgccgtggcgagtgacaacagtccagtgacccagccggccggcgagtggtcagagggcagccaggctcacgtcactccggtggccgctgtccctgggcctgcagcgctgcccttcctctatgtccctggatctcccactcagatgaattcttacgggcctgtggtggcccttcccacagcgtcccgtagtacccttgccatggacaccacaggacttcctgcacctggcatgctgcccttttgccatctctgggtaccggtgaccctagtggctgctggggctgcacagcctgctgcctccatggtcatgttcccccatctcccagctctgcaccaccattgcccccacagccaccgcacgtcacagtacatgccagctagcgatgggccccaggcgtacccagactacgcagaccagagcacatagagggcagcatttgggcagaatatgtgctggtcaataaatgtgtcagaaaatgagtaattttctgactgcac

SEQ ID NO: 349605 - DNA, 1513 bp, Homo Sapiens
  misc_feature (666)..(702): n is a, c, g, or t
tctggcatgatgttgcttattaaagggcttagaagagttctcaagggctattaatatcactttagaaaccccatctgttgtcttggtgctggaaatttccccatgtctgatcctcaataacacaattcactaaaggccaagcttggctcaatctgattttcccattcttactacttcacagccatgaatgtgattgctcaatccagttggccctgagagcaccttgccctgctgaccttcactgtcacctcggtcttgaatcagagccccaacccaaacactccctgcctgtccctaccccagcctttattctcaccacttgtttaacggcatgaccttttagtttctccattcccagacacccacacacccagacttccttctgagttgcaggtttctccttagatgtccaactagaaatattactaggaaagttacttttcaaagcaggaatgtgctgggaagtaggagacagcaactccctcctctctccccaaaattattggatcaaaaaagaaattccatccatctcagaatctgtgagtcctcctcacataaatctgagggaaaaggctgtgtcactgcatctttgcaggaagaaagagaagcaagagctagacacacttcagaatatatcttagtttcccctttcccagtttaacatgnnnnnnnnnnnnnnnnnnnnnnnnnnnnnnnnnnnnnggaagccttcctctcacctcattttgtaaatgaaaaatccctaattcagtgaattcacctagtcactgcaaatgtatctgaatagtgcttggtgtgcttgccagtctgatcatccactcattctactaacatcttttttgcacccactctgtcaagctctagcctagacctttagtgtgccatgcagtcacaggtctgaaaagcagcatcatccaaaccttacttaatctctaaaatctcagctggtggacagctcatgattagttcagcccacttcctcccccttagttgagtttgcagcaggacgcaggagataagcacttccaagcaagtctgatttatatatcaaactcggtctccatcccaggccagctgaccctcagagccagcaatgctctgtgcttcctccctgcgtcacggcttggcaagagctgcctctgctgagcagtgtgtgtgatggagacggaggccgctgaaggccgagtgcttgcaggcttgtgaactgccatcgaacacaatccaaactctggaaatgttcctgaccacctaagccctcaacaacgtaatgcctgtatgtgctgtttttcagtaaactccttgttcatgtcaataaagtatccctgaaaaccaaaataaataaatatataactaacacaattacaattaattggcgggcgctattactaccgcagggatggtttaaaaccatgtcttacataactaaattggcttgcgtacactcattttttgaatcgacgctagataggttctgacgtatggctatccttacattagccacgcatggggagtc

SEQ ID NO: 349606 - DNA, 1456 bp, Homo Sapiens
  misc_feature (43)..(79): n is a, c, g, or t
tggcagcctatggggccctcggattaatcgcggtggcggccgnnnnnnnnnnnnnnnnnnnnnnnnnnnnnnnnnnnnnatcaggccaaatcggccgagctcgaattcgtcgagagcgggatgttgtggccgccggctggcggcggccgagtgggcggcgctggcctgggagctgctgggcgcctcggtgctgctgatcgctgtgcggtggctggtgcggcggctgggcccgcggccgggaggtctgggccgcagcgggaccccagttcctccgccaagcgcggccgccgcccccgcctcaggtgaaatgacaatggatgctctgttggctcgattgaaacttctgaatccagatgaccttagagaagaaatcgtcaaagccggattgaaatgtggacccattacatcaactacaaggttcatttttgagaaaaaattggctcaggctttactggagcaaggaggaaggctgtcttctttctactaccatgaggcaggtgtcacagctctcagccaggacccacaaaggattttgaagccagctgaagggaacccaactgatcaggctggtttttctgaagacagagattttggttacagtgtgggcctgaatcctccagaggaggaagctgtgacatccaagacctgctcggtgccccctagtgacaccgacacctacagagctggagcgactgcgtctaaggagccgcccctgtactatggggtgtgtccagtgtatgaggacgtcccagcgagaaatgaaaggatctatgtttatgaaaataaaaaggaagcattgcaagctgtcaagatgatcaaagggtcccgatttaaagctttttctaccagagaagacgctgagaaatttgctagaggaatttgtgattatttcccttctccaagcaaaacgtccttaccactgtctcctgtgaaaacagctccactctttagcaatgacaggttgaaagatggtttgtgcttgtcggaatcagaaacagtcaacaaagagcgagcgaacagttacaaaaatccccgcacgcaggacctcaccgccaagcttcggaaagctgtggagaagggagaggaggacaccttttctgaccttatctggagcaacccccggtatctgataggctcaggagacaaccccactatcgtgcaggaagggtgcaggtacaacgtgatgcatgttgctgccaaagagaaccaggcttccatctgccagctgactctggacgtcctggagaaccctgacttcatgaggctgatgtaccctgatgacgacgaggccatgctgcagaagcgtatccgttacgtggtggacctgtacctcaaaccccccgacaagatgggctatgacacaccgttgcatttgcttgtaagttggaaatgccgatgttgtcacgtgcttcgtcacccatttgttgtaaaactccgggttattgtaacctgtgtt

SEQ ID NO: 349607 - DNA, 1283 bp, Homo Sapiens
  misc_feature (1179)..(1179): n is a, c, g, or t
  misc_feature (1216)..(1216): n is a, c, g, or t
tactaaggtagcgaggcctgggtggcgaattcggcacgagggacgtcccagcgagaaatgaaaggatgtatgtttatgaaaataaaaaggaagcatgcaagctgtcaagatgatcaaagggtcccgatttaaagctttttctaccagagaagacgctgagaaatttgctagaggaatttgtgattatttcccttctccaagcaaaacgtccttaccactgtctcctgtgaaaacagctccactctttagcaatgacaggttgaaagatggtttgtgcttgtcggaatcagaaacagtcaacaaagagcgagcgaacagttacaaaaatccccgcacgcaggacctcaccgccaagcttcggaaagctgtggagaagggagaggaggacaccttttctgaccttatctggagcaacccccggtatctgataggctcaggagacaaccccactatcgtgcaggaagggtgcaggtacaacgtgatgcatgttgctgccaaagagaaccaggcttccatctgccagctgactctggacgtcctggagaaccctgacttcatgaggctgatgtaccctgatgacgacgaggccatgctgcagaagcgtatccgttacgtggtggacctgtacctcaacacccccgacaagatgggctatgacacaccgttgcattttgcttgtaagtttggaaatgcagatgtagtcaacgtgctttcgtcacaccatttgattgtaaaaaactcaaggaataaatatgataaaacacctgaagatgtaatttgtgaaagaagcaaaaataaatctgtggaactgaaggagcggatcagagagtatttaaagggccactactacgtgcccctcctgagagcggaagagacttcttctccagtcatcggggagctgtggtccccagaccagacggctgaggcctctcacgtcagccgctatggaggcagccccagagacccggtactgaccctgagagccttcgcagggcccctgagttccagccaaggcaggaagattttcgcaagctctggaaaaatccaactcgagagaaagcaggcttccttcaccacgtcaagaagtcggacccggaaagaggctttgagagagtgggaagggagctagctcattgagcttggggtatccctggggtttgaattacttgggaatttctngggctgttttgtttgatctgtctttcccagggaaggncttgcaaagattagaaggattttttcacacagcagggaatagggcaaaaagggttcaaccaggaaca

SEQ ID NO: 349608 - DNA, 710 bp, Homo Sapiens
tattttggaactcatttcagttgggatctcctgtatgcagagtgttgcatttagaggtttgagtcccatcttggtttcttgccgtgctgactgtagccttcaccttgacttgaatgaaggtctgtggttggaatgtgtgaggagccgctgaggtgttcaggaggtgctgcctggaggtcggtttcttcctgggtgttacgggcaactgctcacacagttgtttctctgtgaacatttccagtgtttaatccaaaatgaaaacccaccaatgcttttgctaacttcagtgccttttataaatcatttttaaatttcctgaacttgctttttgaggatatacagggatattaagtagacgcaggattgtttttgtttgtaaaaattctgaattgaaactttgttttaaaaaaaggcttctttctttcatatgacaagagataggtcaggaatattggaatcaagatttaaatgttaaaattcgattttgttacacagggtgtgttcatttgttttgtagcagacaagatctagatcccagacagaaacaacacatgctattctaaaaagccgcattttaaaaggcaccttggttctcaaaagaaatcagaatatggatattcgtagtgatgatctgttttctctaaaatcttaccatattgtctgtatatggttgtaaattcaaatggaaagtaaaacgttttggccctgat

SEQ ID NO: 349609 - DNA, 879 bp, Homo Sapiens
accccatcagcacctatccccacgggctccatactcactcagtctgtaggtttgctattgttgtcctcccaaaactatacgggtctttgtctgcagagaagccacagatacttaggttccaggctcatgtggggaagcaggagggggcgtaaccaatcagccttggtttgtgaagctctggggaggaggagcatgtctggaccagcagggaagacaacgtctgactggtctttccagagctacaccatcaaggcctctgcttgaaaccaaaatgctccctgataacttctcaaccttccattgcaggtaaaggcataatgtgaattcattttgttttgagaaaactaaaaacatcctatgttgttacaaaaccaacgttgggaaccactgggtatcctaagtggattcatggtggcattttggaaggtggattcttgcagttgcccttagatataatgccacaccctgattttaattaagtatcatggatatcttctgggtccattaattgtgacctcctaatttgggtgagggcaggaaagtataaaagactctctgatagcccctgattctgtaaatcttggggggcttttttccctatttaaatagaaccagacattgatattggggccccagttttagcctaggtttgctccagatctttaatcagatagaaatgttcagagtcaccctgagaccatcttacatctgaagtggggcatgactcctggggttctggtctaccacagtgagccctttccctaggactgccactctgccccattacacatagacaagggtgaggagggtcattacccagcaagtcgcctgagaggttgacaggcaggatgacacacagggacaaaagctgaccaccac

SEQ ID NO: 349610 - DNA, 2867 bp, Homo Sapiens
  misc_feature (157)..(158): n is a, c, g, or t
  misc_feature (175)..(175): n is a, c, g, or t
  misc_feature (182)..(182): n is a, c, g, or t
  misc_feature (199)..(256): n is a, c, g, or t
  misc_feature (289)..(289): n is a, c, g, or t
  misc_feature (296)..(296): n is a, c, g, or t
  misc_feature (300)..(300): n is a, c, g, or t
  misc_feature (311)..(311): n is a, c, g, or t
  misc_feature (342)..(342): n is a, c, g, or t
  misc_feature (442)..(442): n is a, c, g, or t
  misc_feature (457)..(457): n is a, c, g, or t
  misc_feature (475)..(475): n is a, c, g, or t
  misc_feature (501)..(501): n is a, c, g, or t
  misc_feature (505)..(505): n is a, c, g, or t
  misc_feature (539)..(539): n is a, c, g, or t
  misc_feature (542)..(543): n is a, c, g, or t
  misc_feature (555)..(555): n is a, c, g, or t
  misc_feature (562)..(562): n is a, c, g, or t
  misc_feature (762)..(762): n is a, c, g, or t
tcccgggatctgcgggccccacgggtgttagtggcgggggcggcagagtccgggtgggttgtcgcgacggagccgggcctcttcgccgtcttgagacggggctggcgagaagggcccctcacggagttgccatgggcgtctaaccgcggcagccagnnccctctctacgtgagancccggcncccctcccctttctgcnnnnnnnnnnnnnnnnnnnnnnnnnnnnnnnnnnnnnnnnnnnnnnnnnnnnnnnnnntccgtctcccacggagcaggccgggctctcgcnatgggtnactntcgcctctgcnacgggaagttttcctcgagaagcctgcgcanatctccgagagggtgcctggagcgagcatggagaggccatccgcagaggagcgcgtgctcgtacgggacttccagcgcctgcttggtgtggctgtccgcnaggacccaccttgtntccgtttgtctgcaaganctgccacgcccagttctaccagtgcnacanccttctcaagtccttcctgcagaaggtcaacgcntcnncggctggtcgcnggaagcnttgtgcaaagtgtcggtgcccagcccccaaccaggggcagagaagggagcgtgtctggcccccagtgcctgcacggcttggtggggtgggggcatgaacatgcggccagctgcggggccctgccccaccttcagaggacactgtcctccgagtactgcggcgtcatccaggtcgtgtggggctgcgaccagggccacganctacaccatggataccagctccagctgcaaggccttcttgctggacagtgcgctggcagtcaagtggccacgggacaaagagacggcgccacggctgccccagcaccgagggtggaacccgggggatgcccctcagacctcccagggtagagggacagggaccccagtttggggctgagaccaagaccctgcccagcacggatgtggcccagcctccttcggacagcgacgcggtggggcccaggtcgggcttcccacctcagccaagcctgcccctttgcagggccccagggcagttgggtgagaagcagcttccatcttcaacctcggatgatcggagacgtcttgagtgaagatgaaaatgacaagaagcaaaatgcccagtcttcggacgagtcctttgagccttacccagaaaggaaagtctctggtaagaagagtgaaagcaaagaagccaagaagtctgaagaaccaagaattcggaagaagccgggacccaagcccggatggaagaagaagcttcgttgtgagagggaggagcttcccaccatctacaagtgtccttaccagggctgcacggccgtgtaccgaggcgctgacggcatgaagaagcacatcaaggagcaccacgaggaggtccgggagcggccctgcccccaccctggctgcaacaaggttttcatgatcgaccgctacctgcagcgccacgtgaagctcatccacacagaggtgcggaactatatctgtgacgaatgtggacaaaccttcaagcagcggaagcaccttctcgtccaccaaatgcgacattcgggagccaagcctttgcagtaagtgtgagtcaggaccccccccagggctgtccctcgcaccttctaatctgcctctgtcccccagtgtgaggtctgttggttccagtgcaggcagcgggcatccctcaagtaccacatgaccaaacacaaggctgagactgagctggactttgcctgtgaccagtgtggccggcggtttgagaaggcccacaacctcaatgtacacatgtccatggtgcacccgctgacacagacccaggacaaggccctgcccctggaggcggaaccaccacctgggccaccgagcccctctgtgaccacagagggccaggcggtgaagcccgaacccacctgaggacggcagtgaggatgagcacctctagcagcctggactccgcagtggctgtgtcagcctcacccttcgtgtgcacccgcatgggagggtcggagggtgctgcccgcccttggtgctggaggcgggcttggtgtccggctcaagtagccttcctctgctctgggaccagtggtttattttcccgcaaacgctgagtgactcggggccggacagttcataaataattgattcctttccccactaaagcagtcgaggagatttgtaatccactttttagtgcaacaagagctccatgttatgcttgtaataaattatttacacgggagctgggctggtgtgcagtggcaggtcccgtcagaagagatgaggctcctgggacaggtcagcgtcaggggcagcctgctgtctgctctggagggcggcgctcacctctgggtcgcagtccccacgatcagccagcagctctgccacgtgtgagaagctctttttcgggcaccgaggtattaaagaaacagggctggtgtgtcccccatagtctgcatgctgtgccggaacattctttggcagaaggagcctccggctggggggagctcccctggaggtgggactggcccttgcacctgcctgacccttgagctccaggctcctgccagctggaggtgaaactgtgcttgtatccccagccacgaagagctggaccagcttcaagtacatgtccacagcaacatgcaggaaggcctcttccctgatggccgcgtcttcatggaagtaggagagaagactgtaaaaagcgaaaggcagcagcctggtgtgctgatccggggccacacggaggaggagccggcccagcctgaggtcactctctgtcaactgaaagagtgccagccaggatatctttctcttctctaacactcgaggattgctggacaacgtgaaaagct

SEQ ID NO: 349611 - DNA, 440 bp, Homo Sapiens
  misc_feature (13)..(13): n is a, c, g, or t
  misc_feature (28)..(28): n is a, c, g, or t
  misc_feature (36)..(36): n is a, c, g, or t
  misc_feature (73)..(73): n is a, c, g, or t
tgggggaacaaangcaagataaaaaagntgccgaangcccacaagcccctgggagggggtccctgaactcaanacttaactgcaaaggccttggctcccgaatgtcgcatttggtggacgagaaggtgcttcccgctgcttgaaggtttgtcccacattcgtcacagatatagttccgcacctctgagaggggagagtccagtgagtcccaggcccctgatgctccaacctcccggggggacgacgatgacaatgtgaaaccatcacagctgggaagacatttctgcacatggttcaccatgcagtgggcccaagcaaggggcctatgagggcctcgtttattaagatctttaaactgctttatacactgtccacgtggcttcatcagctgcgtgcatttcaggatggtttttaaagaaacctcagaaagctatttcctt

SEQ ID NO: 349612 - DNA, 715 bp, Homo Sapiens
  misc_feature (29)..(29): n is a, c, g, or t
  misc_feature (88)..(88): n is a, c, g, or t
ctggactgcgaagagagagctatgagttntcttgtcatcttctcttggatgggcgtgctgtcgtcacatctgacatcaaatagcaccncagtcgtgccaaatgcttgccacgtgtgtgcagcaatcatcgagtgtttagagaagagcaagatatctaggctggcactctttcagttgacagagagtgacctcaggctggggcggctcctcctccgtgtggcaccggatcagcacaccaggctgctgcctttcgctttttacagtcttctctcctacttccatgaagacgcggccatcagggaagaggccttcctgcatgttgctgtggacatgtacttgaagctggtccagctcttcgtggctggggatacaagcacagtttcacctccagctggcaggagcctggagctcaagggtcagggcaaccccgtggaactgataacaaaagctcgtctttttctgctgcagttaatacctcggtgcccgaaaaagagcttctcacacgtggcagagctgctggctgatcgtggggactgcgacccagaggtgagcgccgccctccagagcagacagcaggctgcccctgacgctgacctgtcccaggagcctcatctcttctgacgggacctgccactgcacaccagcccagctcccgtgtaaataattatattacaagcataacatggagctcttgttgcacttattagtggattac

SEQ ID NO: 349613 - DNA, 808 bp, Homo Sapiens
  misc_feature (546)..(601): n is a, c, g, or t
ggagctggtatccatggtgtagtcgtggccctggtcgcagccccacacgacctggatgacgccgcagtactcggaggacagtgtcctcgaaaggtggggcagggccccgccagctggccgcatgtccatgcacccaccccaccaagccgtgcaggcactgggggctggatgtgatcagatccaccagacacgctccctcctctgcccctgttgggggctgggcaccgacctttgcacaaggcttccggcgaccagccggggaggcgttgaccctctgcaggaaggacttgagaaggctgtggcactggtagaactgggcgtggcagctcttgcagacaaacggagacaaggtggggtcctggcggacagccacaccaagcaggcgctggaagtcccgtacgagcacgcgctcctctgcggatggcctctccatgctcgctccaggcgccctctcggagatgctgcgcaggcttctcgaggaaaacttcccgtggcagaggcgacagtgacccatggcgagagcccggcctgctccgtgggagacgnnnnnnnnnnnnnnnnnnnnnnnnnnnnnnnnnnnnnnnnnnnnnnnnnnnnnnnnggctgcagaaaggggaggggggccggggtctcacgtagagaggggcctggctgccgcggttagacgcccatggcaactccgtgaggggcccttctcgccagccccgtctcaagacggcgaagaggcccggctccgtcgcgacaacccacccggactctgccgcccccgccactaacacccgtgggcccgcatcccgggaattccgga

SEQ ID NO: 349614 - DNA, 552 bp, Homo Sapiens
  misc_feature (125)..(134): n is a, c, g, or t
  misc_feature (223)..(231): n is a, c, g, or t
gggtgatcttatggtggaagaggtcgtcagcaagtgtacagtatttaccttcctttgtcttacattggctttttaaattttccattaatttcaacataattatgggaacaagtgtacagaagaannnnnnnnnnaagatatgtgagaacttttcatagatgaactttttaacaaatgttttcatttacaggaaattgcaaagaaaattctcaagtgatagtcnnnnnnnnnaagtgtttcgtaagacaaaaattgaataatgttttttgaagttctggcaagattgaagtctgatattgcagtaatgatatttattaaaaacccataactaccaggaataatgatacctcccaccccttgattcccataacataaaagtgctacttgagagtgggggagaatggcatggtaggctacttttcagggccttgacaagtacatcacccagtggtatcctacatacttctttcaagatcttcaaccatgaggtaaaagagccaagttcaaagaaccctagcacaaatttgctttgggattttcttttctggaaaa

SEQ ID NO: 349615 - DNA, 503 bp, Homo Sapiens
tgacatgctgagaggccttcgaagctgcctcagaatcaaggtccctctaaccttctctcccaagtatagggaggcactctctctagaatttcctaatctgatcgagaaaacgtctttccaaaagaaacaaaattgccttcctcccctctccgaaatctcatctagctcagaaaagaagactgaggaaggcaactacgcctggatggatttttcacaagatgatgcctgtttctcgggctcattcaaattctaaagagaatcatttacaagttaatttctgtccattttttcgccctaagaatcacttgctgccctcagaagaattgtctatattctccatctctccccttcccctatgaaaaagagtgtatacgcttctgtaccccattgggttattgggtaatcattctcctgtgacccttcccttcccaccccctcgcctccccgccccgtgctatgcacgttaaaataaaattttgtatgtcttttctcctattaaaaaa

SEQ ID NO: 349616 - DNA, 376 bp, Homo Sapiens
gggtgggtcgggcggcctcctttgggtgcgtgtgctggtctggggcggcggagccttcctctcccttgacgtcttgcgagctcttggcctggctttcttccggagtaacttctgagactcaggataatgcaccaaaatctcattcaggtccttcttatccaggatgaagaggttggtaaacccgtgcgccaccacgttggccgtgcgccggttcccgcccccaacagccagcaagcttatttctccaaacacagatccagctttcagcgtcaccagcacagatttcccatcagggccgcccaagacctgcacttgccctgcctggatgatgtacatctcacggccgatctcccccttcttgcacacatagtcgttg

SEQ ID NO: 349617 - DNA, 783 bp, Homo Sapiens
ctgagtctgaggcagcctctccagtcagagatttctaatcagcttatctagttcttttaaaaccccacagctgatctactttgcctgacttccccggggcctagaaaatgaccctggacacctttctctaactgattagctctggctgatttgtcttaatgctaaaccactgtgtaacagtactaaattatacttaatgacacagtctactgttttgaagagtgctgtgtatgactgactgagctaaaaggattgctggctatgagtgagttttagttttagaattcattttcaaagactcacaaggctcaagaagcttgaaaaccacagatgatgtatacagtagctggagttccctggaggctcctttctagggtctctcatttgaattggtgcagaactgaaagcagagagtcagaaagtaactctgcttgtaaaaatggcttaggaaaaggaacttaagattgtgggttatatgtgtgtatgtgtgcacacacatgtatgtttcctgaattctaacctgaaaatatcacatttgtggatacttaaaatactcatatgcattttgatacacaaaagcaattcaaagtatgtaaaaggaggctggaaatgtaagcttaacagtgatattctggagaaaaatgttgtaactgtcactccaggcctcccttaggagaaaccaaacttgtcagatattttggaatggtagctctttttcaggaattagaataactgaagtatgatactgtgttccgtgtgctttaaaatctgtgaccctcccct

SEQ ID NO: 349618 - DNA, 1007 bp, Homo Sapiens
  misc_feature (164)..(185): n is a, c, g, or t
aggctggtacggtgccggaattcccgggatggctctgctcgcccaccacccaatcctcgcctcccttctgctccaccttctctatatgccctcacctctcccccgaaaaccccctatttagccaaaggaaggaggtcaggggaacgctctcccctccccttccnnnnnnnnnnnnnnnnnnnnnnccttttccaggccggggaaagcaggagggagaggggccgccgggctggccatggagctgctgtgccacgaggtggacccggtccgcagggccgtgcgggaccgcaacctgctccgagacgaccgcgtcctgcagaacctgctcaccatcgaggagcgctaccctccgcagtgctcctacttcaagtgcgtgcaaaaggacatcaaaccctacatgcgcagaatggtggccacctggatgctgaaggtctgtgaggaacagaagtgcgaagaagaggtcttccctctggccatgaattacctggaccgtttcttggctggggtcccgactccgaagtcccatctgcaactcctgggtgctgtctgcatgttcctggcctccaaactcaaagagaccagcccgctgaccgcggagaagctgtgcatttacaccgacaactccatcaagcctcaggagctgctggtaatgaccggccccttcctcccttcctttctgcgattcccgctttcccctggccaacaatatgccttctatcaccactgccagagcaaattcttgggatccagaatgaccccaccaatagaatttacccacttatgggcgatagctcatttaataggaaaccactgtttattttttgtgtgttcctactatgtgcccaggctccgtgcccagcactgaggctacatctgtgaataagatcctcatggagatttgggttggtgagactcatttgcaattgtgtatgcatgtgtgtaggggacgcatggaatattttaattaacagtgataatattttaattaaattccaaatttccaaaaa

SEQ ID NO: 349619 - DNA, 959 bp, Homo Sapiens
  misc_feature (3)..(3): n is a, c, g, or t
  misc_feature (18)..(18): n is a, c, g, or t
  misc_feature (21)..(21): n is a, c, g, or t
  misc_feature (37)..(37): n is a, c, g, or t
  misc_feature (858)..(867): n is a, c, g, or t
tancttgcgcagtgctcntanttcaagtgcgtgcagnagcacatccaaccccacatgcgcacaatggtggccacctgcatgctgcaggtctgtcaggaacagaagtgcgaagaacaggtcttccctctggccatgaattacctgcaccgtttcttggctggggtccccactccgaagtcccatctgcaactcctgggtgctgtctgcatgttcctggcctccaaactcaaacagaccagcccgctgaccgcgcagaagctgtgcattcacacccacaactccatcaagcctcaggagctgctggagtgggaactggtggtgctggggaagttgaagtggaacctggcagctgtcactcctcatgacttcattgagcacatcttgcgcaagctgccccagcagcgggagaagctgtctctgatccgcaagcatgctcagaccttcattgctctgtgtgccacggactttaagtttgccatgtacccaccgtcgatgatcgcaactggaagtgtgggagcagccatctgtgggctccagcaggatgaggaagtgagctcgctcacttgtgatgccctgactgagctgctggctaagatcaccaacacagacgtggattgtctcaaagcttgccaggagcagattgaggcggtgctcctcaatagcctgcagcagtaccgtcaggaccaacgtgacggatccaagtcggaggatgaactggaccaagccagcacccctacagacgtgcgggatatcgacctgtgaggatgccagttgggccgaaagagagagacgcgtccataatctggtctcttcttctttctggttgtttttgttctttgtgttttagggtgaaacttnnnnnnnnnnttctgcccccacctagatcatatttaaagatcttttagaagtgagagaaaaaggtcctacgaaaacggaataataaaaagcatttggtgcct

SEQ ID NO: 349620 - DNA, 465 bp, Homo Sapiens
gattcctgaaaacaatgcacttaacttcagtatttggtcttttagttataattcttaaaaataagacattttaaaacatattaaatgtgcattatttggaaaaaagtatatgcaaatgaacctggaaatatcaatatacaaaccaatttttcaattctccagtccatggagggagatactcatgtatttgacatttgaaaaccattttttttagcaactatgatagtggtttctagactttgtccttaagcacaagccattcttcctatatgacatgatcataacaaagatttatatatagctccagagaatagtgagatttgcagtcttctgatggatatcaaagttgaaggctaaaagacactttggtggtatagctgggaacagattctctttctttaaggtcttcaatataggctttcataacttctttatcaaaatgttggcgatcccgttcactttcca

SEQ ID NO: 349621 - DNA, 483 bp, Homo Sapiens
ttatgatagaaaatataaatggtagtgggcccaggaactaggaaaccttgattcaaagtgtttgttctgccactagttcaatgaatggtcttattcaagtcactcctgcctttgtctttcaaatgagagaataagaccacttggtgtctaaagtctttctatctctgacattaccttgagagaaaggtgcatcaaccacaatggatgattttgagaatatctaaactttttcatagagaccaaagcaaataggattattattgcattgtgtaattgtgctcatggttcaagttttaccatgttttagtccctcccagaaaaggaagtagggcataatgccatagaaacaaggcaaatataaacaccaactctctgaaaggaaagagaggcagtacctactggaagttctttttctatgataattggtttatttccccttggggtatagggtttgggaaaaataatgcacagatattggtgaaa

SEQ ID NO: 349622 - DNA, 489 bp, Homo Sapiens
  misc_feature (266)..(311): n is a, c, g, or t
ctttggcaaggttcccctgtccagcaggatgctggcttcctgaccccattaatcagagattcaactttccaagtgcaggcggcctacacagtccatggtagttgtcccaaggaccatggcctgacctttgtggactgagatgctaatgctgaaatcaggtttgaattccagcagctcctcccaatttctaggcaattatcgtaacttctgtgagcctcaactttctcacctacaaaatagggatagtcatggtgtttggcagactnnnnnnnnnnnnnnnnnnnnnnnnnnnnnnnnnnnnnnnnnnnnnnggccagcattccctctccccatatttttaaggagagaattcacctttttctctgttggatgatcacaggttctgctcttcccaatccagaggcaggtactattcaccccatggggtcatagagaggattaaacagggtgatgcctgcaatgggaatatttgaaaacctttcttccaac

SEQ ID NO: 349623 - DNA, 1387 bp, Homo Sapiens
gggcgagcgctatacgccgcgcggctgcctcgccctctctcctggtgatagccatttggcgtcttctgtctgctctcggtgcctggcgaagcccgagttggccctgaggcgtctgcacggggaggcgagggcgagcatgtttgttgtttaccaagaattggaaaaataagggcccggactcttcggactctctgtacggtattggggtgtgggagccacctcctcccctgaaggtcccaggatactcgctgcccgcaccctgcgggctcggccggacattcctcggaaacagctgcgtctgtgtgagaaatgagcggattacctgaggcgtgcgaggggtttagagacagcattttgccagtccacgacactgaagcggggcaaacgtgggaactccttactgccagaaaggtgagggaatgaggagatgcagcaagcctgctgaaaaggcggcagacatgctgcggggccagcagccacgggaccagcagccacgcagtctgccttcgcagcgtagcttcattcattcatgcgcgtagcaaataagtattcaatgctcaccctatgccattgttctgggcgtcaatgaaagggagtataaacagcacctgctcccatggatttggaaggaatctttgctacaatagctaatgaagattgactttgtgcgtcctcaagctactctataacttgtatgcccattgattttaattgcatttaagattctgcagtgcacttagtggatgtgcaaacgttttaaacataaaatagaggtcacagcctattgacctctgttcccgtttgcttctttggaaaagtttttagttttgttgctatcttgggatcaaaaatagtgtcccctcttttcttaatgtgcttataaattaatataagttcccttttattgattttccatttcaaacataaatgttaaccaacaagtaacagtttacacatagatgtctgtatgctgctctttctagtcacatccatttagctataacatgatgaagtctaattaattgaagcttcaataaatggaaggaccagcttaaagtaaaataagcctgtgaaaaatcttggcacaattgaaatttcataaatatctgtgaaagataattaggcatcttaaagtgaaaagtcttcattatgaacttattaatgaagatggatgtttttgaagtttgaaagaattcttgtcttaaggtaggggtgtccccaaggagagggtaaattattacctgtcaaaggatatgacaagaaagtacttactggtgaattttctgtgttcgaaagcctggctctgtagaactagaaattggtatcgtaagcccaacagtgggttcattttgtagagtagtctcaaatttataaatctcaaaaaaga

SEQ ID NO: 349624 - DNA, 416 bp, Homo Sapiens
gggagaagcctggaggaggagcttgagtccagccactgtctgggtactgccagccatcgggcccaggtctctggggttgtcttaccgcagtgagtaccacgcggtactacagagaccggctgcccgtgtgcccggcaggtggagccgcccgcatcagcggcctcggggaatggaagcggagaacgcgggcagctattcccttcagcaagctcaagctttttatacgtttccatttcaacaactgatggctgaagctcctaatatggcagttgtgaatgaacagcaaatgccagaagaagttccagccccagctcctgctcaggaaccagtgcaagaggctccaaaaggaagaaaaagaaaacccagaacaacagaaccaaaacaaccagtggaacccaaaaaacctgttgagtcaa

SEQ ID NO: 349625 - DNA, 630 bp, Homo Sapiens
gaggaagaaggggagaaggaggaggaggatgatcacatggagtactgccgcgtatgcaaggacggcggggagctcctgcgctgtgacgcgtgcatctcctcctaccacattcattgtctaaaccctcccctgcctgacattcccaatggtgaatggctgtgtccccgatgcacatgccccgtgctgaagggtcgagtgcagaagatcctacattggcggtggggggagccacctgtagcagtgccagcccctcaacaggcagatggaaatccagatgtcccacccccccgtcctcttcaaggcagatcagagcgagagttctttgtcaagtgggtaggactatcctactggcactgctcctgggccaaggagcttcagctggaaatcttccatttggttatgtatcgaaactaccagcggaagaatgacatggatgagcccgcacgcctggactatggctccggcgaggatgatgggaagagcgacaagcgtaaagtgaaagactcgcactatgctgagatggaggagaagtactatcgttttggcatcaagccagagtggatgaccgtccaccgcatcatcaaccacagtgtgatacgaagggggatgacacgggatcctctagattag

SEQ ID NO: 349626 - DNA, 491 bp, Homo Sapiens
gtcctccatgctccttcccttaccacaggtggatgcaaatgcccacagtgatgtgggaagtcaggtgtttaagaagacagagcctctattggtcctaatccctaatgactgtgcagaatggaactcatacactcccatcccccaagcctggagtcaacttggattatttcatgagcaagacatcaactttgtgttccagctcttagagatattgaggtcaattgtcctggcaaatggccaaccctaactaatcttatcctttccttccctagtcaaatcacctggtcaacctgctctgatatgagattttaccaagcttgccagttatctgtaggtcattcacaagaaacagacttctacagcctcaccattcatgtgtagatgaagtcgagaagctaaaaactagatgagattcagaaaaatatattttccaagggtgataaagatttcatctgatgtattgactccaaattattattagtggctgcttg

SEQ ID NO: 349627 - DNA, 475 bp, Homo Sapiens
agcctgggccccgcttgtacagttgcgcaagcgcggtggacccctgcctgccaagtgcatccaggtcaccgaggtgaagagcagcaccctgaaccccgtctggaaggagcacttcctcttcgagattgaggatgtgagcacggaccagctgcacctggacatctgggatcatgacgacgatgtatccctggtagaagcgtgcaggaagctgaatgaagtcatcggcctgaagggcatgggcaggtacttcaaacagatcgtcaagtcagcccgcgcaaacgggacagcaggacccatcgaggaccacaccgatgacttcctggggtgcctcaacatacctgtccgggaggtgcctgtggctggcgtcgaccgctggttcaagctggagccacgctccagtgcctcgcgtgtgcagggacactgccacctggttctcaagctgatcactacgcaactggtacggcgggggggatcc

SEQ ID NO: 349628 - DNA, 1202 bp, Homo Sapiens
tttcctctcccccgctccgtccatgaagaagaatctttagctggtccggtccggaaatacaggatgcggagcctccgcctggggggccccccatccctggctgtcccccagctgcgcgtccccgccccacccccgcggctgagccaccaccggtgcagtggtctccgcttggcggagcgagccttgagcttcgttccacagcttctttgcatcttggatttcggggcggccccctcccccacctctctctgcctttttgtaccccgctttttttctgcgttctgctcggtttttgtagccgtctgtttttgcaccccatttcgttttgtttctagacggtttggcggggggtgaagctgcattcataccccttcctcttgttattctcccctgctctgacagcaccccttttcatcgcagttggggggcctaggatcggtgcatcttccgccgcgctgccagcaccccgcagcgcgtggtcgtgcaccccggaatctgcagcagctgcatatctgaggggggtctcctttgcccgcgccgccttcgctccccgtgcttttgggtgtgtggagggcttcagtgcgcggcgcccccgcttctccgcaaccccccgccccgcgcccggactcgccccgcgccaccaagatggtcatccagaaagagaagaagagctgcgggcaggtggttgaggagtggaaggagttcgtgtggaacccgaggacgcaccagtttatgggccgcaccgggaccagctgggcctttatcctcctcttctacctcgttttttatgggttcctcaccgccatgttcaccctcaccatgtgggtgatgctgcagactgtctccgaccatacccccaagtaccaggaccgactggccacaccgggcttgatgattcgccccaagactgagaaccttgatgtcattgtcaatgtcagtgacactgaaagctgggaccagcatgttcagaagctcaacaagttcttggagccttacaacgactctatccaagcccaaaagaatgatgtctgccgccctgggcgctattacgaacagccagataatggagtcctcaactaccccaaacgtgcctgccaattcaaccggacccagctgggcaactgctccggcattggggactccacccactatggttacagcactgggcagccctgtgtcttcatcaagatgaaccgggtcat

SEQ ID NO: 349629 - DNA, 859 bp, Homo Sapiens
atcgagctcggtcccaagttagtcgggacgactggccacaccgggcttgtatgatcgccccaagactgagaaccttgatgtcattgtcaatgtcagtgacactgaaagctgggaccagcatgttcagaagctcaacaagttcttggagccttacaacgactctatccaagcccaaaagaatgatgtctgccgccctgggcgctattacgaacagccagataatggagtcctcaactaccccaaacgtgcctgccaattcaaccggacccagctgggcaactgctccggcattggggactccacccactatggttacagcactgggcagccctgtgtcttcatcaagatgaaccgggtcatcaacttctatgcaggagcaaaccagagcatgaatgttacctgtgctgggaagcgagatgaagatgctgagaatctcggcaacttcgtcatgttccccgccaacggcaacatcgacctcatgtacttcccctactatggcaaaaagttccacgtgaactacacacagcccctggtggctgtgaagttcctgaatgtgacccccaacgtggaggtgaatgtagaatgtcgcatcaacgccgccaacatcgccacagacgatgagcgagacaagttcgccggccgcgtggccttcaaactccgcatcaacaaaacctgaggccccttcctcccaccccatctctctcctgtggatgctcctggaatgtccctgaccctgcctgatccctccctcacccaccccaaaggtatttttgataacagagctatgacttgtctgagcctcaaatccttttccttgacttctcaacccggcctgaagtccattgcggttccgtcactc

SEQ ID NO: 349630 - DNA, 242 bp, Homo Sapiens
  misc_feature (123)..(123): n is a, c, g, or t
  misc_feature (217)..(217): n is a, c, g, or t
gggaatacaaaagagacggagaaagcagtaaacagtagtataatttaagaagctgaccccagaatatattctgtattcccatgtttcttctatggggttttacttcctttcagcaatttcttnaaagaggtagtttattctgcagtacacttgttaagtctcctctgaacatcctagaaaggtttttccatcagagcctctatccaactggttccantcattagtttagtggtggcaatgac

SEQ ID NO: 349631 - DNA, 589 bp, Homo Sapiens
ttctactttgaaaatgctttgtccaaaagcaataaaccaatccacactattattctaaaccctcatgtacatctggtaggggatgatgccgcctgcatagcatatattaggctcacacagtacatggatggcagtggaatgccaaagacaatgcagtcagaagagactcgtgtgtggcaccgccgggatggaaagtggcagaatgttcattttcatcgctcggggtcaccaacagtacccatcaagccaccctgtattccaaatgggaaagaaaacttctcaggaggcacctctttgtggcaaaacatctaaggcctgaaaaccattcacatatgggtcttctaaatttcaacagtgccacttctgcattctctgttctcaaggcacctggatggtgaccctgggccgtcctctcctcctcttcatgcatgtttctgagtgcatgaagttgtgaaggtcctacatgtaatgcatatgtgatgcatcatcttatcatatattccttcctatacattgtttacacttcaactacggggatgttccacacaaacttaaattactgttggcaaaacaatagggggagattaga

SEQ ID NO: 349632 - DNA, 678 bp, Homo Sapiens
  misc_feature (244)..(244): n is a, c, g, or t
  misc_feature (247)..(247): n is a, c, g, or t
  misc_feature (263)..(263): n is a, c, g, or t
  misc_feature (304)..(304): n is a, c, g, or t
attgaggatgaggatgtgaaagcacgaaagcaagagattatcaaagtcactgaagcacctggtcagaggctatcagcaatgggaacttgagagcctacacagaagatctgtgacccaggccttactgcttttgaacctgagagctttgggtaatttagtggaagggatggatgttcaccggattctactttgaaaatgctttgtccaagagcaataaaccgaatccacactattatctaaaccntcnatgtacatctggtagnggatgatgccgcctgcatagcatatattaggctcacacagntacatggatggcagtggaatgccaaagacaatgcagtcagaagagactcgtgtgtggcaccgccgggatggaaagtggcagaatgttcattttcatcgctcggggtcaccaacagtacccatcaactaaatttcaacagtgccacttctgcattctctgttctcaaggcacctggatggtgaccctgggccgtcctctcctcctcttcatgcatgtttctgagtgcatgaagttgtgaaggtcctacatgtaatgcatatgtgatgcatcatcttatcatatattccttcctatacattgtttacacttcaactacggggatgttccacacaaacttaaattactgttggcaaaacaatagggggagattagac

SEQ ID NO: 349633 - DNA, 358 bp, Homo Sapiens
cggacgcgtgggcacatggataattttagcttcatgtttaagattttgttatttgggtaggaaacattccaaatgcagtttgaaacacatattaaaattgaggcacacaggaaagaactggctcaagtttagtccccaagttccttatagtaggaataggaatccttagagtataagcaatccatgcatagtattctgttatctatcatgtagatcatttaatctctaattttttggggtggggattctcttgtttctaaatcttacactttcagtttcttctgtgtcttaaatatagattattgactgttgtcttaaatactaataaatacattaaatgtatcttaaatactaaaaa

SEQ ID NO: 349634 - DNA, 368 bp, Homo Sapiens
aattataagaaacatactttgtcagcagctgtctcaggaagagactcttcaatgccaagttctcgtcgtctttcagccctaacttctgcataactacaaatggaaaaaataatcaaattttagtgtctggtcattcgtttaaaatagtgcacagctgtaactattcagtgttgttacgtgtctcatctgttcatctagactatttgctatgtgctacacaaacctaaaatatacctataatgtcttaatttaacttgcatttttctaggtatcttaaagtttcatacactgctgtaaacgatccataaccacacaatacttaaattaagaaaaataaataaaggaagtgtatgcttatctaaaaaaaa

SEQ ID NO: 349635 - DNA, 1252 bp, Homo Sapiens
gggcgtgatgtacgggggcgggcgggtaaggtacttatcgggtaccagaaccgagggttgtaggatgtcgtctgtagaaagtgcagctatactgccacgatgtagcgcatgtgctcattcccggttcatatttcgttctggcgagtcacacgaccgggtggtgcagcgcaaatatgttgaagggtgcgcgagacacattatgtggtagggtcatcattactatgggtcgagtgtcagggtgaggggggcatgcatgatggatagggggtactgtaaggatctattggagtgatttctgttggacagcgtcacaccaggagtgtgtaccgttgcgcattcaaggcgatggcggtgtggcacgcagcgggggatgtctaggtgaggacgcgaatagagcctcacggcatagtgggtgatgacgagcgtgagaatacttcgccccccgaaggggacccccaggggtgtttccccccggttccgagggggcaggtttttttcctttcccttggaaggcttcccctgacggggccaaggggaggcctcttttgttggggctgcaaatgggagccaaaggggctgcaggaaccccaggtgccactgggtgaagatgggagggggctcccgtctgtcagggtggaggggccatccacactggacagctgcactgtcctttctctttcactgtcccccagcatctccttcaaggcctcagcattggcttcattctggatgatgcagcgaacaatcctctctactgtgtcctcattcatgtcatcgtcctcagggggctgaagctgggcatcgtcaggctcagagcccctcgacgtgcggcagcggtagcccttcttcttgagcacgtggcagatcatgaagcctaccaggcccatgaggaagaagaccagcacaagcaggaagagcatatatagcccatgttggggcggttccaggtcaggctgtggttccgacatgaggccctggggggcgagcgcgggccagggcgcctcctgggtttagggggctgcagctggccgacccggtaccggtgatttggttctggttccggcttctgctggggttccggctccaggggcgtcctagtgcggctcagggcccccgacgcccttccggcgctcatcccttgattcctcccctcccccttcgccgcctcaccggccccgggctgtggctgcggatacccgcgccgtggcaggcggggggagggaagaacagagaaggatgcgggctggctgag

SEQ ID NO: 349636 - DNA, 968 bp, Homo Sapiens
ggtccggaattctcgggatcggtatctggggctttgagcgtcccgggttgggcagggaactggcagcatagctcctaggatgcgagggccatttgtctccggccgggggtcagatcctcgggaagccgagccatcccatccagccgcttgccccaaaccgggcgcaggccgtggtcacttctctaggaagctccgaagatcccgccactccgtccctcaaaggtgcggaaagccggcttcccccagccctcggagaagattcctgactctccgctcggtcggggcatctgagggcaggagctgcgccaggcgtaccggatagaccagtggacaacacccacgccggaccgcctgtcccctacccggacccagactcggcgccgcacattgccccgggggggcccagcgcagtcacgcgcgcgcagagctcacgctctccgccccgcacacctgcgctccgccccctggtcctgggcccgcgacgggtgaaggcatttgggaagccagggcggctgcggaggcgatctccctgacccaggccggagttgcccggagcctgccaccgctctcagccagcccgcatccttctctgttcttccctccccccgcctgccacggcgcgggtatccgcagccacagcccggggccggtgaggcggcgaagggggaggggaggaatcaagggatgagcgccggaagggcgtcgggggccctgagccgcactaggacgcccctggagccggaaccccagcagaagccggaaccagaaccaaatcaccgctgcagccccctaaacccaggaggcgccctggcccgcgctcgccccccagggcctcatgtcggaaccacagcctgacctggaaccgccccaacatgggctatatatgctcttcctgcttgtgctggtcttcttcctcatgggcctggtaggcttcatgatctgccacgtgctcaagaagaagggctacc

SEQ ID NO: 349637 - DNA, 690 bp, Homo Sapiens
atcatggtgatgcagatattacctgaaagcatttggaatgccctgtgtattgctagatttattactttttctgctaccagttcatgccctgtatctcagaacaagaaaagtacctttgaatgttacactttcaaggcacactggaatatggactattttattatatgctggtacattgtgtttataatgcagtgtcaccataactggtaaaagaatagactgacagtatcagactaacatcacaatattcccaactggtgggaaagcaacagtcagaagaattagaaaatttaaatgaaacatcacagcaaaatttcacaaaagtaataaaaatgaggctgcaaccaaaatgtttacaagtagcctatttgttagccaagcaaagaaaaccatttactaatgctgaattacatcgtgcttgaagatagtaaccaacccaaagacatgtgtccagagaaaattaagacatcagccctttgatgagaacagtagtttgaaaaatgaggattttggacacaacatcaaatgacactgttaattctttgcctcttactagtcagtactgcctagctttatgttttgagaaaccattgctggatttgaagtgatcgaagaatttgtatggaactacaagtaggaatattttcaaaaaagttgataaacagtacaaccctgagtggaatctaccta

SEQ ID NO: 349638 - DNA, 976 bp, Homo Sapiens
  misc_feature (132)..(148): n is a, c, g, or t
  misc_feature (381)..(381): n is a, c, g, or t
  misc_feature (852)..(852): n is a, c, g, or t
  misc_feature (880)..(897): n is a, c, g, or t
gaaaagggcaggtagcaaatattagaggctttgcaagctaagacaaaatgaaggacattatttaggtactcaaggaaacttttcaccaaatttttattctaaaaattgaaaactcaaaatattgagtacaannnnnnnnnnnnnnnnnagtaatagagttctactaatgggaataatgggattttttggcaggggacgggaggtaacattttgctcaatttgggctgaaagttggtatcccctcattggaataaatagaaaatgttaatctgttaatgctgatgtgtaatgggatttcacgtatttcatctttgaaaatgtcttttcacacaaacaaacaggtcaaggtactgctaaatactgacacatccacccatgagncatgtgattttagttaaggcatattcatcacttgtaagggcatttgtagggattcatctttttgggtatttgccctttagcatgtcattcattcaagatgattcatttccaacagaagattaagaggaaactttaaaagcatttaattgcagttaaatgcttttaaaatttaaaaattttctttgcactgcatcaaggtccaaaaaactgctacaggaaaatatatccactaaaaatggatttggcaatacagcgctgttttgacttctcatagcacagaaagtatataaagcagcttgacaatcttaagttttagtttttattgaaatgaatttaccatattatgttgttgtaccttgtaatttcaggtcaaattcattaagaaacattttcaagtctgtggcaaaagttaatttccaaagttactcagtgttaaaaaacagtggttgaggatggtttttctcattcagnaaaatttccaatgtcagcccagagcccnnnnnnnnnnnnnnnnnnctttagcactgctaagccattgaacgcctgtgtggcaaatcaaatcaggatattcagcttctgtttctcacaaaaaaaa

SEQ ID NO: 349639 - DNA, 564 bp, Homo Sapiens
cagatttggaagcaccccaagtgtctaacagccagatgaatggataaataaaatatggtacataaacacaatggagtacctattcagcccataaaaaagaatgagatccctgtcatttgcaacattgtagatggaactagagatcattaagtgaaataagcccaggcacagcaagacagacatcatgttctgacgtatttgttggagctaaagatgaaaacaactgaacttatagagggtagaaggatgtttaccagaggcgggaaaggcagtgagggcatggtgagggggaagtggggaatgttaacgggcacaaaatgtagaatgactaagacctagtatttgatagcacaaggttactacagtcaataataattgtgcattttaaaggtataattgaattgtaacacaaaggataaatgcttgaggttatggataccccatttaccctgatgtgattattagacattgcatgcctatatcaaaatatatcatgtaccccatagatatatacacctagtatgtacccacaaaaattaaaaataaagtaaaatttcaatgaaa

SEQ ID NO: 349640 - DNA, 376 bp, Homo Sapiens
  misc_feature (64)..(64): n is a, c, g, or t
  misc_feature (122)..(122): n is a, c, g, or t
  misc_feature (147)..(147): n is a, c, g, or t
ttgtgagaccctaccaaattaaaacaattgaaccccatggagatagagagtagaaggatggttnccagaggccgggaagggtagtgagggccagtgagggggaagtggggtgtttaatgtgnccaaaaaatggtcagaaacaatgantaaagtcctaatatatgacagcaaaagagtgtgactatagtcaataataatcgaatggtacatttaaaaataactaaaagtgtatatttggattgtttgtaacataaaggataaatgcttgaggtgatggataccccatttaccctgatgtgattattacacattgtatgcctgtatcaaagtatccatataccccatgaataaatgtatatacctactatgcacctac

SEQ ID NO: 349641 - DNA, 455 bp, Homo Sapiens
  misc_feature (67)..(67): n is a, c, g, or t
atcaagataaggaggctgccatttgtcgatgtagtcagccactctctggattcagtgccaggtgccntggaggatgaacatttgcttcaagccattagtaaagccaatccagtcaatcgctatatgtacgtcatggataccaggccaaaacctgaatgcaatggccaacagagcagcctggaaaaggttatgaaaatgaagacaactattccaatattagatttcagtttgttggaattgaaaatattcatgtcatgaggtccagccttcagaaattattggaagtcaatggcacttaaagggctttcctgtcaatgatttctactccggtttggagagctccgggatggcttcccatatcaaagctgttatggatgctgcagtcttcttggccaaagcaataacaggtgaaaatgcaagtgtgtggtgcattggtccatgggtgggataggact

SEQ ID NO: 349642 - DNA, 490 bp, Homo Sapiens
  misc_feature (141)..(152): n is a, c, g, or t
  misc_feature (405)..(405): n is a, c, g, or t
  misc_feature (462)..(462): n is a, c, g, or t
atgcaacaggcccagtggcttccccttcagggccacaacaggctgtataaggggatgacgaggacatcagaggttagacttaccctcctccctctttccaccagctgccagtcaagggcagtgggatctcgatggagcctnnnnnnnnnnnnaaccatgcctccctcttcctcctctttcctcctctctttgtgtgtaacggtttgaatgttggttccatgcctggcccaaccccacctcagtctccaggacattcctttcccagctccagcctggagggaaggggacaaagaccccaggaggccaaagggctgcagtcaccccttgtgctcacccatagtgatggccactggtataatcatcgctctccctccatgccaaggacaggacttggaccgcttcagnctgggctgggagcagccctaaaggtagaggcctcatggcccagggagaccccacctntggcagagccacattaccttaccctgtg

SEQ ID NO: 349643 - DNA, 1165 bp, Homo Sapiens
  misc_feature (206)..(237): n is a, c, g, or t
atttgtagtgaaagctgataacaaagtatgattctttccatttacaacatactagtattactttagttatagcaagcagtacataactgacatcaacaactcaggctgctccctgacataaaagccagttccatctttactgcagatgacaggagactttccaagacctgcagaggccccctccaccccaaccttagtgcatgctnnnnnnnnnnnnnnnnnnnnnnnnnnnnnnnntttttggcttttgacccactctgtgtgttccactgaagttatcttttccttaatagattcacacagaattaccccatcctgcaaaatccttatccctatgaatctctaaaatatattaaataatgtgttatatatttgctttttgtaaatctttatttaattaatttatatatactttgtgaagtcttatactgtacatcataaagcgatgtcatctgtagttggttcaatataatgtttatgatcattttgataagaaataactttggacattaggcccttgttaagaaataaaacacccattataaatttgcttctgttggaaaatacatgatttggcatacttcatttttagtaacaatctattctagataaatgataatttggggacatctgtacttaaaaactagctgaactacgttttgggatgagatgcaaagcaacagctgtccctggaactgaaatgtgaatttctagcagaacagaaaatattataataatgaggcaataataaaattaggaaattaaattatttttaaatctgtctgtgtgatttttccccttggtaaaaatacatgaaatacataattgaaaaattaccttcttctgaagtcgtagtttttaatcttaaccatcaataaataaacctattgttaacaatgtcttattcataattctaaaaaatttacaaatgatattgctatgaggttgtgcactattaaagtttgctccatcacttaaaggtaaagcagttcaaaaatactactttacatcacaactttgcatggctgagattttgaacaactaaattgatggttttacccacaagttatttcataaagctaacaccgtaatattacttggttttccttatacttttgttatcatgtgatgaaatggtaactatgtaattaaacaaaattctgac

SEQ ID NO: 349644 - DNA, 628 bp, Homo Sapiens
gtacaatgagccacacgagagccgcaccaacgccgacatcatcgagaccctgaggaagaagggcttcaatggctgcgacagccacgagcccgacggggaggacctcgctggaacagagcccactgctggaggacaagtaccgacgcgccagcgaggagctcgacgggctcttccggcgctatgggtcaactgtcccggcccccaactttgccatgcctgtcacggtgcccgtgtccaatcagagctcactgcagttcagcaatcccagcggctccctggtcaccccttccctggtgacatcatccctcacggacccgcggctcctgtccccccagcagccagcactacagaggaacagtgtgtctcctggcctgccccagcggccagctagtgcgggggccatgctggggggtgacctgaacagtgctaacggagcctgccccagccctgttgggaatggctacgtcaagtgctcgggcttcccctggcctcctccctgtggccaatggcaacagcctaaacaaggtcatccctgccaagtctccgcccccacctacccacagcacccagcttggagcccccagccgcaagcccgacctgcgagtcatcacttcccaggcaggaaagg

SEQ ID NO: 349645 - DNA, 751 bp, Homo Sapiens
  misc_feature (28)..(28): n is a, c, g, or t
  misc_feature (59)..(59): n is a, c, g, or t
  misc_feature (92)..(92): n is a, c, g, or t
  misc_feature (107)..(107): n is a, c, g, or t
  misc_feature (124)..(124): n is a, c, g, or t
  misc_feature (191)..(199): n is a, c, g, or t
  misc_feature (224)..(224): n is a, c, g, or t
  misc_feature (253)..(253): n is a, c, g, or t
  misc_feature (639)..(684): n is a, c, g, or t
tatcttgtggattaatatgtctgaaagncagattgagccagttcttactcgattgtgtncctggaaaattgctccctgatttttcggtccgnccatgttcggcagancctatctctgtttatgncagtacttcttcgagtaaagactctgtgcagatctcaggtcttaagattcatgagtattcataatgnnnnnnnnngtcatatgtcaaggttgagtaaaancacgctgcctgtttagtggtaaagaaacncattcattcagtgaagatttttagtcatgcagcactgcactgccacagagtaatagacctagagggtattaatgttcatctgatttagaggtctttactggcaatctgtgagttaggggtggcctgcagataggtttggtttggtaggcactgtgcattttaaaccagtattttaaattccagaggtttcatgtcaaaatccaaatttccagtttctcttgaaccatctgacctcttagcaacaacaggtcttcatgacagcagttggctgcatctgagttgagactgtcctctgtaagggatgctggcgtttgtgcttgatctgtctcacttttggtatttgcctttcatttgagtttagttagttccgaacgaactctttaagnnnnnnnnnnnnnnnnnnnnnnnnnnnnnnnnnnnnnnnnnnnnnntccagatgaactctgggtctaaggcttttcccacacaccagttatcctgtggaaaagtaggtaccga

SEQ ID NO: 349646 - DNA, 426 bp, Homo Sapiens
  misc_feature (72)..(104): n is a, c, g, or t
cccggggcgaaggagggagtgaatcaccgcgcagagctgacgcgggcggggccggagccgggccaggtggcnnnnnnnnnnnnnnnnnnnnnnnnnnnnnnnnnaaggatactcccagcctggcgcacagcccccggggcgccccatcgcaggggtgcttggcagctccaggtaccaggagcagtaatagcgggacccttcgcctttttggaatgcaaatgcacccgagacagcttcagcttagaaccgcgggaatctggctttgggatggagtgactcagtttccttaactgaataaaacggccgaggcagagttaaatccgaaagacttggggcccagtatgttgccagaattcggaatatttttgatttcagaaagttttcccatgcatatactctcagcggggtttggagctgccgcgttac

SEQ ID NO: 349647 - DNA, 1069 bp, Homo Sapiens
  misc_feature (27)..(27): n is a, c, g, or t
  misc_feature (29)..(29): n is a, c, g, or t
  misc_feature (178)..(178): n is a, c, g, or t
tacagcgggtcgggaagggtcagcccncnctcgccaagttggaaggtggggtgggccctgaaggtgggccagggcttgaccttcagagactccacccagcggaagctggtatcgtccaccggcaggaagatggggcttgtcctgcggggtgggccggcggcacaggaagagcgtgganccgtagaaggacttcttcaggcccaccaggcgcagcgacaccttggagaagaggctctcccacgcgtcctggctcaggatgcccgggccatactgcggctcagtggaggtgaggaaggccacgatgtcccgagggggtgcccccggagcagtgtgtgcaggagcagaaagcccccttctctcagggcagccaccatgttgctgagagctgaggccgggtccccgagggcagccacagcacagttgcacaccaggaggtcggcgctgcccagggcgctgggggcagggtctgcgggatcccactggccctgggcaacgtcgtgctgctgcagctcggcctgggcagcctccagggcctgggggtggcggtcggtggccgtgtagctcagctgcagcaggggatgggggctgagcaggcctgggatgcgggaatacaggtgaccgtggccagccagcacctccaccaccttcatcttcaggctgggcatgttctccacggcagtgtccaggcaggccttgagtgccggggagtccaggaggccgctgagcagagggtcctctggcagcttgggcctctcctgggccagcacctgcgccagctccagctgcaggttcccgttgagctgaagcctgcaggcagccgacaacagccggggcagttcctgctgtgaggggtcccgggggatctgggccccatccagtccgggcaccaccatcttcagcccctgctgggtcaccttggtctgcagtgcctgcaccagccccttgcacagttgcagctcctcctgcagggcagcgcgctcagacaggcacccctcctccgtgtggggagtgaagcaaaacttctccaggatgggccctcgtgccgaattcgccacccaggcctcgctac

SEQ ID NO: 349648 - DNA, 1106 bp, Homo Sapiens
  misc_feature (666)..(666): n is a, c, g, or t
  misc_feature (978)..(978): n is a, c, g, or t
  misc_feature (998)..(998): n is a, c, g, or t
agcgaggcctgggtggcgaattcggcacgaggctgctgtgaggggtcccgggggatctgggccccatccaggccgggcaccaccatcttcagcccctgctgggtcaccttggtctgcagtgcctgcaccagccccttgcacagttgcagctcctcctgcagggcagcgcgctcagacaggcacccctcctccgtgtggggagtgaagcaaaacttctccaggatgggcacctgctgctcctgctgccgccgcggggccgactcagtgtggagcccggagatgtggacgcctcccgccactgtgaccctcagccacctgctcaccaccacgtcagccacttgggccttgtcctgcagtgcgtacagcttctgcctgtgggtggcagggtcgatgtggatggcggtgacacgggtgggcaggtacaggccgtgcttggccgagcccaggatggacatctgcagcatggtgtccatgaagctcacccagttatcccttccacagcagcctccccgagtcaccttccaggctggcctccaggatgccctggaaatgagggccgtagtcgtagccacgcagacgcagctcccttgtaaacttcagcctgggccacgaagaggggctcccctgtgggtttgggggtggggcttttccgcgttggcccaaaanaccccgggggccctgggccctccctaatgggtacacccttccccaatcccctaacaatggttgccccttcctcttgaacacctctcaaagcgcccggcgaacggcttccacggagggcgctactttcccaggggcacacttgtctcccattcattggggcccaggcaagcgtggggtccctggctggcacttaccctatctcccccccaacccccactcttgacatcaccgccgtcattatccctccctacgccttttatgtcgcccgcgcgtcctcttgttcactcttataccatataccgccctacgcgntacgacttcgccccgcactntttactaacctattctctccctctccctttacagtatcgcgcgaggcatactgcacaccacctcgttttatcgtatctcaccctaatcttctcttagacgctccacat

SEQ ID NO: 349649 - DNA, 1369 bp, Homo Sapiens
gggacatagtttggggagaagcagtactagaaactttccaaggagtcttgggtgtgtagccaagaggagccatgagctatggactcctcaagcacgggaagaggaggtgtgtgctgagaacagagaggccctgccctctgtccactagcgagaatccctagctgccccagcccagtctttctccccggcattcacaaactttgcaagcgtggtccagggccttctccagatctgttccaacttggagtgtgaagggcttgagcatacgggggaagagagtctgcagaagttgggggaaaactgtttaaaagataccctcagttgtgtcaaagagtgtgccaatctatttttgtatcagcattggaagtgcactttcccctggggcgtgtgggtgtgtgaatgtgcaagtgtctgagagatactgcatcagccctagacccccagagccagtcccgccctttacagagcagcccttagcctggggccatgggtcaggctgaccttcaacaattatttctagatgatttctggataagaattgctctctcggtaccagacagtttgacatcctccacccttagaaaatgactgacattgttttgttactgctcctacccaccaaggggataaagaaggcgagttctgagtgttggatgagtcagtcgcgtggaaggacgtggagcgtggcgctctgtaacttcctgccgtctgccaccccgccacgtgtatttaaccctcgcactttctccactgtggagatggctggggcggcgccccacagtgtgtattcctgtcctctatgttagagtgcatcagaagcacatttactgtgctatctatatctctatataaaagtgttttataaaaacccagaataggagcacgacgcatgattggtgtttgaggcgtttgccagctgggacaaactgcgtttggagctgtggttaagctgactaaggaggcggtggctctttcttaacattcccacgtgcccagggctgttcatgcaagattttaatggtgacttgtcctggcttactgggacagtctgtatgaggcatgtcaccacactgtcgcctcatagctgcaagagagaggcaccagctgaagttcccctgactgaagagagcctgtggccatgtaaaaagagaattaaactcttgttgctttttgtatacctgtatgcgtttgtgtagacgtgtgtctcaccagtcacctttgccctgcattgctgatccccttgcgcacactgattctagtgaggtcacagattcggagcttcacacaccagcccagagaaagggcgatggaaccgaaccgagggtctgcagctttcgttagcagagctgtcagattcttgacagtcttg

SEQ ID NO: 349650 - DNA, 591 bp, Homo Sapiens
gggcattacataattacaaaaaggcttcattcaggtgatacgttaaaaatggaactgtgctcaccctaaataggcattggtatttttctcttttggtgagagtaggcatttatttcttgagttgttttggagcctgatcaaaaaattttgttcatggagaacttgatgcaattttgatacagtggagaggtttttttcggttgttttaacatcaccagcatagtttttagaatgtgactcttgctgagcatttagggtgagcttgggaaggaaggcctttgaaaatggtagttatgcaagcagactttcaagtgttgcattcctgttttcaacacatttctttaaatctacataatggcagacttttctaccaggttataagcagtttttagataagtgatactcagccaacataacttattgacttaccatttacgtataatcatcactctcttactgtgaaattccaaatgcctaaccagagttaccctggttccatcataacatgacaaacattctcaacagtttttggaattccccccctttggttccaaaaggttatttaaatttccatccgggccatttaatggc

SEQ ID NO: 349651 - DNA, 775 bp, Homo Sapiens
  misc_feature (677)..(677): n is a, c, g, or t
gtgggaatatgaaatcatttccatcccggagcccttcacaaggcgatgaagattctgctctgattctaacccaagacaatctgaaaagttcagatccagatctgtcagccaacagtgaccaagagtccggggtggaggatttgagctgtcggtctccaagtggtggtgagcatgcaccgagtgaagatagtggcaaggaccgggattctgatgaagccgtgtttctcactgcctgaagtttccctttggagttccaaagtaaaggacacataagcaacacttccaaaaacaagggaacaaggtggtttattgtaaaaacaggaaatggtgcatgtcattgagaactactttaatgcagctatgaaaagggaaaaaagtgcccagttcttgatttcttagatactgaagaggacgtagtcatttcatttatcaaatataaggaaaattattcaccattttgaagctcaccctagactatgaaaattatattcactgcagagcaattacttctgtcattacctgaagtgatcagtatctatcttccttgtcatagcatgcatctctcaaaaagcctccactcctttccctcacatctgtgatcatcatgattcttttagttcacttctagatgcatattttgtgttttctaaagcatctgacattatcctcctttccgnccctcttatacatatttctaaaacaggcacattggtgagatgcacctttttagttaatagatgcattcctaaggggcttttaattgcttatctttcag

SEQ ID NO: 349652 - DNA, 668 bp, Homo Sapiens
ggctaaaaaaaatgtttcctgtatttcttgatactaaaaatgtaatgatttttattttagttcattctaaaagtatgtcttgtaataaaaagtctgtttggaaactggttcatttggacagtgaagtcttttgaaatatttctgctttgtacattttccagaagtttaatatttgatcacattttccacaagttgtaacaattgatataaatccatgcccacaaagtattccattttcattacttttactgttcatgccaagatgtttcaaatatattccatttgtaatctgtctttaacttgaggtttatttctacttttgtgttgctaaaattatttctgcaagactgagatcaaactggtttatatataactaaatcaaggaatgttttataaaattctatttgaccacactgtcttaacctcggtttatatacttctcaaatagctattgaaaagaatgtgttcattttattacatctgtcttttaaaacataaacctacatcattttgccttttatagggtgcataaactttccacagttctaatttgagcgcttcagaagaaaaggaaagctggcttcttattcctcaaaatctcccttttttccggttttgagaatgtattcatcctacatggaccaaagttttcaatcctttgttttttt

SEQ ID NO: 349653 - DNA, 574 bp, Homo Sapiens
caaaagaagagcagatggtcttatggattatattcacagaagagctgtaacataatctatctgagacttggggtagtcatggaggaaaaaagttagatgggcttagagagaaaaggaagaggactattcttgctgagtgccttatgttttctcagtttcattcaatcacactgtaactttgagaggtaaattttatacccacctttacataaagaaagttcttggacttttaaaaactttgacaagcattgcttagctagaaagttctagaaccctctctctcccattccaacctgaacagtaaaaacacattctttaactttattcaataacgagtcaaggtaggtctcttggtcagggagacaaatgaaaggctcatattttatatgtctccagtgcacttggcataatcaagagtgtagtataattaaaattgtagacaaaggaatgaagaggattaatgtgttacaagtttgttgactaggctggagaaaagaaaaagagacagctgactagtgtggagtgtaatatcacagaataatgatatggtaaactgggcctggtaagggcaaag

SEQ ID NO: 349654 - DNA, 426 bp, Homo Sapiens
ccagaaattcattgcatggtctgtcttccaatcatcctcccagctggtgaaatttcatacaactggtggttttctaaatgaagcaaattaagggaaagaattctaagccctacttgtcaccttcctcttggctgtagtttcctgggaccatgtcaatgtagataattatgagatttgggatcctatgttagattaatgcatgaatcaattctttgactttctccatctctacactctgttccgtgtgactaagagatgttagcagacatgagacatacaggcatttggagaagtgcttgctggtttgaatttctctcttgcacctctcccaccctcatgagaccatatctgggctgccttatttgaggatcaggcacatggagcagagtcaagtcacccaagtcattccagttaaaaccagcctag

SEQ ID NO: 349655 - DNA, 676 bp, Homo Sapiens
gaagaaatatgtaaccctgtccagtaatggctttctactctaccaccccagtattaacgattacatccacagtacccacggcaaggagatggacttgctgcgaacaacagtcaaagtcccgggcaagcggcccccgagggccatctctgcctttggcccctcagccagcattaacgggctcgtcaaggacatgagcactgtccagatgggtgaaggcctggaagccactactcccatgccaagccctagccccagccccagttccctgcagccaccaccagatcagacatccaaacacctgctgaagccagaccggaatttggcccgagccctcagcacggactgtaccccatctggagacctgagccccctgagtcgggaaccccctccttctcccatggtgaagaagcagaggaggaaaaaattgacaacaccatccaagactgaaggctcggctgggcaggctgaagccaagcgcaaaatgtggaaactaaaatcctttggtagtttaagaaatatttataaagcagaggaaaactttgagttcctgatcgtgtccagcacgggtcagacgtggcactttgaggcagccagttttgaggagcgggatgcctgggtccaggccatcgagagtcagatcctagccagtctgcaatgctgtgagagcagcaaggtc

SEQ ID NO: 349656 - DNA, 726 bp, Homo Sapiens
gagacattcccttagaattcccagatctcaactctcccactgatgtcatcccagaagcagaaatgaggaaagacccagcctcatctgctgttggggacactgacttactcagggatgtagcggaggttgtgacatcacatcagcaccttgaaaattgtccattgtagatgacccttaattatgtctcatcattacacaagaataaaagagggaggacaaaccacgaagagaggaaagcagagtctgggttctggcttcttcccctatctttcttgggaggtgttataagactctggcttcaacgtaacacagaaccatgccagccaaggaggccctttgggctgagataacctatccataaggcgccactgcctccatgcccctacaactttggttatgaatggaggccccaagtcattcagaccccaagacctttctactgctaccccaggtagcgtacccctgcctcaggtgctggggccacagccatttcagcacctggggataatgcctggagagaggtggaaagagtgccttccacacacctccactgtcctgctgctttctcccctaccagatacaaacccaagggctgctctgtccatgtcctgtgcaacctctcgcctttcaccctagagctgaggagggacagggacaggtctgggcattcctgagtcagacttcagcctcgtgccgaattcaccacccagcctcgtcctagcctat

SEQ ID NO: 349657 - DNA, 1727 bp, Homo Sapiens
  misc_feature (226)..(283): n is a, c, g, or t
  misc_feature (1224)..(1331): n is a, c, g, or t
  misc_feature (1562)..(1576): n is a, c, g, or t
ggcctgggtggcgttccagcacgagggacagggccttgggcctccaaggagttcacaatgatgccaggaagggtccctgagcctgggttccagtcagcttggctaacagaatggggcttgggaattccaggggcaactgagcatccaccccattagccagtgatctggacagggacagctggctacagggaatcaaaggctgttctgtacagttttaccagaaacnnnnnnnnnnnnnnnnnnnnnnnnnnnnnnnnnnnnnnnnnnnnnnnnnnnnnnnnnncagagcattagctgctctccccatgattccctcccagttttaattaaaagtctctgatctggagcacatgagggttgcgagcctggtgcacctggttcctgtctccgtgggctggtttccttcagcccctgatgcccaggctgggtgcaggctctcatctggtccatgcccagatgctgcctcagacaagaactctgggaatcctaacagactctgctttcctctcttcgtggtttgtcctccctcttttattcttgtgtaatgatgagacataattaagggtcatctacaatggacaattttcaaggtgctgatgtgatgtcacaacctccgctacatcctgagtaagtcagtgtccccaacagcagatgaggctgggtctttcctcatttctgcttctgggatgacatcagtgggaagagttgaagatctgagaattctaaaggaaatgttctctgatgggaggagagagggaacttatttcccttcaaagtagtttgcttcttaagaccactcctccctccaaaatgtctttaaccagacatcatttcagaaggtggggcagctgcttccttaggaagagtgggcctgatagctcaaccaactcctttagcatgtaaactcacagaaggcaagaacccctttttttagactttccaaatgcatcctgcaaagagagagatagctgatagggactgacaagcacactgtttagataagaagcaattagccttttatatctgtgctctatacattttctatgtgcagcatctttcctaacttgttgtggttcccgggtggcaggtgcacagctgggagggactgccggctgtttcgtacaacattcttgccaattcccttgaggagaaaattcttcacatggcttctgcatgtacagtatttgggcagcaaaacatgattaaagtcagtttgaaaatggnnnnnnnnnnnnnnnnnnnnnnnnnnnnnnnnnnnnnnnnnnnnnnnnnnnnnnnnnnnnnnnnnnnnnnnnnnnnnnnnnnnnnnnnnnnnnnnnnnnnnnnnnnnncctaaaacctctaaaagcttcctaacccttcacatttggcccccgagacctaattgaaaagggaaactgctcgatccctgttcctacggagaatcctgttcttcacttggatcttggattcacaaaaataaaaagcccccggccgaaactaacattagaaaaaaaccaatagggattctaaatccatttctgtaccaggcacctgaacgccaaccaaactcaatttcccannnnnnnnnnnnnnnacaacactcccgtatatagttttaatcctttaaccttccagcaaaatggaaaccatcacaaaggggaactaaacctaaaccccctaggccctattcctttttccctttaattttaatttgccctagttaaaactgcaataaaaaatttcta

SEQ ID NO: 349658 - DNA, 3464 bp, Homo Sapiens
  misc_feature (416)..(473): n is a, c, g, or t
cactgatgtcatcccagaagcagaaatgaggaaagacccagcctcatctgctgttggggacactgacttactcaggatgtagcggaggttgtgacatcacatcagcaccttgaaaattgtccattgtagatgacccttaattatgtctcatcattacacaagaataaaagagggaggacaaaccacgaagagaggaaagcagagtctgttaggattcccagagttcttgtctgaggcagcatctgggcatggaccagatgagagcctgcacccagcctgggcatcaggggctgaaggaaaccagcccacggagacaggaaccaggtgcaccaggctcgcaaccctcatgtgctccagatcagagacttttaattaaaactgggagggaatcatggggagagcagctaatgctctgnnnnnnnnnnnnnnnnnnnnnnnnnnnnnnnnnnnnnnnnnnnnnnnnnnnnnnnnnngtttctggtaaaactgtacagaacagcctttgattccctgtagccagctgtccctgtccagatcactggctaatggggtggatgctcagttgcccctggaattcccaagccccattctgttagccaagctgactggaacccaggctcagggacccttcctggcatcattgtgaactccttgggaggcccaaggccctgtccttactggccaagtttccaaccagagcccctggaagggtttcccaaagcagaaacactcatgcttttcaacaagcacctgccccaagccaatctaggcccctgagagaatgcaactttctctcactgatgtggcttccctcaacaggcacagccatgctgggcccacacaagcccaagctcagggttcggggggaggggagggagggaaagttgctttgctacatggaaagattaagccctttatcagagaacaaggtcccaccatcgggcatgccaacatctgagccacgtttgtgcaactcagccatcagagttggtgcccaaggaggccaagttgctctctttggcatcactgacattgctctgagatgctcaggcacgcttttaaaagaatcctttcccagccagaccaggccagtccagcccccatcagggctcacctgattgtgtgggcttcccctgctcttcaatcatgcttgttttgttttgccccaacctcttctgacgtgagtgaaaaggttgagggagaaggcggggggatgtgtccacattttcatctcctccctgactactcagtgaaagacagtccagtagaagaagcagcattttaaagaatctctttacatgtcaggatactggagaagaaaactctgaggagtggaagagaaaggtaggaggaggcagggaagcagggctcttcttttccatctccctgcagccactgcagaaacactgctggacaaccttctggccctgaatgatgtgccatctctccagccaggtggagggcaactcatctacaacatcaagcaaaggcagcaatttcttgcagagtttgcacagtgctagaggcaaccagagagacacaaaagaggagcatcactaaagccccattgctttctgggctgaggaagatggggaatatgaggtattaggagggctggaaccccaggggaagaggagctcagcaactcctgggcagcagggcatggaagagggaccctggttgcatgtcagggctcctggtaacgtaggctaagattgtgctacatttcatttccaaagaagtacccttggaggtctttattgtctttaaaaatggaggcttctgctctcctcaaggctggcagtaaagaagagatcaggcatgcttccctggtgggtggcatgaccatgggaggactggcttgacctcagtgttctaaccggcagtgattccacagaggatgagctctatgggtggcctttcttggagctcctgggttctgcctcagcccccatgaaaggctggcattgcctgggacttgctgcatcccaagagcctcctaagtgctcctttcctagtagaattgggtggtagaagaaaccagatggggagtcattttggagatgattcttccctgaaggatcaagttccccttgtcaaaccaagacttggctccatttactggagcctttttcataccaaaaacccattgcagggaaaaggagtctatgaagaaagtgggacagaatgaacagagcagaaatacaaagacagacgctctgagtcatccatcactgtccctgcccacaacccaacatcactgcagggccactcctgtctctgccatatgcacagtgaacctcgcctgaccagaggaggtggaatgacaaagagctccattcctgtaaccactgcagggtttcatctgggcaagggggcatttggagccgggacactgaacatggcagtgagttggccccagggtgggagacttctggagggatcatgttccttccttccccaccccccgtcctcaaacagcagatgctcccccaccccagcaaacaaccaggagttacacttgtgcattctcctcttctgagacaggctaggtccagagtggcttttcagacaagcccctgcatccatgatgctgagaaacagacccttaagtgcagccacactgcatcacacagacgtgtcagcctcacacaactttaccctcatggggtaaaatccaggtggggatgagtaacttatttggtgcaaagggttaaaagaataattccccaaggtcaatttggggaggaaattaccttcttttagagaggtggaatagtggagtggcccaactgctgagcagttttggcagccagggactgtaggtaggtcagcccaagttaccagcacatcagacccctcctccagctagaacctcccctgtgctaacccttccccagaggcaagggtcaccacggcctggaacccccagtggcaggcctctctgcaggcagctccccaccagaggaatgagggtatgggtagcccccacttcctggggtgactgctggtctgggtatcaccactcagtgctacatccacaaacatctatactgtcctgtgggtcactaacaaccctatcatcccaaaggtgtagagtattttcgcaacaccctgacagtgactgctctagaggtgaatatatcataaacaggagattaaaatacccttttgcaacggagtttccttcttgatcccccactagggtcgaggaggacagagccctttgtccatttccaagaacttgacgaacgcaatgggcctggggagagcatttccgcctaaagagaaaattcagcccagtggcctcctccccatctctatgcacccaatggtccctttctctgataatataagaatagaggctcaggcagagataggagcctgggagctaactccgttcatttccttcctgaccttacccacttcttgtcctgtgggcaggccaggtggggttaggtctg

SEQ ID NO: 349659 - DNA, 662 bp, Homo Sapiens
gtagttggttttagataatatcttctactgccaaacttctggcaaatttacctgtgaatttcaaaatgttataaaatctcttgatatgcttttgtttttccttttagccattttctcttcaatttcttagtccctctgccctctgtaaatgtgttgagtgatatagctatcagatgtattgaaggcaaagttctcgcagaggtctctgttccagctctgtaaaggtcacaggaatcgtgaaggagctgagaaatcttcctctccggcccactgtctgtggcccattgtcattgtttcctcatgaaacattgcagagtttgaatcctcagtaactctcattgactggattagaggtgatggccacagcaaatgggagagcaaaatgttggcctacagagaatgacacaattttattcgcctttggtgttagttgccatagtgctgtatttgaaaatcgatgctttagccaaaagctgaatgaccaccgtttccgtagtttccactgttttgtctgcatagaattttcctgaactacaagcaaaaatgtattttgtccaatgtcacaaaagtgaaaatgttactaatcctagatgtgttgcatattttgtgtttttacgttccaaactccttcaaaagctgccgttacaaaagctgtttggctg

SEQ ID NO: 349660 - DNA, 2123 bp, Homo Sapiens
tcagctttggcccagatgtggttaccccttggtctcctgtctttatgtctttctcctcttcctattctgtcatctccctcacttaagtctcaggcctgtcagcagctcctgtggacattgccatcccctctggtagccttcagagcaaacaggacaacctatgttatggatgtttccaccaaccagggtagtggcatggagcaccgtaaccatctgtgcttctgtgatctctatgacagagccacttctccacctctgaaatgttccctgctctgaaatctggcatgagatggcacaggtgaccacgcagaagccaccagaatcttgcctgccctattcctcctcccaagtctgttctcttattgtcaacctcagcacaacaggctggcgccaatggcattacagagaaagcaatctgtgtggctagtgggcagattaccatgcaagccccaggagaaatggaggagctttgtagccacctccctgtcacccagtattaacatgtccccttccccctgccccgccgtagattcaggacattcgcccctgtgtgccaccaaaccaggactttccccttccccttggcttggcatccctggctctctcctggtacccagcaagacgtctgttccagggcagtgtagcatctttcaagctccgttactatggcgatggccatgatgttacaatcccacttgcctgaataatcaagtgggaaggggaagcagagggaaatggggccatgtgaatgcagctgctctgttctccctaccctgaggaaaaaccaaagggaagcaacaggaacttctgcaactggtttttatcggaaagatcatcctgcctgcagatgctgttgaaggggcacaagaaattggagctggagaagattgatgaaagtgcaggtgtgtaaggaaatagaacagtctgctgggagtcagacctggaattctgattccaaactctttattactttgggaagtcactcagcctccccgtagccatctccagggtgacggaacccagtgtattacctgctggaaccaaggaaactaacaatgtaggttactagtgaataccccaatggtttctccaattatgcccatgccaccaaaacaataaaacaaaattctctaacactgcaaagagtgagccatgcctgttaacactgtaaagaatgtaacatgtgggggacacacaggggcagatgggatggtttagtttaggattttattagtgcatgccctaccctctgggggaacgtcccatctgaggttttcttctcggtggggggatttaacttctgtcctagggaaaacagtgtctgatgaggagtgtttccaacacaggctacatgaattcccctataccagtgcgaaagcagccaggagtccccgttggaaaagaacaatgccactctcttttatgtatcttggttctgcaactcatttgttgtaagtagggttaatcgagtatcaggttcacagtatcctgcccttattattttatgattcactgactcaagttccacgaagtccttagaaatggacctcttcatgtaaaatatcttgagaataataaatgtgagggaataagaaaggcaagctttggacacagatatgataggtgcatcagcttcggaagagaagaatgatgtgcagagtgttaggaagacatccgggctgctgagactcgggattagaagaaagagaggtaaataaagtgggtcctggaatcttttaggacttctgctgtaggacaaacagctgcctttggtgttttaatgtctcccaaagtacccttcagccaataaataccatctgttggtgccccccaaaccgatcctcccaaaacaataacttgtccgggccgccttcggtccctcgacaagcttttcctaaacccctcccccttggcgccgccggtccccaccccggcgcaaatggaaccattgccccctctaccgctgttctcccccaagggccacccccgggtccctgcacattagggcgcatccgtccctcgccccataccaccccgccaccaccgccgccgcatttcacgcacattacgtcgccgctcgtgtctctcgccccgccaacacctatttttgttttggcgctaac

SEQ ID NO: 349661 - DNA, 2151 bp, Homo Sapiens
  misc_feature (1965)..(2023): n is a, c, g, or t
gtctccccatcaaatggatgtccccagagtccattaacttccgacgcttcacgacagccagtgacgtctggatgttcgccgtgtgcatgtgggagatcctgagctttgggaagcagcccttcttctggctggagaacaaggatgtcatcggggtgctggagaaaggagaccggctgcccaagcctgatctctgtccaccggtcctttataccctcatgacccgctgctgggactacgaccccagtgaccggccccgcttcaccgagctggtgtgcagcctcagtgacgtttatcagatggagaaggacattgccatggagcaagagaggaatgctcgctaccgaacccccaaaatcttggagcccacagccttccaggaacccccacccaagcccagccgacctaagtacagaccccctccgcaaaccaacctcctggctccaaagctgcagttccaggttcctgagggtctgtgtgccagctctcctacgctcaccagccctatggagtatccatctcccgttaactcactgcacaccccacctctccaccggcacaatgtcttcaaacgccacagcatgcgggaggaggacttccatccaacccagcagccgagaagaggcccagcagctgtgggaggctgaaaaggtcaaaatgcggcaaatcctggacaaacagcagaagcagatggtggaggactaccagtggctcaggcaggaggagaagtccctggaccccatggtttatatgaatgataagtccccattgacgccagagaaggaggtcggctacctggagttcacagggcccccacagaagcccccgaggctgggcgcacagtccatccagcccacagctaacctggaccggaccgatgacctggtgtacctcaatgtcatggagctggtgcgggccgtgctggagctcaagaatgagctctgtcagctgccccccgaggctacgtggtggtggtgaagaatgtggggctgaccctgcggaagtcatcgggagcgtggatgatctcctgccttccttgccgtcatcttcacggacagagatcgagggcacccagaaactgctcaacaaagacctggcagagctcatcaacaagatgcggctggcgcagcagaacgccgtgacctccctgagtgaggagtgcaagaggcagatgctgacggcttcacacaccctggctgtggacgccaagaacctgctcgacgctgtggaccaggccaaggttctggccaatctggcccacccacctgcagagtgacggagggttgggggccacctgcctgcgtcttccgcccctgcctgccatgtacctcccctgccttgctgttgggcatgtgggtcttccagggggaaggccaaggggagtcaccttcccttgccactttgcacgacgccctctccccacccctacccctggctgtactgctcaggctgcagctggacagaggggactctgggctatggacacagggtgacggtgacaaagatggctcagagggggactgctgctgcctggccactgctccctaagccagcctggtccatgcagggggctcctgggggtggggaggtgtcacatggtgcccctagctttatatatggacatggcaggccgatttgggaaccaagctattcctttcccttcctcttcggccctcagatgtcccttgatgcacagagaagctggggaggagctttgttttgggggtcaggcagccagtgagatgagggatgggcctggcattcttgtacagtgtatattgaaatttatttaatgtgagtttggtctggactgacagcatgtgccctcctgagggaggacctggggcacagtccaggaacaagctaattgggagtccaggcacaggatgctgtgttgtcaacaaaccaagcatcagggggaagaagcagagagatgcggccaagataggaccttgggccaaatccgcnnnnnnnnnnnnnnnnnnnnnnnnnnnnnnnnnnnnnnnnnnnnnnnnnnnnnnnnnnnttactcctcctctttctctccccaacccccattctcatctgcacccttcttttctcatgtgtttgcataaacattcttttaacttctttctatttgacttgtggttgaattaaaattgtcccatttgc

SEQ ID NO: 349662 - DNA, 531 bp, Homo Sapiens
gtcaccctgtgtggacagattagaagattttacaggacgagggctctacctctcagacatcccaattcacaatgcactgagggatgtggtcttaataggggaacaagcccgagctcaagatggcctgaagaagaggctggggaagctgaaggctacccttgagcaagcccaccaagccctggaggaggagaagaaaaagacagtagaccttctgtgctccatatttccctgtgaggttgctcagcagctgtggcaagggcaagttgtgcaagccaagaagttcagtaatgtcaccatgctcttctcagacatcgttgggttcactgccatctgctcccagtgctcaccgctgcaggtcatcaccatgctcaatgcactgtacactcgcttcgaccagcaatgtggagagctggatgtctacaaggtggagaccattggcgatgcctattgtgtagctgggggattacacaaaagagagtgatactcatgctgtcagatagcgctgatggccctgaaatgatggagctctct

SEQ ID NO: 349663 - DNA, 295 bp, Homo Sapiens
aaagatgacagtaactcctgtttagttcaggatgttgcttagatccagatgtgtccccagcatagagcctcagtacttcaaagatacagccaacctcaaacttcttttctgtgttaactatatatgatctgtatgggaattccagctggtctctttattgactctgatggtgggagctggtatatatagctttattagcagtagcccaagcgttagagaaaattgagaaataacatgttaatagtttgagtaaggtgcaaaagtgaatccataaacaatgaagtcattcagtgct

SEQ ID NO: 349664 - DNA, 728 bp, Homo Sapiens
  misc_feature (662)..(662): n is a, c, g, or t
  misc_feature (665)..(665): n is a, c, g, or t
gcaaatgcatcataccaatgcgaaatgttaataatggggaaactgggtgtagggcatacagaaagtctctgtactatctttgcagtaattctgtaaatcaaaaactattagtacatttattaaagaaaaatctactaggaaagcttccagaagtattccatgctcacaataaacaaggcaaatgcaatcaagaaaactcaaacatgagattaaatcagttaactggctgctcaactataataatgccctgtgcccagagctttacagaaactatcacacgaaatattagcttattaagcccacagcttctttaccaggataaaatggccaaagacattggtctcaaacacctcctgaagtccatcagcagtgatcttatcaccctgggtcagcaggccttcagcttgaaaagaggccaaagaaaagtgctttgatatttagttgtggattaggcatgatcccagcatttagatatatacagtctaatctctgaaacctttgcttaagttccttggaggcccggaagaccgactgcaggttgctgacatccacctggacaatggtgacctcagcagtggggtgagaggccagcagagcagcacagacagcttctgccttgctcatgtcctgcacgccaaacacagatgaagctcatcatcttncgncagcagccgcttggagagggccaggccaatgccactgctaggccccgtgatcaaaacactttt

SEQ ID NO: 349665 - DNA, 876 bp, Homo Sapiens
  misc_feature (27)..(27): n is a, c, g, or t
tcacccaaggagagccctagggagccntgactgctaaatgtaatgtagtatccttgaatggggatcctagaactgaaaaaagacattaggcaaaaacagaacctgaataaagtggtgtactttagttaataataatgtaggcagaattgattcatctatttcgacaaatgcatcataccaatgcgaaatgttaataataggggaaactgggtgtagggcatacagaaagtctctgtactatctttgcagtaattctgtaaatcaaaactattagtacatttattaaagaaaaatctactaggaaagcttccagaagtattccatgctcacaataaacaaggcaaatgcaatcaagaaaactcaaacatgagattaaatcagttaactggctgctcaactataataatgccctgtgcccagagctttacacgaactatcacaccaaatattagcttattaagcccacagcttctttaccatgataaaatggccaaagacatcggtctcaaacacctcctgaagtccatcagcagtgatcttatcaccctgggtcagcaggccttcagctgtggagaacatatgaatcacttttcttgaaaagaggccaaagagaagtgctttgatatttagttgtggattaggcatgatcccagcatttagatatatacggtctaatctctgaaacctgcaactttgcttaagttaccttggaggcccggaagaatgactgcaggttgctgacatccacctggacaatggtgacctcagcagtggggtgagaggccagcagagcagcacagacagcttctgccttgctcatattccgtgcaccccaacgctctcgacgaattcgacgctcggccgatttggcctgat

SEQ ID NO: 349666 - DNA, 1595 bp, Homo Sapiens
  misc_feature (1096)..(1382): n is a, c, g, or t
tctgattggtgacgggtgaggcggcccgaaatcgtaggacttccgaaagcagcggtggcgtcttgcttcactgcttggaagtgtgagtgcgcgaagatgcgaaaggtggttttgatcaccggggctagcagtggcattggcctggccctctgcaagcggctgctggcggaagatgatgagcttcatctgtgtttggcgtgcaggaacatgagcaaggcagaagctgtctgtgctgctctgctggcctctcaccccactgctgaggtcaccattgtccaggtggatgtcagcaacctgcagtcggtcttccgggcctccaaggaacttaagcaaaggtttcagagattagactgtatatatctaaatgctgggatcatgcctaatccacaactaaatatcaaagcacttttctttggcctcttttcaagaaaagtgattcatatgttctccacagctgaaggcctgctgacccagggtgataagatcactgctgatggacttcaggaggtgtttgagaccaatgtctttggccattttatcctgattcgggaactggagcctctcctctgtcacagtgacaatccatctcagctcatctggacatcatctcgcagtgcaaggaaatctaatttcagcctcgaggacttccagcacagcaaaggcaaggaaccctacagctcttccaaatatgccactgaccttttgagtgtggctttgaacaggaacttcaaccagcagggtctctattccaatgtggcctgtccaggtacagcattgaccaatttgacatatggaattctgcctccgtttatatggacgctgttgatgccggcaatattgctacttcgcttttttgcaaatgcattcactttgacaccatataatggaacagaagctctggtatggcttttccaccaaaagcctgaatctctcaatcctctgatcaaatatctgagtgccaccactggctttggaagaaattacattatgacccagaagatggacctagatgaagacactgctgaaaaaattttatcaaaagttactggaactggaaaagcacattagggtcactattcaaaaaacagataatcannnnnnnnnnnnnnnnnnnnnnnnnnnnnnnnnnnnnnnnnnnnnnnnnnnnnnnnnnnnnnnnnnnnnnnnnnnnnnnnnnnnnnnnnnnnnnnnnnnnnnnnnnnnnnnnnnnnnnnnnnnnnnnnnnnnnnnnnnnnnnnnnnnnnnnnnnnnnnnnnnnnnnnnnnnnnnnnnnnnnnnnnnnnnnnnnnnnnnnnnnnnnnnnnnnnnnnnnnnnnnnnnnnnnnnnnnnnnnnnnnnnnnnnnnnnnnnnnnnnnnnnnnnnnnnnnnnnnnnnnnnnnnncatatatacatttaatatatatgtaaagccagagctgacaatgacactctggaacattgcataccttctgtacattctggggtacatggatttctactgagttggataatatgcatttgtaataaactatgaactatgactctcttttccttccttttgggattatctccaagactgggtatgtgtatgcatatgagaaaaaagattgggccg

SEQ ID NO: 349667 - DNA, 683 bp, Homo Sapiens
gtcagctggtagtgagaacagtaacctcctgtcaaggtcatctcccctttacacagagtcacagtttgctgacaaggggtcaatgtcttaatgtaggcactgaccttaaggagatttgtgtaaaaacagtcagtttggcattgacctcctaaaggagtcctgttgataaaaatacatcaccttcacaggctgtaaacaatttgtcacccaattatttttatttattttcatgttagtttccctttggcttgtttcatctttgccttcttgctcatgtttttccacaattggctttgtcacccggtcataggaaggtggacaagctgcagtggacatggtcagatcagttttttctgtaatagagttttcatttattctgtcaattatcatgtcttcttttataagaagattagccccacctttgattttgtttttattgtacgtaaaggaagcttgttttacagttcgctttaaaaggtggcgtctgtaagcacgctgaataatgacagcagatacttcctcttgttttcgttttaaagtagtagtgattggctgataggagaccttggaaggattggaagccatgaatcgctcttccatctgtattcgtagagcatccatctctccactctctcctagaacccgctttgtaaaagcaaataagatatcaagacagtgccgct

SEQ ID NO: 349668 - DNA, 2008 bp, Homo Sapiens
  misc_feature (27)..(27): n is a, c, g, or t
  misc_feature (799)..(862): n is a, c, g, or t
  misc_feature (934)..(934): n is a, c, g, or t
  misc_feature (977)..(977): n is a, c, g, or t
  misc_feature (979)..(979): n is a, c, g, or t
aaaccataaaccatttatggaaccccnaaacatttggaatgaaagtttggcacccggccaaagatttaactgggccctaccccacaaacaaatctacctgggtcctaggggctggatttccgcaaaacaagatcaacaaagcacctccaacttatcaccccaattacccctcccagaaatatggtgaaatttaagaatttgtttttcttgtgactttttctcatgcatgatctctaagtgcagcatgccctcatgcaaaccacgactttgtgtagctgggagggccatgtggttgccataccccccaggtggcatacctgttatagaggtccttagcctatttctcaacagaaacttcgtttacaaaaatagtcacatataataaacacatggattaacaaaaagatgaatccactaacagattccataaaaatgtgacaaatgtggcagttgaaatgcaaacagtggatacaattactacactaaagtgtttcatgttaaacaaccccaaaatcacaggtttgcaccccttgaaactggtccctacagtctgactagccattgtgcatcttatcttcagcagtgtcagctggtagtgagaacagtaacctcctgtcaaggtcatctcccctttacacagagtcacagtttgctgacaaggggtcactgtcttattgtaggcactgaccttaaggagatttgtgtaaaaacagtcagtttggcattgacctcctaaaggagtcctgttgataaaaatacatcaccttcacaggctgtaaacaatttgtcacccaattannnnnnnnnnnnnnnnnnnnnnnnnnnnnnnnnnnnnnnnnnnnnnnnnnnnnnnnnnnnnnnnccacaattggctttgtcacccggtcataggaaggtggacaagctgcagtggacatggtcagatcagtttttnctgtaatagagttatcatttattctgtcaattatcatgtcttntnttataagaagattagccccacctttgattttgtttttattgtacgtaaaggaagcttgttttacagttcgctttaaaaggtggcgtctgtaagcacgctgaataatgacagcagatacttcctcttgttttcgttttaaagtagtagtgattggctgataggagaccttggaaggattggaagccatgaatcgctcttccatctgtattcgtagagcatccatctctccactctctcctagaacccgctttgtaaaagcaaataagatgtcaagacagtggatccggtcaccactcaccatgggcagatccatggcaatgagctggactttgttgggttttgctatgagaagaggaggatccagggcatctgcaaaatcagaaagtttggcaaactctataaactgggtcgcatcgggatcaaacttctcccaaacctcatagaacatctcaaagtcatcctcactcagaggctctgcactttcttcagtagcaacactgaagttctccaggatgaccgcgatgtacatgttcaccacaaccaggaaggatatgatgatgtaactgacaaaaaagaaaatcccaacagatgggttcccacagtctcctttaactgagcttccagggtgatctttgtcagggtcacagtctggaggtccactattaagaataggtgctagcaatccatcccagccagcagaggttgtaatttggaacaggcagatcatgctgttgccaaaggtctcaaagttgaacatgtcatcgatcccaacttccctcttaacataggcaaaattggacatccctaagatggcgtagatgaacatgaccaggaaaagaaggaggccgatgttaaacaacgcaggaagggacatcatcaaagcaaagagcagcgtgcggatcccctttgctcctttgatcagtcgtaggattcgcccaatcctggcaagacggatcactcggaacagggtagggcacacaaaatacttttctatcagttcagccagaaacattcctacaatggagagaa

SEQ ID NO: 349669 - DNA, 1358 bp, Homo Sapiens
  misc_feature (1014)..(1037): n is a, c, g, or t
  misc_feature (1057)..(1057): n is a, c, g, or t
  misc_feature (1214)..(1214): n is a, c, g, or t
cggtccggaattcccgggatctgcagtcgccacacctttgcccctgctgcgatgaccctgtcgccacttctgctgttcctgccaccgctgctgctgctgctggacgtccccacggcggcggtgcaggcgtcccctctgcaagcgttagacttctttgggaatgggccaccagttaactacaagacaggcaatctatacctgcgggggcccctgaagaagtccaatgcaccgcttgtcaatgtgaccctctactatgaagcactgtgcggtggctgccgagccttcctgatccgggagctcttcccaacatggctgttggtcatggagatcctcaatgtcacgctggtgccctacggaaacgcacaggaacaaaatgtcagtggcaggtgggagttcaagtgccagcatggagaagaggagtgcaaattcaacaaggtggaggcctgcgtgttggatgaacttgacatggagctagccttcctgaccattgtctgcatggaagagtttgaggacatggagagaagtctgccactatgcctgcagctctacgccccagggctgtcgccagacactatcatggagtgtgcaatgggggaccgcggcatgcagctcatgcacgccaacgcccagcggacagatgctctccagccaccacacgagtatgtgccctgggtcaccgtcaatgggaaacccttggaagatcagacccagctccttacccttgtctgccagttgtaccagggcaagaagccggatgtctgcccttcctcaaccagctccctcaggagtgtttgcttcaagtgatggccggtgagctgcggagagctcatggaaggcgagtgggaacccggctgcctgcctttttttctgatccagaccctcggcacctgctacttaccaactggaaaattttatgcatcccatgaagcccagatacacaaaattccaccccatgatcaagaatcctgctccactaagaatggtgctaaagtaaaactagtttaataagcaaannnnnnnnnnnnnnnnnnnnnnnnacatgtccggccgcctcggnccctccaagaagggcggcccgctctagagttatccctcaagggggcccaaagtttaccgcgaccccaagctttttttggacaaaagggggcccctaaaagggagcccgtatttataaacttagggcacctggcccggtccctttttaccaacctccntggactgggggaaaaactggctaactttgggggatcttttggtgaaagggaacctttaccttcgtgggggtggggaaacttaatttgggaacaaaacttaccttaccagaagatttaaaaagcctcttaaagggaaaaattata

SEQ ID NO: 349670 - DNA, 834 bp, Homo Sapiens
ggggctgcagtcgccacacctttgcccctgctgctatgaccctgtcgccacttctgctgttcctgccaccgctgctgctgctgctggacgtccccacggcggcggtgcaggcgtcccctctgcaagcgttagacttctttgggaatgggccaccagttaactacaagacaggcaatctatacctgcgggggcccctgaagaagtccaatgcaccgcttgtcaatgtgaccctctactatgaagcactgtgcggtggctgccgagccttcctgatccgggagctcttcccaacatggctgttggtcatggagatcctcaatgtcacgctggtgccctacggaaacgcacaggaacaaaatgtcagtggcaggtgggagttcaagtgccagcatggagaagaggagtgcaaattcaacaaggtggaggcctgcgtgttggatgaacttgacatggagctagccttcctgaccattgtctgcatggaagagtttgaggacatggagagaagtctgccactatgcctgcagctctacgccccagggctgtcgccagacactatcatggagtgtgcaatgggggaaccgcggcatgcagctcatgcacgccaacgcccagcggaacagatgctctccagccaccgcacgagtatgtgccctgggtcaccgtcaatgggaaaccctttgggaagatcagaccccagcctccttacccttggtctgcccagttgtaccaggggcaaagaaagcccggatggtctgccctttcttcaaccaacttccctcaggaaatgttttgcctccagttgaaaggcccggtggaacctgccgaaaaaac

SEQ ID NO: 349671 - DNA, 850 bp, Homo Sapiens
cactatgacatgcggaggaacgacgacattataaacttcttcaatgacttcagtgaccacctggctgaggaggccctatgggaactgtctctgaaaattaaacccaggaacataacaaggagaaaaacagaccgggaagagaagacctaggagcagacgccgggatccaggagaatgctcgaggggcgcagagggcagctcccagaccggagaggaccttggacctgttaggcgcatggcaggagtcccggcctcggagccatgaggctggccagccctcagcggggccgggcgggagctggagcctgccagccgcttcctgcctccttcctctgtgggagcagacccgtgggcctcagggcagccagcaggcaggtcttgttgccaatttacaaaccggtggttttctggtttggttttgttttctgcttttacttccatctctcccctcttgaccttccacccactcccctccagggagagagcagcagagacctcatcagcagaccaaggaagtggtgggtgctccccctccctaagctccagggtccctgaatcttctgaaatctcaaatgagtggaggcctcctggggtggcctgtcctgcaggggccctggaatgggggcaagcagctgggtgggcagaatgcagagtagactcgggggaggatcctttcactttccgcttccccttctgatgcatggaggatggtgtgagcttttcagcaggcccggaaaggtacgcaggtgaacgccttagcagccccgcaactgggtgctctgcccccgcggttactgggcgccatcaagggcctccctttgcccgcggcccgccggaaagggtaccgagc

SEQ ID NO: 349672 - DNA, 330 bp, Homo Sapiens
agtgttcagatggagaacatcaagcatctgctctgcccttccacacacatcctcatttcatcttcacaactgccctaggtaaccttgttatctgtaatgaaacagcctcaaggagcacagaggcactcactcctcacgtttggtctgttgccatttccggcttggttggaatagggtaggagccttttggcagggagcacattctcagtaatgcagagtgcactcacctgggttctagcttcaacacttaggatttgcttgatattttgtattctctgaggcactgcctgtatttgtttctgctatcacagtccagagtcaagcttcatt

SEQ ID NO: 349673 - DNA, 799 bp, Homo Sapiens
  misc_feature (80)..(80): n is a, c, g, or t
tttataagaaagactaaaaatacttgtctgctatttggcaatttataaatccccactgtccagattgaaagtgctatcancactccttaattcattagtagttcgagggtttctctaaaagagacagacttgggacaaagttggaaatcaacctgcattttcatacagccgcttaagacatttaagtttgactccatctacttagaacaattcaaaatgtgaatcttgcaactccagtggtcgttatgatcatttagtattgcccacaggggaagcagaattacaacccaggatggaacaaccttttggtcatttctgttcccattagtattgttagttttgttatgctgagcacactacaaagttgcatctcttgtataagtacaacacaatttattaaatattgtatacatagaaccaagaatcgataggatgcagggctgcttgattgtaccagaaacaaaacatgatgagaatacattgaaacactggatttacttaagaaaaacctaagtttttcaaatctaatttatttaagaaaacgtattttcttaataagtgtaacacagttcttacaaggtatggtaataagcagaaagtagaattttgaatattaatgtcaaagtatgttttctgccattttgatggagttgatactttttcttgtaagttcttcctgtagtgaaagagagaaagtgaggtgtcattgccgaaaggacacactaataacctcttggtagtttattgcaggtaaaatcattttttaattaagctgacaacgtggtaaaactgcagcatc

SEQ ID NO: 349674 - DNA, 1768 bp, Homo Sapiens
  misc_feature (1495)..(1495): n is a, c, g, or t
  misc_feature (1549)..(1549): n is a, c, g, or t
  misc_feature (1591)..(1591): n is a, c, g, or t
cgccctttgggagataaaggtccctctccaccctctactaacactctgcacccaaggccttatcctttggggtcaccagctccttggccatttctatgtgatttcccccacccatctgagttccagtttcctctgggctccaatctccagtccctggcggatctggtcagtcccacccctaggtgggagtgaccagggggctctggcccaggattcccaaccctggaaggcagctccaaggcaggaagagaattgggcatcgggtacgaacctggcagctcaggagtcggggctccactcaccccacacaaaaagatgaaaaagcgcaaagagctcaatgcattgatggtttggctggggacagccggagaaagaagcccaagaaaggcccaagcagtcaccgcctgcttcgcactgagcctcccgactcagactctgagtccagctccgaagaggaagaggaattcggtgtggttggaaatcgctctcgctttgccaagggagactatttacgatgctgcaagatctgttatccgctctgtggttttgtcatccttgctgcctgtgttgtggcctgtgttggcttggtgtggatgcaggttgctctcaaggaggatctggatgccctcaaggaaaaatttcgaacaatggaatctaatcagaaaagctcattccaagaaatccccaaacttaatgaagaactactcagcaagcaaaaacaacttgagaagattgaatctggagagatgggtttgaacaaagtctggataaacatcacagaaatgaataagcagatttctctgttgacttctgcagtgaaaccacctcaaagcccatgttaagtcagctgcagacttgattagcctgcctaccactgtagagggacttcagaagagtgtagcttccaatggcaatactttaaacagcgtccatctagctgtggaagcactacagaaaactgtgggatgaacacaagaaaacgatggaattactgcagagtgatatgaatcagccacttcttgaaggagactcctggaagcaaccagatcattccgtcaccttcagccacatcagaacttgacaataaaacccacagtgagaatttgaaacaggatatcctgtaccttcacaactctttagaggaggtaaacagtgccctagtggggtaccagagacagaatgatcttaaactcgagggaatgaacgagacagtcagtaatcttacccagagagtcaacctgatagaaagcgatgtggttgctatgagcaaggtagaaaagaaagcaaacctgtccttcagcatgatgggtgatagatctgccactctgaaaagacagtctttggatcaagtcaccaacagaacagatacagtaaaaatccaaagcataaagaaagaagatagttcaaattctcaggtatccaagctaagagagaaactccagctgatcagtgctcttacaaacaaacctgagagcaacaggccttcagagaccgncgatgaagagcaagtagagagtttcacatcaaagccatcagcattggctatctncctaccaggagtttctagcactgaagatcttagggattattncgcaggactgtccaggacgtggattggaagctgacctacccaggaaatttggacctcctaaggtctgctatgcacgaccagagagcttgagagcacttgaattcgatggagaaggaagatactcatttcttggagcttaagggagctttaggaatctagcttcatcaggcatactta

SEQ ID NO: 349675 - DNA, 622 bp, Homo Sapiens
aataatctccaaaagaaaagttaaaaaaattattgttataaattgccatgaaatacatagtgggctcgattcaatagccccccggtccgtatctatatctctatatctatagagacataacttctttcttcgtaagttatatatgtctacttctacctgtgttatcataataaaggtgtcatgatgatacaggtggaggtagaaatatataacttatctcttcataagggctaaaatgagaactaaaagtaatgagaattcagttgaatatgattaattatcaggatatgttaattagttctcttgatgcttactgtgatgcaaagtatgtgacgtattttaaacattttataataattgttcgtatgttaaccattaggcaagatttgtatttctaatgcttttaatgttcttttaaaataatgtttggaaaataaaaatactgaaaatcctaacatttctgaacaccagtttgcaatataatgaatttcctgtctgatcattttaaaactatcagagcatggcaatgatcatttttgcccaatggataacaatgtgttgaaccacagacagagagctctttgccttaagagatgaaataacttgtttgactatatataaa

SEQ ID NO: 349676 - DNA, 739 bp, Homo Sapiens
  misc_feature (488)..(520): n is a, c, g, or t
cggcctacctaagtactgggattacaggcgtgagccagtgcactggcctattatctctttttaacaaagaattaagaaatctaatattctttcccaagatcgtacaaagaattgtggcaaattaggaattagatttttgtcttaattcaaaacctggtatttaccccagtgtgccaaacagctttataatgaagacaacattaatcaagcatcacatttttaaaggcatatatctatttttttggctatgcaaaaaaccttgtctctattaaaaatacaaaaattggctaggcatttcaaatgtgatacaataaaatattaacacaaaagtaatttctatttataaaatttaaaatggcaggttttctgtgtgacgtttgagtttgagatgatttgactggcatgaggcccatcattgggaggtaaaaattacagcacaaagaaaactaagcaggtgcatatgaggtattgtctctttatgctcatcnnnnnnnnnnnnnnnnnnnnnnnnnnnnnnnnnttattgttataaattgcatgaaatacatagtgggctcgattcatagcccccgtccgtatctatatctctatatctatagagacataacttctttcttcgtaagttatatatgtctacttctacctgtgttatcataataaaggtgtcatgatgatacaggtggaggtagaaatatataacttatctcttcataagggctaaaaatgagaactaaaagta

SEQ ID NO: 349677 - DNA, 789 bp, Homo Sapiens
agcggagtcgcaggagccgctgctgcagccggcagctgggcgggattcccggggtagtcgctgggagcaaagctcgcttctcccgcgcctgtgcttttgcctgccccggcttacttctccccgcgtcggtccgctggccacgtacagctgaccagctcatcttccagcttcggaccgaggctccacggccgccgcagggacccgcccaccagaccctgcgctcggtagccggtgtgagtggaacgtgccgctgatgacacctggcagaaggcagccatggagggcgatggctcagattcgccggttaccattaagaatatcgaaagggagctcatttgcccagcatgcaaggagctgtttacccacccattgattctcccttgccaacatagtatctgtcataaatgtgtaaaagaactcctgctgactctcgatgattcattcaacgatgtgggatcagacaactccaatcaaagcagtcctcgacttcggctcccctcccctagtatggataaaattgaccgaattaacagaccagcatcacaacggagatctgtggggtggagaggctggaagcgcaattcattgaccccgaggacaactgttttcccttgccctggctgtgagcatgatgtggatcttggagaacgaggaatcaatggtctgtttcgaaacttcactttggaaactattgtggaaagatatcgtcaagcagctagggcagccacagccattatgtgtgacctttggtaaaccaccacctcaagaatccacaaataagctgcatgg

SEQ ID NO: 349678 - DNA, 539 bp, Homo Sapiens
catctacctatgagtaggtaatcatactggagcaaaaatggaactcaatcaaaaagggctgtttgtagtgtacaattcaaacaaattgcttataacaattaaaagaataggtcattaggcttattcccaaactatgatataaaatcaaactcccaacatgttgttctgtacacttaaattggtttacactctgcaatatctcctggtacttagaataccttgcaatgtaatgaagaaaattagtttgttttgcatgatttgaacctctgaaaagtaatatattgtacattaaaataatcaagcaaggaatcaaattgccagttcctgtgagatgataggcattgaagtatagatgcctgaactcatccatgaagcaatccatgctgattgcttcaatctgtaaattatttgaacttataaataggaaagccaactttcccaaaaatatttgacaataaaattaatcaagcatatgtgataaaaaatatagttctttattttgtgcatatactcagtgataagcagcactttaccagctg

SEQ ID NO: 349679 - DNA, 685 bp, Homo Sapiens
ccataggccaagctctgttctaagaacttcggacatgttatctcactggtataagtacttaggtgcctacaacattaacagcacctggtaaattaagtattgaaaaaatgctatggggcagaggaagaaatgctaagcttctgtgagaagagaagacagcttgttacacaggtgaaaagaacaagctgcagctgagagaagaaaagtataagagttgctaggtgtgacaatctcaagacttttcaaccactacaaatttaaacagccaccctaaatcaccccaaaggacagactcgagttgttctttgtgtctttaatgtttgcgcctctccgaatcagagaagaagctgccaggattccagtacataccaaaacatgatgacaataccctcaactgtgcaaacttttgtgcatctaccgctatgtaaaggaagctgatgtcagtagactggggggaacagtaaggcatgtttgtgaccgaagctcaatttgccatcacagtgtggccacacctacctcactaatattctaatagtgggataaataattcaatagggataaagcctggattttcctcttattctctcttagtgcttacattcttggcatgatatcgatgtgccatagacaagccaatatatgagtgtactctatctgaataaagtatagcctttctacattgcaa

SEQ ID NO: 349680 - DNA, 497 bp, Homo Sapiens
tccattcaattctctctattccttgtactagactaacataataaatgggaacctgacctaccatccaaatcttccactgctatttggctctctacctggcaccacacttgagttttgtgaggccagttgggatgacttaagtttgtaagccttattattagttttttatttcatatcaaaacacatagaaatgtccctatcctttttgctttttatttagtctacagcccttaagtcattctgcctaaaattcatcaagctcctcttcttattaggtccaatatcccatataaaataaaattgccttgcatgtagtgcatgctcaatacaaacttatttttctggaagtatcacttcctgtgagagcaggctgttataaagtgaagttgctttgcatttttgaatgccgactttccccttccaattctccaacatgttctccaaatatatgtaagtatcagagacttatatatatcttttttgttcctagtttttct

SEQ ID NO: 349681 - DNA, 2361 bp, Homo Sapiens
  misc_feature (1526)..(1526): n is a, c, g, or t
atgtttagatttgtagtctagtctattctgaagatatttgattaatatatttctaagaagaccactagtcccatgaagtctcaccttgttgacttccaccagaacaaaacctgttaattcagcttgacttctcatatgtgttctgtgttcaagctcctgtgggcaactcaattgttttaagaaaactctatttctgttcatattaattcacttgccagactccaattctgaaagttgtctagttcttccttcatcacacgtgcttctcatcgaaaccctggtttcaggatggatcaagtgctgttacagctcatgttccttagacctgatttgttttgatattttactgcctttccttttaatttttgtttgaatgagaaaagtttaatacaacaggtgtccagaatacttgcagtataaatgaagatttggtttttgtataaaaaaataatgctgttaaacaggagttgaccttcatttagttgatgtaatacatagctgtatggggttttttttagtaagttctttgagcataattcactttaaagtcatttttccagcaatgtttaaattactttctcattcttttagtgtattcaacattgtctgcctcttcctgcagttgatgtaattgctttgtttgcaatagcacaagctgcattattccagtcaggactgtgataacttgctgccagccccactcaactttcagttggctctgtgtcagttttccactcagtgttaactacttgttactgccatgctgcttgccctcccttgaagtgtctataagctcatcacagcctagagttaagtaaagtcaattcacagaagcacaattttgccctttgcgagacattgttgcctctatctagtcctacaagtagggttttgcatactgtgtttgcccctagggttgtcagtgcatcagaaatacttctaaatagtggtaaaaatgcacatggttaatgcacatgttacttttaaatcattaggatatccctcacctgttcctgatgaataaaaagtgtgttaaagaccaaaattcttggcataataatcagctacatacaaatcacatatagtttaatcttttttaatgaaaaaaaatcatgtttaaaatggcaaaagcccatcttatacacttttatatagctgcaaaaaattaatatctgtacagatctaacactacgacactcagtattcatttattgaagcatgcaagtaaagcactttttctaatttatatagaggtatctaattaacacagcacattgtactaatgactaggagtagcagctttttcttctctccctctatgaattcttataatgtccctttttctgtaagtttttgagaggcaatgggcaatttaggaggcagcagggtctgttttggtcaaatcttgaatttcgttgttgcactctagtgactgatctttgggaatgtcttgtctttgcatggggctcatagagatgtgtgcagacttgcttattgtggttagtgtgtatcaggaacacacacancaggtgttctgaccagctcaggcttgccacagtgagcaactctgtggctagcaaaagagaagtttatttgtgcccagccattggtcacctttggtgatgcaccagatagcaggcagatgttggttcattggccttcgtcctctttcctcctaaaataatattggctttaccatcttaactcagctgtgggttttttgtgggttcttgtttgttttttggcatgaattgtcatctttggtgtttttttaacccccagcccctcaaaaaaataaggcctccaggtattcaagatctcatattaggattttctgtccttaattttttgagcaaaatctggaaaatgtgaaagcatatttagattttatatactatctgaaatgtgatttgttaagattcttaaatttgggcctcttagaataattttgaatgagatctaccgactcacttgtgagaatatttttcacagattatctttgggccttttcattagaaagctgtttgtttgtccccctgttggtacatttggttacctcattttgccgtttcagattgtgaaagctcacaggggtgttttttggaatcatttgctgagtcattttctcaaatcatattccattgtatcagttaacatatagttttaaatgtatgtattataaatatctgtaaccaaatcatttgaaggcttgataaatttttaacaaagtttgtacattttttatgaaagttactagtaatgctttactaagtagtgcaatgaatttttatttttaatccctgtgcccaattttggagttgagagggttgttggtaataaatgtatgatgtacacttaaaa

SEQ ID NO: 349682 - DNA, 434 bp, Homo Sapiens
  misc_feature (140)..(171): n is a, c, g, or t
  misc_feature (342)..(342): n is a, c, g, or t
  misc_feature (365)..(365): n is a, c, g, or t
  misc_feature (424)..(424): n is a, c, g, or t
gcaaaatgaaaaaaaatttatttcctcagtgttttatccactgtcaatactgtatttttgatgcaatatatttgccaaaagaactcagcttttattttccattttaaacaactacaatatttacaagctgttcagaatannnnnnnnnnnnnnnnnnnnnnnnnnnnnnnngtaagtacatatgtccttatctctggtttatactgaatgctgggtaaaggccatggaatactttccagaggcccatgatcagaaaagggaaaacccattttcctttcttacgttcactttcctaggaatcattttcaatattcctccttccatttcctcatggcagagctncattggccagacttgtatagggnttaatcagttttttacattttaccttttaacttaaactataaggctttttaaaagggcntaggcggggc

SEQ ID NO: 349683 - DNA, 545 bp, Homo Sapiens
  misc_feature (15)..(15): n is a, c, g, or t
  misc_feature (37)..(37): n is a, c, g, or t
caaattaaggggggncaaactggagaattccttttanagccttgttaggtaagaatgttcattgagtgaataaattaggtttaaaatttaaaccaatattttagatcattttcccacaaagccttatcaaggatttgatggggaaggaagcacttgacccacagcagttttatctgtaaccactgaacttggccatgcatcattttcatctgcccactggatgttgcacttctcactggcacagtgtttcaacagtggagtgtggttgtcatgaaaatgcagtattgacactataccactataaatgtggtcaaaattagactcagtgttgacattgacattgttgccattgtccttggaaaaggtgttactttcaaggagcctcctaaatgcaacagtaactttaatcataataattcaaggacaatggatggcacttctaggtaaagaaaaggtatatacatatgtgtttctacccatcctctttagtacagacctctatgggattaataccccccgtgtggagagagggagagagaagagcg

SEQ ID NO: 349684 - DNA, 421 bp, Homo Sapiens
ctttccttcttcccccttcctgatgatgagtgagaagtatggagaactttcggggtcagtgcccttctaaactccccttcccccaataatgcagctgtataatgaatggtaaatgcaccggtttggattcaggcacagccccagtctgcctacaggtaatttaactctttctcctttctttccatcactaggctaactttctttttttaaaacttcctttctttacgtactttaaaaagtaaccatgggtttgtcataattctcacttaaaaataatgcataaatgtatctagcaaataatatgattaaagaagagcttttgggggtaaagtttgacttggttatgatatactcaagacttgggaattttgtttagccatttagatgactccatttcttgcatatatgtctataattaagt

SEQ ID NO: 349685 - DNA, 511 bp, Homo Sapiens
  misc_feature (42)..(42): n is a, c, g, or t
  misc_feature (52)..(52): n is a, c, g, or t
  misc_feature (495)..(495): n is a, c, g, or t
agacagtggccatgtttccaggctgggtaaaaactccattangtcttccccngttttccccctctgatctcctcctctgtgtatctgtcagcagtggtctccccgggagcagcactatgcacttcattaataagaagggattaaagaaaaaagccccaggtctcctaatacacttggataatttggtgccatccacaaggcgatagacccctgctgcatagatgtcattagaaaggtacaatttcattactttttactggcagagccttgagtgaaatacaaaatatgttgtctcatatgtaggggcaaaaaagtgctaaagctttcattcatttcatgcccctaaaaatagtagaatgcaaaaaatgtattttatggttttcacatgtatattgccttcctttagtagtccttgaaatcatacttcctattaaatattgagcaaaataaagattaaaagaaaattatttatattcttaaatctcaaatgagatnctatataattgtatgg

SEQ ID NO: 349686 - DNA, 1284 bp, Homo Sapiens
ctgctgacagatacacagagaagagatcagtggtctcctgcagcactatgcacttcattaataagaagggattaaagaagtgcatagtgctgctcccaggagaccactgctgacagatacacagagaagagatcagagaggaaaaactgggaagacataaatgaattatacccagccatgaaacaatgccaactgtctcttccctaaggaagagtacaagtaccctaaaattgaaaggtggtccctacactgaaaacgcacatagtttgtcaaaagtgtacaaaagggaaagagtcttattttaagctttcaggctttcttaaaaacttggggaccagaatttcaatgtatgtttccattgttgaagataacattttcttcaaagagccttaaccttttgtactggaaggaaatattttctggacttaagtagttgcctaaatttaagattcctacactttatttctgccattgatgcttttcctaaacccttatactatctttttattatctgagccttttcctaatgcagctcataggtgctagctagagctgctgctcagtattgaagactttacaaggagattagaaatctttggaaaacatatgtgatgaaattgagctatatgatttatcagagatctgattccaaagagcacagaatactgttctcagaccatgaaaccagacaacacatgtattggtttaaactcgataatgacaggaaaattccaaactagagcagtaaattcaaatggtaagatgaatcctagaaggcctctgattgcagcatgttgacaccaacctcacgttacgaacaattcacagagaatttgcctttgtggcaactgaagatggaagtctggggggcacagacaaccttatcaaacaatataaaagccaatataaattctcataagcactatagaatttgcaaattcagaacattttatacctaaaagtaattctgtctttcctaaagtgtttttaacatgaaaattagtaggaagatgtggttactatttggaaagtgtaatgtaacaaaactctcttttgttaccacaaattttgtgagtttagtactctacagattgccccataagagcagtagcttttgaaactcataattctctgaaataaatgaaagacatttaattcaaggatcaaaaattgtggccatctttgcaaatgactacctatagcctgtgaaaatacatttcaaaaaatgttatgtgcaatgaacactaaatttaagagcagttacagtgtgactcactcatgttt

SEQ ID NO: 349687 - DNA, 967 bp, Homo Sapiens
ttcatggtctgagaacagtattctgtgctctttggaatcagatctctgataaatcatatagctcaatttcatcacatatgttttccaaagatttctaatctccttgtaaagtcttcaatactgagcagcagctctagctagcacctatgagctgcattaggaaaaggctcagataataaaaagatagtataagggtttaggaaaagcatcaatggcagaaataaagtgtaggaatcttaaatttaggcaactacttaagtccagaaaatatttccttccagtacaaaaggttaaggctctttgaagaaaatgttatcttcaacaatggaaacatacattgaaattctggtccccaagtttttaagaaagcctgaaagcttaaaataagactctttcccttttgtacacttttgacaaactatgtgcgttttcagtgtagggaccacctttcaattttagggtacttgtactcttccttagggaagagacagttggcattgtttcatggctgggtataattcatttatgtcttccaagtttttcctctctgatctcttctctgtgtatctgtcagcagtggtctcctgggagcagcactatgcacttcattaataagaagggattaaagaaaaaagccccagtctcctaatacacttggataatttggtgccatccacaaggcgatagacccctgctgcatagatgtcattagaaaggtacatttcattactttttactggcagagccttgagtgaaatacaaatatgttgtctcatatgtaggggcaaaaagtgctaaagctttcattcatttcatgcccctaaaaatagtagaatgcaaaaatgtattttatggttttcacatgtatattgccttcctttagtagtccttgaaatcatacttcctattaaatattgagcaaataaagattaaaagaaaattatttatattcttaaatctcaatgag

SEQ ID NO: 349688 - DNA, 753 bp, Homo Sapiens
  misc_feature (23)..(23): n is a, c, g, or t
  misc_feature (33)..(33): n is a, c, g, or t
ccctaaaggtaatccctgccctnccccccaagnggtttttaaaccatggaaaaattaggtagggaagatgggggttaccctatttgggaaagtgtaatggaaacaaaacctccccttttggttaccccacaaattttgtgagtttaagtacctcctacagattgccccccataagagcagtagcttttgaaactcataattctctgaaataaatgaaagacatttaattcaaggatcaaaaattgtggcccatctttgcaaatgactacctatagcctgtgaaaatacatttcaaaaaatgttatgtgcaatgaacactaaatttaagagcagttacagtgtgactcactcatgtttaaaaaaaatcgaagagctaaaaaatacgtctaatttatgtaacccattggaatgtatttctaggttctcttcaggattaattaaataaacatgcaatttatgaaaacatataaacaattatttatcacttttatgacccaaatcacaataaaattgtcatttaggataaactggggagaatagactgaacatatggttatattcacagttatttattaacttaaatgttattccaacattagagctaatgttaaaaagatttaaactgtaacgtctaatatttggaataatatattaaagtattagcactgtggttgattttcttgaattatgttgcatcttgtactactaagcttgtgaaaataaacatttggatgttttaaaaggtaaaaaaaa

SEQ ID NO: 349689 - DNA, 467 bp, Homo Sapiens
cctaaacctcccttgtaaagtccttccaaatacctggagcagccagctcctagcctagcaccctatgagcctgccattaggaaaaggcctcagataataaaaagatagtataagggtttaggaaaagcatcaatggcagaaataaagtgtaggaatcttaaatttaggcaactacttaagtccagaaaatatttccttccagtacaaaaggttaaggctctttgaagaaaatgttatcttcaacaatggaaacatacattgaaattctggtccccaagtttttaagaaagcctgaaagcttaaaataagactctttcccttttgtacacttttgacaaactatgtgcgttttcagtgtagggaccacctttcaattttagggtacttgtactcttccttagggaagagacagttggcattgtttcatggctgggtataattcatttatgtcttcccagtttttcctc

SEQ ID NO: 349690 - DNA, 482 bp, Homo Sapiens
gggaaattcacgtccatgtgactttggattcggaaagtgggaactcttcggaggggaactgctccggtgctgtctgcaaagagacactgaataaggaaagccacgggctaaacacagggacagcatttcatcttctcatctcacatggcccaggaaatcagccaaacgactaaatagccctctggaaggaagcaagctacagatgagataaagcagaaaagcttctaggaaaaggaaatcgagaggaatagggacttggaagggaaaggggagtcattttcagcaagccagtgagactcccagttaaaaatggtaaccacactgcaggaacatgagctttagacttctacctgcaggaaagagcagatctgtttcgtcagctctaaaaggctctcctcgccctggtgcagggtccgggtgatggccacgttgagccactctctcactgtctgggagttgccctggtaaaagaggtccgtcgg

SEQ ID NO: 349691 - DNA, 1676 bp, Homo Sapiens
  misc_feature (813)..(863): n is a, c, g, or t
acgctctctctgtggggctcaggctgctggacgtgctgacctccatgctgtctgtgccggggaaggccagtgtcttctcgggctcaactttcccgtccccgccctcggccttgtcttttggcttcttggtgtcttcttcctgcagcgggatgtagatctcgtctttgaagaccccgccgtgggcgttgcaggccttgcggatggcgcctctgactacgccctcgtccaggtgggtggggatcccggagatcaccagcaagcggctgtgggcggtggggcccaccagggcctggcaggcatcggcgatggcgtcactcgtcacgcccagcccctgtgggtccttcctggtgaggtggcggaggatgatgagcagggtgagtgcgcggtggaaccacagcatgtcctcgggcttgctgcctccgatgctgagcacggtggggtccgagtccacggtgcgggaagactggcgcttgcccgacgaggaggccttttcccgcttcatcttgacttttttcctcttggagaggaggctgggactctgtggggtctgtcctggggaggacgaggaggaggaggacgagtcactgagatttggggcggtcgctgaggtcaccccactggctgtgacactcatgttagtaggcagggtcacttcggccacagccaggcacccttccatgagtgcatgaaaatacgtagagaacctgccctggtcaccggccgccgcccccccggagcccccgcaggcgccgcctgagacccagttctgcgtctcctcgtcgtacagcttgtggagctccgactgcaaggccnnnnnnnnnnnnnnnnnnnnnnnnnnnnnnnnnnnnnnnnnnnnnnnnnnnccagcggggtgccgcctctgctccagggtgtgcaccgtgcgcaggagctctgccaggagatggaaaacaagctccttcacgcaggctgccatgtccgtggtccacaagaagtttcctagcagctccaccacctgcaggaggacggatgtcggaatggtgtcaggctcatcttcggacttcccttcactgtcctctgatttccaggacagcagctgctctgcgaaggccatagccagtgggaactccaggggcagggaatgtaacaccaggactgctccaggaggtggagacacccccagtttgatgtggaccctgtctgtggagaggaccacagaggggtactggtcagcggtggggggaggtgcaagcccagtgttggctggggacgcgtcccgcgggtaaccaggcggcctcgatgaggttcagctggccatttcgcttcactttgtggccgaggccatatacgagcacccgtgcccacggtgccttgtacagagaggagtctttgcggaatccagattgactttctttacaagacacaacaacaaaagctgccccggggaaattcacgtccatgttgactttggattcggaaattgggaactcttcggaggggaactgctctggtgctgtctgcaggaaagagcagatctgtttcgtcagctctaaaaggctctcctcgccctggtgcagggtccgggtgatggccacgttgagccactctctcactgtctgggagttgccctggtaaaagaggtccgtggcggagcagttcccataaggcgggttaccgcacctccgaaatcggaatca

SEQ ID NO: 349692 - DNA, 726 bp, Homo Sapiens
  misc_feature (216)..(255): n is a, c, g, or t
gggacgcagatgagtcctcggtaaaccgaggacccatgaaacagcagctgaagccagctccctgaatctgaccacagacactcctggggggcctgaaagcaacagctggacacccccttggtgctcgccttcggcctctcttggaactgcaccaccgaccaactccagacttgggagctttaaagagcaggatagctcttcctccccaggacttgnnnnnnnnnnnnnnnnnnnnnnnnnnnnnnnnnnnnnnnnaattgtggaacaaatgcttttccaacccatgagtgctaagagcctctggaagggagggcttcaggcccgaaggtctctctggctctaggacccccagtgctcacacatatcagaccaaggaacaagacccccaggaaggaaacagatttaaagcaagaccatggggtggaaggagaaaggggctagcactggatggagctggagggtcgtaggggagagatctccaactctctctgtgtccgtgtggagggctgcagagcctgcagggtgacctgcttccccaaaggccaacagcattggcctggccagaccaggtgaccttagatttggtgaacaacgtactatggaagccacatcactattgggcccccaggtctgatctgggttttgcctctgcccttggggaaatgctatcagaaattcgcccattttctttacagtcttttgtgtctgtcatttctctttcaaaag

SEQ ID NO: 349693 - DNA, 486 bp, Homo Sapiens
  misc_feature (113)..(113): n is a, c, g, or t
  misc_feature (341)..(341): n is a, c, g, or t
  misc_feature (387)..(412): n is a, c, g, or t
  misc_feature (433)..(433): n is a, c, g, or t
ttattaatataagaagctttcagtattagtgatgtcatctgtcactataggtcatacaatccattcttaaagtacttgttatttgtttttattattactgtttgtcttctccncagggttcagtcctcaaggggccatcctgtcccaccatgcagtgcccctagcttagagcctccctcaattccccctggccaccaccccccactctgtgcctgaccttgaggagtcttgtgtgcattgctgtgaattagctcacttggtgatatgtcctatattggctaaattgaaacctggaattgtggggcaatctattaataactgccttaaagtcagtaacttancccttagggaggctgggggaaaaggttaaattttgtattcaggggnnnnnnnnnnnnnnnnnnnnnnnnnnaaaaattgtttttggaggggntttatgctcaatccatgttctatttcagtgccaataaaatttaggaagactaa

SEQ ID NO: 349694 - DNA, 4011 bp, Homo Sapiens
ggctctttcctgggtggggtttgtgaagtcgtggcccgttagcaggaagcctaacagtcgccccgacgctagtgagggacccaatctgagtccccggccagccgaatccaagccgtgtgtactgcgtgctcagcactgcccgacagtcctagctaaacttcgccaactccgctgcctttgccgccaccatgcccaaaacgatcagtgtgcgtgtgaccaccatggatgcagagctggagtttgccatccagcccaacaccaccgggaagcagctatttgaccaggtggtgaaaactattggcttgagggaagtttggttctttggtctgcagtaccaggacactaaaggtttctccacctggctgaaactcaataagaaggtgactgcccaggatgtgcggaaggaaagccccctgctctttaagttccgtgccaagttctaccctgaggatgtgtccgaggaattgattcaggacatcactcagcgcctgttctttctgcaagtgaaagagggcattctcaatgatgatatttactgcccgcctgagaccgctgtgctgctggcctcgtatgctgtccagtctaagtatggcgacttcaataaggaagtgcataagtctggctacctggccggagacaagttgctcccgcagagagtcctggaacagcacaaactcaacaaggaccagtgggaggagcggatccaggtgtggcatgaggaacaccgtggcatgctcagggaggatgctgtcctggaatatctgaagattgctcaagatctggagatgtatggtgtgaactacttcagcatcaagaacaagaaaggctcagagctgtggctgggggtggatgccctgggtctcaacatctatgagcagaatgacagactaactcccaagataggcttcccctggagtgaaatcaggaacatctctttcaatgataagaaatttgtcatcaagcccattgacaaaaaagccccggacttcgtcttctatgctccccggctgcggattaacaagcggatcttggccttgtgcatggggaaccatgaactatacatgcgccgtcgcaagcctgataccattgaggtgcagcagatgaaggcacaggcccgggaggagaagcaccagaagcagatggagcgtgctatgctggaaaatgagaagaagaagcgtgaaatggcagagaaggagaaagagaagattgaacgggagaaggaggagctgatggagaggctgaagcagatcgaggaacagactaagaaggctcagcaagaactggaagaacagacccgtagggctctggaacttgagcaggaacggaagcgtgcccagagcgaggctgaaaagctggccaaggagcgtcaagaagctgaagaggccaaggaggccttgctgcaggcctcccgggaccagaaaaagactcaggaacagctggccttggaaatggcagagctgacagctcgaatctcccagctggagatggcccgacagaagaaggagagtgaggctgtggagtggcagcagaaggcccagatggtacaggaagacttggagaagacccgtgctgagctgaagactgccatgagtacacctcatgtggcagagcctgctgagaatgagcaggatgagcaggatgagaatggggcagaggctagtgctgacctacgggctgatgctatggccaaggaccgcagtgaggaggaacgtaccactgaggcagagaagaatgagcgtgtgcagaagcacctgaaggccctcacttcggagctggccaatgccagagatgagtccaagaagactgccaatgacatgatccatgctgagaacatgcgactgggccgagacaaatacaagaccctgcgccagatccggcagggcaacaccaagcagcgcattgacgaatttgagtctatgtaatgggcacccagcctctagggacccctcctccctttttccttgtccccacactcctacacctaactcacctaactcatactgtgctggagccactaactagagcagccctggagtcatgccaagcatttaatgtagccatgggaccaaacctagccccttagcccccacccacttccctgggcaaatgaatggctcactatggtgccaatggaacctcctttctcttctctgttccattgaatctgtatggctagaatatcctacttctccagcctagaggtactttccacttgattttgcaaatgcccttacacttactgttgtcctatgggagtcaagtgtggagtaggttggaagctagctcccctcctctcccctaccactgtcttcttcagggtcctgagatttacacggttggagtgttatgcggtctagggaatgagacaggacctaggatatcttctccaggatgtcaactgacctaaaatttgccctcccatcccgtttagagttatttaggctttgtaacgattgggggataaaaagatgttcagtcatttttgtttctacctcccagatcggatctgttgcaaactcagcctcaataagccttgtcgttgactttagggactcaatttctccccagggtggatgggggaaatggtgccttcaagaccttcaccaaacatactagaagggcattggccattctattgtggcaaggctgagtagaagatcctaccccaattccttgtaggagtataggccggtctaaagtgagctctatgggcagatctaccccttacttattattccagatctgcagtcacttcgtgggatctgcccctccctgcttcaatacccaaatcctctccagctataacagtagggatgagtacccaaaagctcagccagccccatcaggactcttgtgaaaagagaggatatgttcacacctagcgtcagtattttccctgctaggggttttaggtctcttcccctctcagagctacttgggccatagctcctgctccacagccatcccagccttggcatctagagcttgatgccagtaggctcaactagggagtgagtgcaaaaagctgagtatggtgagagaagcctgtgccctgatccaagtttactcaaccctctcaggtgaccaaaatccccttctcatcactcccctccaaagaggtgactgggccctgcctctgtttgacaaacctctaacccaggtcttgacaccagctgttctgtcccttggagctgtaaaccagagagctgctggggattctggcctagtcccttccacacccccaccccttgctctcaacccaggagcatccacctccttctctgtctcatgtgtgctcttcttctttctacagtattatgtactctactgatatctaaatattgatttctgccttccttgctaatgcaccattagaagatattagtcttggggcaggatgattttggcctcattactttaccacccccacacctggaaagcatatactatattacaaaatgacattttgccaaaattattaatataagaagctttcagtattagtgatgtcatctgtcactataggtcatacaatccattcttaaagtacttgttatttgtttttattattactgtttgtcttctccccagggttcagtcctcaaggggccatcctgtcccaccatgcagtgcccctagcttagagcctccctcaattccccctggccaccaccccccactctgtgcctgaccttgaggagtcttgtgtgcattgctgtgaattagctcacttggtgatatgtcctatattggctaaattgaaacctggaattgtggggcaatctattaatagctgccttaaagtcagtaacttacccttagggaggctgggggaaaaggttagattttgtattcaggggttttttgtgtacttttagggttttttaaaaaattgtttctggaggggtttatgctcaatccatgttctatttcagtgccaataaaatttaggaagacttcaataaggattaaccgactcaatgttggaataaagacataacaatgcatgtc

SEQ ID NO: 349695 - DNA, 428 bp, Homo Sapiens
gtgatgactgcttctgtggtggtagctttacgtgaggattcggctgtgactatgcctgaatcctcagcggctctctgttttacagctgcaagggacataacagctggtgtcaagacctgggttagaggtttgtcaaacagaggcaggtcccagtcacctctttggaggggagtgatgagaaggggattttggtcacctgagagggttgagtaaacttggatcagggcacaggcttctctcaccatactcagctttttgcactcactccctaggtgagcctactggcatcaagctctagatgccaaggctgggatggctgtggagcaggagctatggcccaaggagctctgagaggggaagagacctaaaacccctagcagggaaaatactgacgctaggtgtgaacatatcctctcttttcacaagag

SEQ ID NO: 349696 - DNA, 709 bp, Homo Sapiens
  misc_feature (36)..(36): n is a, c, g, or t
  misc_feature (175)..(220): n is a, c, g, or t
aattcggaacgaggagctccctgaatctgacccagnacactcctggggggcctgaaagcaacagctggacacccccttggtgctcgccttcggcctctcttggaactgcaccaccgaccaactccagacttgggagctttaaagagcaggatagctcttcctccccaggacttgnnnnnnnnnnnnnnnnnnnnnnnnnnnnnnnnnnnnnnnnnnnnnnggaacaaatgcttttccaacccatgagtgctaagagcctctggaagggagggcttcaggcccgaaggtctctctggctctaggacccccagtgctcacacaatcagaccaaggaacaagacccccaggaaggaaacagatttaagcaagaccatggggtggaaggagaaaggggctagcactggatggagctggagggtcgtaggggagagatctccaactctctctgtgtccgtgtggagggctgcagagcctgcagggtgacctgcttccccaaaggccaacagcattggcctggccagaccaggtgaccttagatttggtgaacaacgtactatggaagccacatcactattgggcccccaggtctgatctgggttttgcctctgcccttggggaaatgctatcagaaattcgccccattttctttacagtcttttgtgtctgtcatttctctttcaaaaaggcggtgttttttgttgttgttggg

SEQ ID NO: 349697 - DNA, 1925 bp, Homo Sapiens
  misc_feature (50)..(86): n is a, c, g, or t
aatgtatagactcatataggggaatcggagcttaaccgcggtggcggcgnnnnnnnnnnnnnnnnnnnnnnnnnnnnnnnnnnnnnatcaggccaaatcggccgagctcgaattcgtcgagagcggcctcttcaaaatttatcccctcccagaagacccagccatccccatgcccccaagacagttccaccagctggccgcccagggaccccaggagtgcttggtccgtatctacattgtccgagcatttggcctgcagcccaaggaccccaatggaaagtgtgatccttacatcaagatctccatagggaagaaatcagtgagtgaccaggataactacatcccctgcacgctggagcccgtatttggaaagatgttcgagctgacctgcactctgcctctggagaaggacctaaagatcactctctatgactatgacctcctctccaaggacgaaaagatcggtgagacggtcgtcgacctggagaacaggctgctgtccaagtttggggctcgctgtggactcccacagacctactgtgtctctggaccgaaccagtggcgggaccagctccgcccctcccagctcctccacctcttctgccagcagcatagagtcaaggcacctgtgtaccggacagaccgtgtaatgtttcaggataaagaatattccattgaagagatagaggctggcaggatcccaaacccacacctgggcccagtggaggagcgtctggctctgcatgtgcttcagcagcagggcctggtcccggagcacgtggagtcacggcccctctacagccccctgcagccagacatcgagcaggggaagctgcagatgtgggtcgacctatttccgaaggccctggggcggctggacctcccttcaacatcaccccacggagagccagaaggtttttcctgcgttgtattatctggaataccagagatgtgatcctggatgacctgagcctcacgggggagaagatgagcgacatttatgtgaaaggttggatgattggctttgaagaacacaagcaaaagacagacgtgcattatcgttccctgggaggtgaaggcaacttcaactggaggttcattttccccttcgactacctgccagctgagcaagtctgtaccattgccaagaaggatgccttctggaggctggacaagactgagagcaaaatcccagcacgagtggtgttccagatctgggacaatgacaagttctcctttgatgattttctgggctccctgcagctcgatctcaaccgcatgcccaagccagccaagacagccaagaagtgctccttggaccagctggatgatgctttccacccagaatggtttgtgtccctttttgagcagaaaacagtgaagggctggtggccctgtgtagcagaagagggtgagaagaaaatactggcgggcaagctggaaatgaccttggagattgtagcagagagtgagcatgaggagcggcctgctggccagggccgggatgagcccaacatgaaccctaagcttgaggacccaaggcgccccgacacctccttcctgtggtttacctccccatacaagaccatgaagttcatcctgtggcggcgtttccggtgggccatcatcctcttcatcatcctcttcatcctgctgctgttcctggccatcttcatctacgccttcccgaactatgctgccatgaagctggtgaagcccttcagctgaggactctcctgccctgtagaaggggccgtggggtcccctccagcatgtgactggcctgcctcctccgcccagctcggcgagctcctccagacctcctaggcctgattgtcctgccagggtgggcagacagacagatggaccggcccacactcccagagttgctaacatggagctctgagatcaccccacttccatca

SEQ ID NO: 349698 - DNA, 863 bp, Homo Sapiens
  misc_feature (12)..(12): n is a, c, g, or t
ccataagattcnctgttttcccagttctgatcatagaagccatttcagtcttgaacttgcagtagtaaagaagctgtgaaaggcacaacttgtttgactgagaggccacaggtgcactgaagtgggattcaacacgcatgactcagcatcaaactgttggaccaatcagatcagcttctagtacccccacacacgctcaccccacgtgttcctttaagtatctataatcctatatggatgttttataaacttgctgtctcacattaaaaaataagtgcatcaagtatctttgtacattcaagtcacttcctaaggcaaattgtctaccatatgtactcccaactgctttggtatttgcttcagttaattggggtggacttgggtgttgctgcatgcaggttaatcgactcagagtggactaagtgggtggacaaatgctgggagcatgccttagatcaatctacttgtgtgtttagagtctgagagttctgaatggggcccaaaccacttgcatggccagtctacactcactacattatgtcagtgtgcagccttcaaactgaaggagcttaattaagatgtgaaaatatcacatgccctcataacaagtgttgttctttttactttcttctagccaacttgttttagaaaattaagactctttttgatgactcagactgacaaaaatggaaaacttggcctatgtagactaaagaatgcctactgcctgagaaaatgcagacctaattgttggcttattttctcctccttaccccaccctgctctctctttttctctccgggtatctcaccagaactctctgtcattacatctccttctcttgcattccttttctttctcat

SEQ ID NO: 349699 - DNA, 1021 bp, Homo Sapiens
acaaggtcggctgcaacatgctggacaccacggacatggtagaatgtctgaagaacaagaactacaaggagctcatccagcagaccatcaccccggccacctaccacatagcctttgggccggtgatcgacggcgacgtcatcccagacgacccccagatcctgatggagcaaggcgagttcctcaactacgacatcatgctgggcgtcaaccaaggggaaggcctgaagttcgtggacggcatcgtggataacgaggacggtgtgacgcccaacgactttgacttctccgtgtccaacttcgtggacaacctttacggctaccctgaagggaaagacactttgcgggagactatcaagttcatgtacacagactgggccgataaggaaaacccggagacgcggcggaaaaccctggtggctctctttactgaccaccagtggggtggcccccgccgtggccaccgccgacctgcacgcgcagtacggctcccccacctacttctatgccttctatcatcactgccaaagcgaaatgaagcccagctgggcagattcggcccatggtgatgaggtcccctatgtcttcggcatccccatgatcggtcccaccgagctcttcagttgtaacttttccaagaacgacgtcatgctcagcgccgtggtcatgacctactggacgaacttcgccaaaactgggtcaataacgactggagtgtgatggagaggaagagacagtacacggttgaaatttttcctgatgaaagctgtgtggttcctaagaattcaagactatccagaactataggatggtgtttataggacacaacagctgacttgaatggactcccactggctaaagatgacacactttgaccgtcagtaagaatgataatttaaatgcatttcaatacatcaagtttgataaaagacacgagttcccaatgatgttaaagatatgcacattgattgtctttagaaaatagttgggaatcatttcattactttgtgaactgaaaaaa

SEQ ID NO: 349700 - DNA, 468 bp, Homo Sapiens
agacttctgagtttctcatacatacattggttggttttcctcccaattcagaaagggtaactgggtaggtttcacatgtatctttccaacatgtcacgaaaggctggattaaagatgtgagacgcgtgatattcatcctaatgcagctaagtgtatggacaagggccacttggcctttcttcagaagatgaggttcaacagaaggagaagaacagctgtgctagtgtcagcactggccatgcagaagccagacgtaccctgcatgttactgaggtcactaatgggacaggagaaagaacctgacacggttgctgcgctcccatgggactaagttgtctctattaccttccctcttctctccagccacctgcaaacatctcaagtcagtcagccttcagttttgaatgtttacgtttcagatacccttgaaatagaaatgcattgccttttctgggagcggggtccacc

SEQ ID NO: 349701 - DNA, 1228 bp, Homo Sapiens
ttgctgttgtaacttactcatgaaacagtatacagacaccttgtacttttcctcaactgtaagagcagactttcaatgttagcaattaagctgttgtcaaacaatcagtcatgagctttgttaattttcaatgttttcccagcctataaaaaaaggaaggtacacgttgtccttttaaaggttgtgaggtagattggagtgagtagacaggatattgcattaaaaattgaaagctcaatctgattattgtcaggaacccccagtgtgacctcacacataggatgtgggacctttgagccgatgtgcactggccaccaccagggttgggggcgccacagctgcgagcccggcccctgctgttctcagcagccacttcccaggctgcctcactttatgccatgactgaccttaatattgggatattgttatgcaatttttatcctgtttagactgttaaaagcaggtttctgtacttaagagtcccccagacctcctgtgaggtgaggctctgttgcagtgtcgtaggctgtgtgtgtctgtaaagaaagaatgcacatatgtagacgattaagtgtatattataagctatatgctgaaaatggcttccatagccatgagaacatcttaaaactatgtgtaaatatattaaggaaagtatagctttgtaatttaaattggagcttttagcttgtttcatggaactatacaacttgtgggtaactcacatgaccaaacaaaccaaagtgcctgtgacggggcgggtggcgtctacccaccctcccttctagcagattcttattttgtttgaatttataaacaaggctggtggctgtctacccaccctcccttctagcagattttgattttgtttcaatttataacttacactttgaaccatgggtttacttataatggagtctgtagcttcacagcatatttcatgtaatcataaagaccagtatattccctcctgctgaatgacatgcgactgtaaagcctctttataaaccatttccaatgttagtatataggattatttgggaagcatatcaatacctttatagacacatatgaacatgtatgcacacaaaacatttaactatggtatttatggaagacaggtaacaacattaaatctagttgctttcccttagtattagatttgttgagggttttttaaaaatcaggtctgttgaaagtcttctgtcataatctataaagcagcagc

SEQ ID NO: 349702 - DNA, 1457 bp, Homo Sapiens
  misc_feature (1250)..(1263): n is a, c, g, or t
ctggaccggtccggaattcttgcgatcttacactttgaaccatgggtttacttataatggagtctgtagcttcacagcatatttcatgtaatcataaagaccagtatattccctcctgctgaatgacatgcgactgtaaagcctctttataaaccatttccaatgttagtatataggattatttgggaagcgtatcaatacctttatagacaaatacgaacatgtatgcacacaaaacatttaactatggtatttatggaagacaggtaacaacattaaatctagttgctttcccttagtattagatttgttgagggttttttaaaaatcaggtctgttgaaagtcttctgtcataatctataaagcagcagcactcatgggaaattgtaggcatgccagtaatttttaccaacatcccatacatctgagttctgcagtccagtgtgtaatccgctccatgtgtattttgcttaatggaatgctttatttaagcacttaggcagagtagacacaattaaaggtacaaagcccagaggaagtggtagagcagcaccgtgcctgccctgaggcagtggagtcagtagcgctgtccccagggccttgagtgcctggaggtgcttggcctcccagtagctgcctccattctcttttaaaaaaagggggtgattctgaggcactgaagtacctcccagatgtggaggagtgaagccaccatcgaagccacacctcagcactccaggatcccagcgacgtcagacactcttgagttgtcaaaacgttaattttcaggtttaaataatcagtttatctaaagaaaagggaattttaaacttttctaccttgagccaagccaatgaagggaaaattaattaacttagtaaatttgaagtgcagctctgttagctcgtacatgtgggttcttatcctgatcctgtgccttaaagtaggaaggtgtttccaagttcagattaaaatagaagcacccaatcctattaggtttctttgaatcccctcatggcctgcctggtttttgctcagcctgtcttcagcttgaggagctgggaagctctggtggatgctatgaactcacttgctgaagagcagcgttcaggtgcatccccagccagggcacgtggctccctcagccatgaattcacttctcttcaggaggtttggcttggcatgaaaatacttcattcagagtatgggcaaatgcttctggaaaacccttccctgaagagagagaacnnnnnnnnnnnnnncggtgatcacaccctcccatccttcctgcctcctgccccaaaccccgggttcctgggtctggaagggccttctctccaagctgggagctcctgggcccccaccattcactttttgtccttgctgctggcaaacagtaaagaaactcactttccctgtggcacgttatgcttcagaattaaaacaatgaagatta

SEQ ID NO: 349703 - DNA, 573 bp, Homo Sapiens
  misc_feature (453)..(453): n is a, c, g, or t
  misc_feature (541)..(541): n is a, c, g, or t
cacttgaccctgggctagccaaaagcccaagggccaaacctagcatttccactgctaaggtttccagatgaccctcaggttcttccgcgttggttagagagggctacgcatcttctactgctcagccacagtctgtagccagcttagagcttagaagacattgcagtctggatgcccttctgcgagatgaaaactcagatgtgtagtggatcatatacacaaaggcagcacaaagaaatatctagaaattaccctaagtacactgaaaagctcacatagtctcagtaacctgatgagaaatgatggcagtgtgtgggcacatgtgccaaaaggagaaataaaaatcaccagctcaagtgctattttctacttgaggaagagacagaaaagaaatgtgtcgaattagagcagtactctctgacgttttataatgagttccatttccaccctggnaattgctattttatagtgtatgtgagatatttcaaaaataatgttctatcatatctggatcaaagacagataactgtattatattttncatctagctataaaactttaatcttactctta

SEQ ID NO: 349704 - DNA, 896 bp, Homo Sapiens
ttccggggtgacagtgtcccattccggcgatgggaaatcataggcgccggctttgatctgctggtacaggcggtgctggtcctcatcccagaacggggggtacccaaccagcaggatgtacaggatgaccccacaagcccacaggtccacaggcttcccgtacgggtccttccgcagcacttctggggagagatatccaggagtccctgcaaacccaaaccatgcctgctgctccccctccacctctatggccaggccaaagtctgccagcttcactgcggcacccttgagcttggaggccagcaacagattctcaggcttcaggtcccggtgcaccacccccatctggtggcagtgcagcacagcctccaggatctgctggatacagtgactggcatccgcctcactgtaatactcccgggccacgatatcttcaaacagttccccaccagtgaccaggtcgaagatcaggtagtggtgtccctcctctgagatgctgtcatgtagtcggacgatgttggggtgcttcagcaggcggcagatgcgggcttcacgctccagcttctgatggtctctggctgacagcttctttgtgttgatgatcttggcagcatactcctggccagccagcaccttcacacaccttcgcaccaccgagaaggctcccttgcccaattcctcgaagagctggtactcttccgtgaagcgggtgcaggtgatggtggccatcctggcgctgggcaggcaggtgaggcttgggactgggggaccaggactgaggcgctgctgctctgctcccgaacctagggaccacttgcctgcccgtgctgccgagtgcaaacagagaaccggtttgactgacgagcccggggcttctgagcagggcacagtccgct

SEQ ID NO: 349705 - DNA, 846 bp, Homo Sapiens
ggtgcccactggaggatataccgccccaccactgggcccctcctgctgctcactgcccttcagctctgtgaccaggtgagtgcttatggcttcatcactgagggccatgagcgcttttctgatcactactatgatacatcatggaagcggctgatcttttacataaaccatgacttcaagctggagagagaagtctggaagcggctacacgatgaagggataatccggctgtaccagcgtcctggtcccggaactgccaaagccaagaactgaccggggccaggggctgccatggtctccttgcctgctccaaggcacaggatacagtgggaatcttgagactctttggccatttcccatggctcagactaagctccaagcccttcaggagttccaagggaacacttgaaccatggacaagactctctcaagatggcaaatggctaattgaggttctgaagttcttcagtacattgctgtaggtcctgaggccagggatttttaattaaatggggtgatgggtggccaataccacaattcctgctgaaaaacactcttccagtccaaaagcttcttgatacagaaaaaagagcctggatttacagaaacatatagatctggtttgaattccagatcgagtttacagttgtgaaatcttgaaggtattacttaacttcactacagattgtctagaagacctttctaggagttatctgattctagaagggtctatacttgtccttgtctttaagctatttgacaactctacgtgttgtagaaaactgataataatacaaatgattgttgtccatggaaaggcaaataaattttctacagtgaagatgt

SEQ ID NO: 349706 - DNA, 1249 bp, Homo Sapiens
  misc_feature (98)..(149): n is a, c, g, or t
  misc_feature (152)..(152): n is a, c, g, or t
  misc_feature (157)..(157): n is a, c, g, or t
  misc_feature (233)..(233): n is a, c, g, or t
  misc_feature (242)..(242): n is a, c, g, or t
  misc_feature (1168)..(1168): n is a, c, g, or t
cccgggatcctggagctgtagcttaatcatgggttcaatgactttacagaaaaatggatagaaaaattcttcaactcctttctttggacccagatggnnnnnnnnnnnnnnnnnnnnnnnnnnnnnnnnnnnnnnnnnnnnnnnnnnnnggntatcnatagtttagctgaaaacaaaatcaaagcagtaaagtctgtaactttctttttgcagcttaaacaacagaatttgcngcccccccncccctttcctgcaatttaattccttacagattttgccatggggtgcggacttagaaagctagaagaccctgatgaaagcagccctggaaaaatattttctaccctgaagagaccgcaagtggaaacgaaagacagaatttgcttacgaatatgtattgctggattttactctacaagcttcatcaaacccagaagtcatcaagataaattcaattctggatatagtaacaaaagtggaaaactattatcttaaaggataaattgtcggggctattcatcctgttatacaacctgtggggcagcgaaaacacctacctgcaagttacctatacagagtggtgctattgcgcttgaaattaagcccaaagaattcggcagcacccagtggacaaagacgcccaaggctcgtgattgaggaatgtcccctaacttctgaggcacaaacaaatgacgcagcaaaagaactgatagaaaagattaatgtcgctgctaaaagaggaatgaaatttgttggattcatatcacagcattattctccatctaaattctgcaatggaaccaaccatgatggagatatagaatcgatgctacatgtgagacacggttcagatgaaaactgtagaagttggaatgaagggacgttaagtgggcagtcatctgaaagcggaattgaggaagaacttcatcatgaaagtggacagtatcaaatggaacaaaatggcagccctacttcctctaaatcaagaaagggagaagcctcagataacaaattgtatacagtcttcaatgcttttgatgatgattcaacctcctgcgcctatcaggaaggcatcctgtcaatgaaagtaacaagaaaaggatcagtcattagtacacttgatgctgattggctgggagttaactaccttttatataaacagggctgngctttaattgatctttggtatctgggaaacatctaagggggacatttgcctaattttgggaagattttttatctatgaaga

SEQ ID NO: 349707 - DNA, 991 bp, Homo Sapiens
  misc_feature (398)..(452): n is a, c, g, or t
  misc_feature (589)..(589): n is a, c, g, or t
  misc_feature (668)..(668): n is a, c, g, or t
  misc_feature (764)..(764): n is a, c, g, or t
  misc_feature (773)..(773): n is a, c, g, or t
  misc_feature (782)..(782): n is a, c, g, or t
  misc_feature (786)..(786): n is a, c, g, or t
  misc_feature (801)..(801): n is a, c, g, or t
  misc_feature (853)..(853): n is a, c, g, or t
  misc_feature (855)..(855): n is a, c, g, or t
  misc_feature (866)..(866): n is a, c, g, or t
  misc_feature (870)..(870): n is a, c, g, or t
  misc_feature (878)..(878): n is a, c, g, or t
  misc_feature (889)..(889): n is a, c, g, or t
  misc_feature (894)..(894): n is a, c, g, or t
  misc_feature (913)..(913): n is a, c, g, or t
  misc_feature (919)..(919): n is a, c, g, or t
  misc_feature (921)..(923): n is a, c, g, or t
  misc_feature (934)..(935): n is a, c, g, or t
  misc_feature (938)..(941): n is a, c, g, or t
  misc_feature (945)..(945): n is a, c, g, or t
  misc_feature (949)..(950): n is a, c, g, or t
  misc_feature (952)..(953): n is a, c, g, or t
  misc_feature (955)..(955): n is a, c, g, or t
  misc_feature (958)..(958): n is a, c, g, or t
  misc_feature (965)..(965): n is a, c, g, or t
  misc_feature (973)..(973): n is a, c, g, or t
  misc_feature (982)..(983): n is a, c, g, or t
gtagtagttgagaggaaggagggtaggcgcaggacagagaggagagggaaaacagaaaaaaattgtgtgccactatgtctgaatatatcttctacttgtagataattacatccaagttgcccttttgcctttttatttccgtttttggacacctctttttatcatccagccaactggaatagacaaagcaccgctggtgccctgagcgacagaactctggtagggggctggctgtaaattgacgtggcatggaaattctccgctaagttgtagcagcttgcatgtttctctaagatcaagcccagcctcctggagctgtagcttaatcatgggttcaatgactttacagaaaaatggatagaaaaattcttcaactcctttctttggacccagatggnnnnnnnnnnnnnnnnnnnnnnnnnnnnnnnnnnnnnnnnnnnnnnnnnnnnnnnggttatctatagtttagctgaaaacaaaatcaaagcagttaagtctgtaactttctttttgcagcttaaacaacagaatttgctgctctccctcccctttcctgcaatttaattccttacagattttgccatggggngcggacttagaaagctagaagaccctgatgatagcagccctggaaaaatattttctaccctgaagagaccgcaagtggnaacaaagacagaatttgcttacgaatatgtattgctggattttactctacaagcttcatcaaacccagaagtcatcaagataaattcaattctggntatagtaanaaaagtggnaaantattatcttaaaggntatattgtcggggctattcatcctgttatacaacctgtggggcagcgaaaananctacctgcaanttanctataaanagtgggtgctnttgcnctttaaattaagcccaaanaattcngnnncacccagtggnnaannnngccnaggnncnngnttnggggatntccccaanttttggggnnaaaaaatg

SEQ ID NO: 349708 - DNA, 1138 bp, Homo Sapiens
tggtacggtccggaagtttcgggatatgtcgaccacgcgtcgccacgcgtcgcggcagctgcagcgggtcgcacggctccggcccatctcggggggcgggcgggggaggcgaggtgcgcgagccgagtccggggcacgatgtccgacgcgggcggcggaaagaagccgcctgtggacccgcaggcaggacccggtccggggccggggcgcgcagctggggaaaggggcctgtcggggtccttccccctggtcctgaagaagctgatggagaaccccccgcgcgaggcgcgcctcgataaggaaaaggggaaggaaaagctggaggaggacgaggccgcagccgccagcaccatggctgtctcagcctccctcatgccacccatctgggacaagaccatcccatatgatggcgaatctttccacctggagtacatggacctggatgagttcctgctggagaatggcatccccgccagccccacccacctggcccacaacctgctgctgcctgtagcagagctagaagggaaggagtctgccagctcttccacagcatccccaccatcctcctccactgccatctttcagccctctgaaaccgtgtccagcacagaatcttccctggagaaggagagggagactcccagtcccatcgaccccaattgtgtggaagtggatgtgaacttcaatccggaccccgccgacctggtgctctccagtgtgccaggcggggagctcttcaaccctcggaagcacaagtttgctgaggaggacctgaagccccagcctatgatcaaaaaggccaagaaggtctttgtccccgacgagcagaaggatgaaaagtactggacaagacgcaagaagaacaacgtggcagctaaacggtcacgggatgcccggcgcctgaaagagaatcagatcaccatccgggcagccttcctggagaaggagaacacagccctgcggacggaggtggccgagctacgcaaggaggtgggcaagtgcaagaccatcgtgtccaagtatgagaccaaatacgggcccttgtaacccgtgccccccgcccgggcggcatactgcctgcacctcagacctctgcctgggggctccctgtaacccctcacacgcgtggagactt

SEQ ID NO: 349709 - DNA, 1254 bp, Homo Sapiens
ctggaccggtccggaattccttccataccagaagcggctagtggcggctgcctgcgtccccaaccccctccgcgcagcgctcgcgacacgcgtgccaggagtgggagcgagcggcggggccagctgcgttctgagcctgggcgcagctgccatctgctctgggaagcaccagggtgtccccgccgccctcagctcgaagtcagccaccatggaggcgcaggcacaaggtttgttggagactgaaccgttgcaaggaacagacgaagatgcagtagccagtgctgacttctctagcatgctctctgaggaggaaaaggaagagttaaaagcagagttagttcagctagaagacgaaattacaacactacgacaagttttgtcagcgaaagaaaggcatctagttgagataaaacaaaaactcggcatgaacctgatgaatgaattaaaacagaacttcagcaaaagctggcatgacatgcagactaccactgcctacaagaaaacacatgaaaccctgagtcacgcagggcaaaaggcaactgcagctttcagcaacgttggaacggccatcagcaagaagttcggagacatgagacgaaagtaggcggtacgaaccctaatggaggcagttttgaggaggtcctcagctccacggcccatgccagtgcccagagcttggcaggaggctcccggcggaccaaggaggaggagctgcagtgctaagtccagccagcgtgcagctgcatccagaaaccggccactacccagcccatctctgcctgtgcttatccagataagaagaccaaaatcccgctgggaaaaacccaggccttgacattgttattcaaatggcccctccagaaagtttaatgatttccatttgtatttgtgttgatgatggaccacttgaccatcacatttcagtattcatagatgactgtcacattttaaaatgttcccacttgagcaggtacacaactggtcataattcctgtctgtgtaattcgatgtatatttttccaaacatgtagctattgtttgctttgatttttgcttggcctcctttatgatgtgcatgtccttgaaggctgaatgaacagtccctttcagttcagcagatcaacaggatggagctcttcaatgactgtctccagcaataggatgatttactataaatttcatccaactacttgtgatctctctcacctacatcaattatgtatgttaatttcagcaattaaaagaattgatttt

SEQ ID NO: 349710 - DNA, 1126 bp, Homo Sapiens
gtaaccagaagcggctagtggcggctgcctgcgtccccaaccccctccgcgcagcgctcggcgacacgcgtgccaggagtgggagcgagcggcggggccagctgcgttctgagcctgggcgcagctgccatctgctctgggaagcaccagggtgtccccgccgccctcagctcgaagtcagccaccatggaggcgcaggcacaaggtttgttggagactgaaccgttgcaaggaacagacgaagatgcagtagccagtgctgacttctctagcatgctctctgaggaggaaaaggaagagttaaaagcagagttagttcagctagaagacgaaattacaacactacgacaagttttgtcagcgaaagaaaggcatctagttgagataaaacaaaaactcggcatgaacctgatgaatgaattaaaacagaacttcagcaaaagctggcatgacatgcagactaccactgcctacaagaaaacacatgaaaccctgagtcacgcagggcaaaaggcaactgcagctttcagcaacgttggaacggccatcagcaagaagttcggagacatgaggtctcactccatcggttactccattcgccattccataagtatgcctgctatgaggaattctcctactttcaaatcatttgaggagagggttgagacaactgtcacaagcctcaagacgaaagtaggcggtacgaaccctaatggaggcagttttgaggaggtcctcagctccacggcccatgccagtgcccagagcttggcaggaggctcccggcggaccaaggaggaggagctgcagtgctaagtccagccagcgtgcagctgcatccagaaaccggccactacccagcccatctctgcctgtgcttatccagataagaagaccaaaatcccgctgggaaaaacccaggccttgacattgttattcaaatggccccctccagaaagtttaatgatttccattttgtatttgtgttgatgatggaccacttgaccatcacatttcagtattcatagatgactgtcacattttaaacatgttcccacttgagcaggtacacaactggtcataattcctgtctgtgtaattcgatgtatatttttccaaacatgta

SEQ ID NO: 349711 - DNA, 1057 bp, Homo Sapiens
  misc_feature (14)..(14): n is a, c, g, or t
  misc_feature (70)..(102): n is a, c, g, or t
agaactttaatagnaactcaattattgaggcgcccatgcgggatttcaactggcgggtgtgcggcgcatnnnnnnnnnnnnnnnnnnnnnnnnnnnnnnnnnatcaggccaaatcggccgagctcgaattcgtcgagagcggagcaaaggggactcggccgccatgttaggagtactgggacgattccgcggagccgggcagaggttttaggggaatgattaacaaaggcgtccgaagaaatcgttgttggaaggtgaccaaggtggaaagagacgttgctttggccctgcaagtaagaagagagagggaatagcctgaaggagtaacactaaatttaaaatgacacttttttaccaaccagcgaaagcagatgttcaaaggggatattggccagagtctgtcacactaagatgagaaatgtcctttcttcctgaaggtgtctgatgtgtaaaaatatgatatactttgtgctgtttcctcccttcccttttgcatattattctgaaacaacattaactagttactttgcgtcattgaaggtatgcacttcccctctatgttaggagtgaataaaattaaaaatagatccttataacaaagaaaggcagatagaatgattaaaaatgaccaaaacatgttagaaacagtctctcaggtgtatgcagatggtaattacaaaaatactttttcaaaaaatgatcttctgtgtcatgtttctgggaacaagtcaagatgaatgagtttgatttttaagcagaagtagtatgtgttggtgtcatccatgaatacaacaatgaaaaaggctcaaagttgttgttattcagaactttctttaagtaatggtggtaagtacaggaaaaggagcaatgtctaccattttctttctaccttcgatttaactattgtaatgttgtaagcttaacagagacttacacttaggcttaatttcaagctcttcaatcatttttcccggttggtgattcaggtgtattttcatgtcttatgtaaacttatcatgagtgttgttgatttataatatatttctttatgtaagcc

SEQ ID NO: 349712 - DNA, 1031 bp, Homo Sapiens
ccctggcttccgcaccctcgtcacccgcatctccaacgacctcgagctctgagccaccacggtcccaggcccttactcttcctctcccttgtcgccttcacttctacaggaggggaaggggccaggaggggattctccctttatcatcacctcagtttccctgaattatatttgggggcaaagattgtcccctctgctgttctctggggccgctcagcacagaagaaggatgagggggctcagcggggggagctggcaccttcctggagcctccagccagtcctgtcctccctcgccctaccaagagggcacctgaggagactttggggacagggcaggggcagggagggaaactgaggaaatcttccattcctcccaacagctcaaaattaggccttgggcaggggcagggagagctgctgagcctaaagactggagaatctgggggactgggagtgggggtcagagaggcagattccttcccctcccgtcccctcacgctcaaacccccacttcctgccccaggctggcgcggggcactttgtacaaatccttgtaaataccccacaccctcccctctgcaaaggtctcttgaggagctgccgctgtcacctacggtttttaagttattacaccccgaccctcctcctgtcagccccctcacctgcagcctgttgcccaataaatttaggagagtccccccctccccaatgctgaccctaggattttccttccctgccctcacctgcaaatgagttaaagaagaggcgtgggaatccaggcagtggtttttcctttcggagcctcggttttctcatctgcagaatgggagcggtgggggtgggaaggtaaggatggtcgtggaagaaggcaggatggaactcggcctcatccccgaggccccagttcctatatcgggccccccattcatccactcacactcccagccaccatgttacactggactctaagccacttcttactccagtagtaaatttattcaataaacaatcattgacccataaaaaaaa

SEQ ID NO: 349713 - DNA, 1796 bp, Homo Sapiens
ctttcctgtcagcagcagttctgtgaatgcatcttaggtataaaaatgcaatacagatttttatattttggtgtggacatggctcattttgttttaccagttatttgcaagcaaaatgtaatttaatgtatagatgatttctaatgtctcctgacaaactgtaaatactgcatttcttttgcgtatataattgcttacagcttttctcatttgatatatagcattgtacatatgacaagtcttttgcaaaactgtgtgatctttgtgaaagtagtacagtatatgacctttaatttcttttttattttaaatatactgtcacactgaagcactggttgggcattttaattcatgttaataaatcacaattatgtcagttttaccagattgtcctgtacaacttctaagatcgggatctgtgtgtttctacagaagttctagttttcaaatatagattggtaaagagcgcttcaatgtgttctttagccgactacttacctcagcaacaggaggcagacaagggggctgttcctgtggtggttttctgtttgcatttttttgcaggagcccataggaaactactgaaatgattgtgctgggtaaattaaggatctggcatcatacaaaatgaagccagaccactaatgcattacagtagttcttgaatacaaggtacaacaactgtttgaaaatatgggtagtttgcccaaaacaggaaaatttgtcttgggtgtaaaaactaaagaaaaaaggcattattcctagaatctctcagtgaaatgaaaatggcctcttaagtgaacgtttttattgctaaaatataaaatgctagttagttattaattattaatcttcaaaaaattaaaaatttcccagcctttgtcttctacctctgaggattcagtaagtacatccaataataatgatactgttttatcaatcaacatatttttcatcatccaattacctgacataatttggcacaggatacaaattctgtgcatcagagaaagtaaacactaaaatgactgcgtgacctcattcagtcatgtttttacactttgaacctctatttatttccttttgaaaattagctaatgatggtacattaacgcagctcacttagggctcaatcctaatcacagcttcaaattttagaagaacatataggccaagtttgccatcctcaatttgtccaacaaaattatatttatggtatttagtaaagaaacatttgtctgagaagaaatggttttacatcatctatcctgatagtttcaaacagaataaaggtaactagcatgtgaaataaaaatattcttcttaaaaggtttgtccttctaagcattttaaattcttcactggcttgaaatgtgcctactacagaaatatgcatacagaagcttttgtgtgaactgcagaatcttatacattttgattccttgatgaagtatatactctaaaatacagtcttctaccaaaatttcattcaagttatttaaaagggggagaaaaaaggagaatttaggaaataacctgaactatggatagaaactgaagaagttctctactccaatggaaagtttccttactttatcgtggtaactagttatgtatggtccaggtatgggaagaagcaagttagtaaatcggttttcacctaagaagtttatgactctgaagatcttatatccaccttttctctgcctttgggcagttctgtctgccaacttctagatagccagctcctgtatctgctataaacacatatgtgatccactgcttgtcattttcca

SEQ ID NO: 349714 - DNA, 888 bp, Homo Sapiens
  misc_feature (121)..(288): n is a, c, g, or t
  misc_feature (298)..(310): n is a, c, g, or t
  misc_feature (420)..(478): n is a, c, g, or t
  misc_feature (580)..(595): n is a, c, g, or t
  misc_feature (692)..(768): n is a, c, g, or t
tgttttgctttttgttaaaacatgtctatagagttggcagttaatgctgaatttgtcaaataccccttccaaaattatacttgtatttaaaaaataaatggatctacctaatttctattgnnnnnnnnnnnnnnnnnnnnnnnnnnnnnnnnnnnnnnnnnnnnnnnnnnnnnnnnnnnnnnnnnnnnnnnnnnnnnnnnnnnnnnnnnnnnnnnnnnnnnnnnnnnnnnnnnnnnnnnnnnnnnnnnnnnnnnnnnnnnnnnnnnnnnnnnnnnnnnnnnnnnnnnncggggggggnnnnnnnnnnnnnaacaaaaaaaccgcccgaaaacaccaaccgctcgggggcgaccccccccgggaagaaaaaaagccacggagcccgacacctatccaccaaaaaaccccaggggaacaccnnnnnnnnnnnnnnnnnnnnnnnnnnnnnnnnnnnnnnnnnnnnnnnnnnnnnnnnnnntttctttagaaaacattcccccagacctgggagggtgttgccccacacgggggaaccctaacccgagacccgccccggggggatctttaaaaaccattaagnnnnnnnnnnnnnnnntttatttgcccctatgggctgatgaattgtccccccaaaaaacactcccccgcggggtggaacagacttttacacaaccggggcggcgaaatactcnnnnnnnnnnnnnnnnnnnnnnnnnnnnnnnnnnnnnnnnnnnnnnnnnnnnnnnnnnnnnnnnnnnnnnnnnnnnnagtggtgggaaaaacaaagcctactcttttgtgcccgcgacaaaataatttttttgggccgggtggcacccctcccccccacaattgtgtgtttaagtaacaccaataattttttcttct

SEQ ID NO: 349715 - DNA, 1214 bp, Homo Sapiens
  misc_feature (610)..(624): n is a, c, g, or t
  misc_feature (722)..(735): n is a, c, g, or t
cagctgcggaaattcacagaatggtttttcaccaccatcgacaaaaaatcttagccaatccgcacctcatcaagggaccactgggaaatgccccttgtccctttgaagtcacaaacatgtggtttttctgtgtgctttcaaccaatcgtagatgtttttgctgttccattctgtgtagcaccattcaccacagcaggatagggagcctcgactctttctcggtaaccacggcagagagcagcgccgatgtgaagatgaatgaatgtaactcctggtgtgaagatgaatgtaaaccctggcgacagttgagacctttttcttttagactctgctaaaacagtgctctggcttgggcttacctcaagagggaagatagttgagttttatttcctgtatatcaggtgacctggtagagatgtaaagcaatttaccatagtttgggctttagtattgtaaaataaacatgagaacaaataatcagacatatactttaatgttaaaggtgctctatttttttggatgtacagtagttttatttccacagccacattaccatagcaataagaaaggaggcatagtacatagttggaaaagctttgtggggggattnnnnnnnnnnnnnnngcactgttgtgtttaacactagttcagatgcagttaccttagagacttatttatttgcaggaacaaatggtgcctgaatattaacagtgttctgattnnnnnnnnnnnnnngatacatatgccttgtaaatggctcaccgagtggtcagtagtcacttcaactcttagttcacttttgtatagttgctctgctggaaagaaatgagagtgaatctgcttactcactagaacttccctgtgtgctgtgagccagcggaaccacttgtacaatgccagatttgtttatctttgtacagaagctttgatgaagtgtcttgtatttaacacccttatttaagcttatttaaccttaaattgttaattttataaaatttggtttggcctgcactacgatgagggatggaggtagctgcaggctcagaagagactgagcttgcacagatcagaccgagaagcagggtgagagattctaacgactggatgctgctagtaacacattgtttgtattgctttaccatttttaactgttagatttgagatgaacatacattttgcttttttaataaatgtttaaaagaagtccacataag

SEQ ID NO: 349716 - DNA, 973 bp, Homo Sapiens
cccctccctcctgtctgggatgatcctagaaaagagggaaatagaaacatcaaagttgggtcgaaagtttccagtactgatgctggctttggccagcatcgcctggccgatgtcaaaccccacgtccctcgggtgtagtcaggcccaagggcccgcaatataaattaaaaaattaaatgattcctacccattgttccacaagtggagactctgcactttggatctcaaattgtgcacatactgaggtgacaactggtctctgtctaaagtatccagactcaggacaaagaggcacgcctggctggggtccgaggtgtagaacctggagccctcgatggccgctagaatgttttggtaactttcggcgattttctcccctttttgctgtgggtatacgtagactttgaagccgtttttcttgcaaagggtgaaatcgaagcaggactccatgcggcacttcttgcctttgtagatgctggagttggcatctcgcttctgccggggggaaatgtgcacgctggaatcctcgttttccaattgatcccaaggaacgaaggggcgcagagcgtccgggaagcggggccagaaatgatccggactggggtggtgcaagccattcctaccgctgtgttcttctctccggctgtggctcctcgatgccctaaactgcaagcctccgaaataaaacaaaagggcgagacaagagccagctgagagcaggatgaaatagcgttttttggcctgcatgtgtcctgcctgggtcaagaggattgtaaataaacacaagaatcacccaagtttcccaatcaacactttcagctccagtccgccatcttcccgcctgtaaagacttcaaactctccgctcccaccttctctggatgcctttccccaagccgtggactgatccagcgcctcgtgccgattcaccaccaggcctcgtacctagccgttagttgtttctctttccgcgg

SEQ ID NO: 349717 - DNA, 908 bp, Homo Sapiens
  misc_feature (520)..(530): n is a, c, g, or t
  misc_feature (708)..(708): n is a, c, g, or t
ctgtctgtgcaattgcaaagtgcacgtcctggtggcctataaaattggagtgtattttggggtcttcgtgaacccctcaccctgacacccactgcatccatgagtcaatgacagtgtctgtgtctctgcagccaagaagccctccatgagcagagcagctacatcctctccagtgcagagacgcctgcccggccccgagccccggaaacttctctctccatccacgtggggagcttcagataaccgcgccgctgcacggctctactcccgatgaactctccggctgatgccacaaacgtgggtttcctgggcatggggactggctgcctggcgcctccaatcccaaatcctctgcttcctttgagcacagggacggctcctctgaggcctggccagtgcatgtagtcacttagctctgcaacacgtggcagccacgggggctggtgcagctctggatgtcgcccacccagctgccagtaggtgctgggctctctcacacagcacccggccccagctgccnnnnnnnnnnncttttaaccagaaaatgcacaacgtgtgcgtgaaccgcaggtatggaggcagcggcatgccgttgctccgctgtgggaggtgtgtggggtcaggccagccactttcctccgtgttcagatgactctcgttcgccctggaccggcttctcacagtgtctcaggccactgcgccacccgncgctgggtgctgaagcagaagcgggccagaagtgggggtctgcctttcaagaactttcattttccccccactcgttcccggcccccggcatgccttccacggtcttgccccctttgggtctggagtttaaaactggcgaaatgcctgaaaaaagtggcgaagcctccttttccccccaagggaaggaagcccaccacaag

SEQ ID NO: 349718 - DNA, 848 bp, Homo Sapiens
  misc_feature (42)..(78): n is a, c, g, or t
ggaatatctataggggcctgggtttcaccgcggggcggccgnnnnnnnnnnnnnnnnnnnnnnnnnnnnnnnnnnnnnatcaggccaaatcggccgagctcgaattcgtcgagagcggaagatggcgagcggcggcagcggtggggtgtcagtacctgcgctgtggagtgaagtgaaccggtatggccagaacggcgacttcacgcgcgctctcaagaccgtcaataagatactacagatcaacaaagatgacgtaactgccctgcattgtaaagtggtatgccttatccagaatggaagtttcaaggagctttgaatgtcatcaatactcacaccaaagtgttagccaataactctctctcctttgaaaaggcatattgcgagtacaggctgaacagaattgagaatgccttgaagacaatagaaagtgccaaccagcagacagacaaactgaaggagctttatggacaagtgttataccgttcggaacgctatgatgaatgcttagcagtgtatagagatctcgtccgaaactcccaagatgattatgatgaggagaggaaaacaaacctttcagcagttgttgcagctcaaagcaattgggaaaaagtggttccagagaacctgggcctccaagaaggcacacatgagctgtgctacaacactgcatgtgcactgataggccaaggcagctgaaccaggccatgaaaatcctacaaaaagctgaaggttggaagtttgttaaacttatctgtaaatatatgtgcatatactttgtagagtatcttctaaaattgcatttgacttctgtgaaaattattaacatggaaggtattgatgcagtggcc

SEQ ID NO: 349719 - DNA, 2284 bp, Homo Sapiens
gtctccccgccccgcccctcgtctcctccaagatggcgagcggcggcagcgggggggtgtcagtacctgcgctgtggagtgaagtgaaccggtatggccagaacggcgacttcacgcgcgctctcaagaccgtcaataagatactacagatcaacaaagatgacgtaactgccctgcattgtaaagtggtatgccttatccagaatggaagtttcaaggaagctttgaatgtcatcaatactcacaccaaagtgttagccaataactctctctcctttgaaaaggcatattgcgagtacaggctgaacagaattgagaatgccttgaagacaatagaaagtgccaaccagcagacagacaaactgaaggagctttatggacaagtgttataccgtttggaacgctatgatgaatgcttagcagtgtatagagatctcgtccgaaactcccaagatgattatgatgaggagaggaaaacaaacctttcagcagttgttgcagctcaaagcaattgggaaaaagtggttccagagaacctgggcctccaagaaggcacacatgagctgtgctacaacactgcatgtgcactgataggccaaggccagctgaaccaggccatgaaaatcctacaaaaagctgaagatctttgccgccgttcattatcagaagacactgatgggactgaggaagacccacaggcagaactggccatcattcatggtcagatggcttatattctgcagcttcagggtcgaacagaggaggctttgcaactttacaatcaaataataaaactaaaaccaacagatgtggggattactagctgtaattgcaaataacatcattaccattaacaaggaccaaaatgtctttgactccaagaagaaagtgaaattaaccaaatgcgaaaggagtaaagtttaagctttccaaggaaacaactacaagctataggaatttaacaaaagctttacttggctatgtacacaaaccaggctgaacaatgccgcaaaatatctgccagtttacagtcccaaagtcccgagcatctcttacctgtgttaatccaagctgcccagctctgccgtgaaaagcagcacacaaaagcaatagagctgcttcaggaattttcagatcagcatccagaaaatgcagctgaaattaagctgaccatggcacagttgaaaatttctcaaggtaatatttctaaagcatgtctaatattgagaagcatagaggagttaaagcataaaccaggcatggtatctgcattagttaccatgtatagccatgaagaagatattgatagtgccattgaggtcttcacacaagctatccagtggtatcaaaaccatcagccaaaatctcctgctcatttgtccttgataagagaagctgcaaacttcaaactcaaatatgggcggaagaaggaggcaattagtgacctacaacagctgtggaaacaaaatccaaaagatattcacaccctggcacagcttatttctgcttactcacttgtagatccagagaaagccaaagctcttagtaaacacttgccatcgtcagatagtatgtctctaaaagtagatgttgaggctcttgaaaattctgctggtgctacatacattcggaagaagggtggaaaagttactggagatagtcaaccaaaggaacaaggacagggagatttgaaaaagaagaaaaagaaaaagaagggaaaattgcctaagaattatgacccaaaagttaccccagatccagaaagatggctgccaatgcgagaacgttcttactaccggggaagaaagaagggtaaaaagaaggatcagattggaaaagggacccagggagcaactgcaggagcttcatctgaactggatgccagtaaaactgtgagcagcccacccacctccccaagacctggcagtgctgcaacagtatctgcctctacaagtaacatcatacccccaagacaccagaaacctgcaggggctccagcaacaaaaaagaaacagcaacagaaaaagaagaaaggtggaaaaggtggctggtgatgagaatattcttgttgcaggctgtttttaaactagtgtcagtgacactagggaatataataaaggtaacacagcaagaagcacagaactactccctcttcatctccatatttttcataatttcttgtgtttcaaataggggaaacatcttcctcaaagtcttgcctagtgaggtatgggcctactgggttggcctcataggctttgtacagattatggagggactggaa

SEQ ID NO: 349720 - DNA, 1910 bp, Homo Sapiens
  misc_feature (1743)..(1751): n is a, c, g, or t
  misc_feature (1848)..(1856): n is a, c, g, or t
ggtccggaattcccgggatgcgccggagctgggttgctcctgctcccgtctccaagtcctggtacctccttcaagctgggagagggctctagtccctggttctgaacactctggggttctcgggtgcaggccgccatgagcaaacggaaggcgccgcaggagactctcaacgggggaatcaccgacatgctcacagaactcgcaaactttgagaagaacgtgagccaagctatccacaagtacaatgcttacagaaaagcagcatctgttatagcaaaatacccacacaaaataaagagtggagctgaagctaagaaattgcctggagtaggaacaaaaattgctgaaaagattgatgagtttttagcaactggaaaattacgtaaactggaaaagattcggcaggatgatacgagttcatccatcaatttcctgactcgagttagtggcattggtccatctgctgcaaggaagtttgtagatgaaggaattaaaacactagaagatctcagaaaaaatgaagataaattgaaccatcatcagcgaattgggctgaaatattttggggactttgaaaaaagaattcctcgtgaagagatgttacaaatgcaagatattgtactaaatgaagttaaaaaagtggattctgaatacattgctacagtctgtggcagtttcagaagaggtgcagagtccagtggtgacatggatgttctcctgacccatcccagcttcacttcagaatcaaccaaacagccaaaactgttacatcaggttgtggagcagttacaaaaggttcattttatcacagataccctgtcaaagggtgagacaaagttcatgggtgtttgccagcttcccagtaaaaatgatgaaaaagaatatccacacagaagaattgatatcaggttgatacccaaagatcagtattactgtggtgttctctatttcactgggagtgatattttcaataagaatatgagggctcatgccctagaaaagggtttcacaatcaatgagtacaccatccgtcccttgggagtcactggagttgcaggagaacccctgccagtggatagtgaaaaagacatctttgattacatccagtggaaataccgggaacccaaggaccggagcgaatgaggcctgtatcctccctggcagacacaacccaataggagtcttaatttatttcttaacctttgctatgtaagggtctttggtgtttttaaatgattgtttcttcttcatgcttttgcttgcaatgtagtcaataaaacctcatgtactattaaaccaaccgcactacagcaatgggcgaataaacattgcggccgccctcgggccctcgagaaactttctaaaaccatttcgttttggcccccccggggcccctgttagggtaaaggggaaacatggggcccataagcctgtgtttccctaacgaaaaactccctggggcccttggaactaagcggctcttgggaatctctcccgcccgacattaagaataaagcccccccgcggcccgcgccaaacccgagagtgggatcttccttgagaacaaaaaatcccccaaaaatgggaaggtttctcttgagagggtcctatttacttgggggggtgccaattacaaaccggggcaaattccccccgggggggaagcgcttcccataatttctaaagatttaaggggcacccacgggcgcgctggggggagcttacatatgggacggatacccnnnnnnnnnaaaagttccaatttaaaagcaatttctgtcgcccccaccattgaaaacacccgcaccacaacaaaacgggcccttgcatgggaaccccctgaaaatnnnnnnnnnggggggttcattcacccacaccccatgggggggccgcttgtggcagtgaaaaaa

SEQ ID NO: 349721 - DNA, 724 bp, Homo Sapiens
  misc_feature (590)..(590): n is a, c, g, or t
agcgggtgcaccccgccccccatcgggggcaaccattgttccgccggtcgcgccggagctgggttgctcctgctcccgtctccaagtcctggtacctccttcaagctgggagagggctctagtccctggttctgaacactctggggttctcgggtgcaggccgccatgagcaaacggaaggcgccgcaggagactctcaacgggggaatcaccgacatgctcacagaaaagcagcatctgttatagcaaaatacccacacaaaataaagagtggagctgaagctaagaaattgcctggagtaggaacaaaaattgctgaaaagattgatgagtttttagcaactggaaaattacgtaaactggaaaagattcggcaggatgatacgagttcatccatcaatttcctgactcgagttagtggcattggtccatctgctgcaaggaagtttgtagatgaaggaattaaaacactagaagatctcagaaaaaattaagataaattgaaccatcatcagcgaattgggctgaaatatttcggggactttgaccaaagaattcctcgtgaagagatgttacaaatgcaagatatngtactaaatgaagttaaaaaagtggattctgaataccttgctacagtctgtggcagttccagaagaggtgcagagtccagtggtgacatggatgttctcctgacccatcccagcttcacttcagaatcaaacaa

SEQ ID NO: 349722 - DNA, 728 bp, Homo Sapiens
gtttgaaggcctggaattttcacatagcactggtcgaaaatatcaagcctaaataggaagtcattttctgtgacacctctacatagctattacagatcctaagtcctagggcatcagctataaaaattggccagtcccaaagacacagtaagttctaacattctggtactatcatatttcaagtattttttctcactttttaaaaatgtttttctgaacaaaagtgaaacaatgccatttatcaaactgagatcattacaatcttcaacaagacaactaaaacagcttgatgttagatgggattctgtgaccgtttgtatactgacaggtccttccagtctccctccacagtcccacaagcggaagtattctacctgattccagagttcattccaacatgcagtagaatgaggtgaatgaagaaccaagtgtgggttttgttttcacagtgcacttggtcaatctagtttctctgagtagtgggctgtattctaagaaaagctttcacgtagacgtcaaagtctgcaaaagagatgagttagccactttacaaaaacctgctctgctttacaaaagatgcacaccaggcttcctttacaagtgaactccaaggctgcttgcaaagtaccacccttcctgcagactttgtgggtcgtgtcacttggcctaaacaagtggcctaacatatgcatgctcacagctagtagcatccctcatgcgtcctttgg

SEQ ID NO: 349723 - DNA, 1506 bp, Homo Sapiens
  misc_feature (89)..(118): n is a, c, g, or t
ctattagacatctaggtggcctttccttatctgaggtgtagtggtctaacatttaggaagccttgctttgactttatcgggcagcattnnnnnnnnnnnnnnnnnnnnnnnnnnnnnntgaattatagtttttaacaagtgatctttatctcctgtcttctgttaggatcatttgaaagaaaaagggagaacttactttctagttgttactggctggcacagtacctccctttgtgtttctgcttatttatttagattatgtgaatcttaaagggctttttatatcagttgaaagtgtgttactgcgcatgcatttggtgattccagtgctagatatttaattactgtgtatttagtgttttgattttctataatttcagttccgcgtgtttttacacttgttcattttaaattgatgtttcattttcacttataatactgtttgacttgtctctatcatgtcaccataaactgtaatattttcaagggttatagatcaaagatatttatttagaaatgtacaagataatgaaatttagattccttatacttaaggctgattttattagaagattattttaatgttctattataaattttaagaatttgtattcaaattgtatgtaaaatatgtaaaatgttgacggtactataattaagtggttctataaaagctattcacaagttctactgtgatggacatcctcatcatagacaaaacctccctctgttttatcctcaatttccagttacagaaatttggtgatgcctattttttgccaattttatgtcaaaataagttaaaacttccctcctgttcacctcttgggtctctatcctgtgtaacctctggtgtagtatttgcccataggcgaccagagccacttcctctgaacccaacatctcctggggaccttcgcagcaagaggaaagcactgagacaatagcttgctaagcaggggcccagtggtgtctcagagaaaccatgggtgtcctcgccacttcccagggagggtgaggtgagctcgggaacataacgatgttttgacttacaataggcatgaaatcgcaactagaaaaattagggcagtttttaaaaatgtcatagttatctattgcatgaactggagtaattccacctggtggtgaaaggattgttatttcacacatgaaaaattcatccagttttactaaaatgtaattttttctgtcatttgaaagtactgacaactatttgtaactaatcttccttaagaactgtatttgagggtatcaaatcaagcttgtaatttaaaatctgtaccaacaaagtgtctcagagagtttatgttgaaccattgggtgctgagacaaaactgctttaaagtgaaactttgatttcagaagttgatctggccctacaagtagacagtcatctactttgggaagactaataggtccttaggtaacggctcttctgctttaaaatacctcccccatctgctaaccggaggtgaagatattcta

SEQ ID NO: 349724 - DNA, 907 bp, Homo Sapiens
  misc_feature (151)..(151): n is a, c, g, or t
  misc_feature (548)..(548): n is a, c, g, or t
  misc_feature (727)..(727): n is a, c, g, or t
gcagaaacacaaagggaggtactgtgccagccagtaacaactagaaagtaagttctccctttttctttcaaatgatcctaacagaagacaggagataaagatcacttgttaaaaactataattcatgtttggtttttctttgttgtttttnttttaatgctgcccgataaagtcaaagcaaggcttcctaaatgttagaccactacacctcagataaggaaaggccactaacggacagatttaaacaaaaatcagacatttgtctatggaaggtatgattgaattttcgcgtaatgaccccgcaataggatctaaatcaagcccacaacaagaatgcacattcaagcatctgaatgcatgatctgttaatactgaattctatatggtgatttcactcagcaaagtactggtttattctatataagaccaggattaaaacacctacagtgggaactgtatcttacttaagtttgcattctggttctcagaatctcagaacataataggtgtaagcgtttgccaaactgagtccagcattcatgatttcnaggaagctttgcatccgtgacaaaactgttgccctgagactcaggggagctttttctttggtctctaggcctgtgattaatttctggctaatcaagttaattgacacagatctgtcacagtttctcattgcagggtcaagagttctagaattcatctattccacagttaagccttctcnaaagatttgtgcctgcacatcatcatcaagttaaaagaagaaagatcatctttgtgatgttgggtatttgcttatgttaactgccggaagcacatcgcacgcacacacacgcaaacacacaatcacttcataagtggagaacagaagtgaaataatacgcaaagcctaaattacacagct

SEQ ID NO: 349725 - DNA, 691 bp, Homo Sapiens
  misc_feature (609)..(609): n is a, c, g, or t
  misc_feature (614)..(614): n is a, c, g, or t
  misc_feature (620)..(620): n is a, c, g, or t
  misc_feature (626)..(626): n is a, c, g, or t
  misc_feature (636)..(636): n is a, c, g, or t
cgccaggggatgcaaacccttctgcccctttttgctacccctgaagcttactgttatgtggtcgagtttttctggaagtgggcttccgcgatcgcggggaccaacgccctgagctcttgtgcccaaaggggatcgccaggttttttgatgcggatcgaaagggactggccccggagcctacaacctgacgcaggtgggacttggggaaatgtcgagaaacctaggtctgggacttgagttggcttccagggcacacattcttgttcagaagaaacacattgcaaaaatcgggaggtgacgggcagatgaagtgtcggcgcttcgcctcgggactccagtgcaacctatggggcttttggaaatgaggaagtcgatgactctgcagggactcctctgacccaggagcagatggcgctcgtctgggcactccccaggagaaaaggtgcatcgggaagcagcctggcttgtggatggtggacaaggtggaggagagagaattccttggcagtagcattatgaacaaatgcagggctgagaaacagcatggtggccttgactaagtttatggcgacagcaggtaagtctggagagaaagctttacaggacatntgggnggcttngacatncttctcctancccaatgctgtccaatagaactttatcctgtatctgtgttgtccaaccacagtaa

SEQ ID NO: 349726 - DNA, 1126 bp, Homo Sapiens
accacgtacatgccgtaaatgctccctaggctggctgcggctacaaggcagacccgggagctgagaatagaggaatacctgcccaagcaactcattctgcacagcagccgacaagacagcgattttcctgtgctggaatgtgcccatccaaagacacttggattggacttaatcttaaacctctggagttcaagaccttttaaaaagggctaaataaacaatctctacatgtaaaaggccactgactcctacttcctctgtatagagcaactgttgaactcagctgcctgtaggaaaactgaagactttaataacaaactctccaaggtgaaaatgaacacagggcgtgattctcagtcaccagactcagcttggagatcttacaatgatggcaatcaggagacactgaacggagatgctacatattcctctcttgcagcaaaaggttttagaagcgttcgaccaaacctacaagataaaagatcaccaactcagagccagataacagtgaatggaaactcaggaggtgccgtgagtcccatgagttactatcagaggccgttttccccctcagcatattctctcccagcctcactcaactccagcattgtcatgcagcacggcacatccctcgattccacagacacatatccccagcatgcgcagtctctggatggcaaccaccagcaggctctatccccctgtaccgatcctcagaggaagagaagagagtgacaagcatcaaagccccgcatgacccaaggatcggtgcccgtggatgaatccggaatccccacagcaattagaacgacagtcgaccggcccaaggactggtacaagacgatgtttaagcgaattcacatggtgcacaagccggatgatgacacagacatgtataatactccttatacatacaatgcaggtctgtacaacccaccctacagtgctcagtcacaccctgctgcaaagacccaaacctacagacctctttccaaaagccactccgacaacagccccaatgcctttaaggatgcgtcctccccagtgcctcccccacatgttccacctccagtcccgccgcttcgaccaagagatcggtcttcaacagaaaagcatgactgggaat

SEQ ID NO: 349727 - DNA, 1173 bp, Homo Sapiens
ttatcgtttacgagatacagtcgcaagggcaggatgtattgacatatttgttaggtgcgtgtgaatggggtagtagtcgcataattagggaattgggttgttgtggggaatttgaaggggcagtggtgatcatatattaagacgctattgtctgtgatttgcggtggacagatggggtagaatataaggcgaggggggagagcgggcggtggggtcaatacctcaagtggggttggggggcaggtgtctgggaatttcctgttgcgaggtttttttaggtttggagatgggaggtttgttttttcttgaaaggtttgagttggaacgctttttataaattcttttggttcaaggagaggggatgatttaggattttcggttcaagggtttcctgattggcccatcattgtaaagttctccaaagctgagtttgggtaggtgagaatcacgccgtacaggcaagttgagttcaacagttgctctattcagaggaagtaggagtcagtggctttttacatgtagagattgtttatttagccctttttaaaaggtcttgaactccagaggtttaagattaagtccaatccaagtgtctctgtcagtgtactgggacgctcaggaagccccttctccgcctcggcctcagcgtgcagacatatgccctgggagcccacaatctgttaacaggaagcaggtaaacccgagagcgtccgcctgcgttccagtccagtgcccgtcccagcacacacctgctttttcagacctgccgctcatatgccacagccacgcacaggaccagcgttagcagagtgcaacaccctccgtttggatccctcgttttcagggtaagcagctagggagctgctgagataatattgcagggaaagcttgccttcccaagacaaaaacctttgctgctgcctgatagcagatatgcagcattatcactctgcattccacattctccaatcagctaattggaacggcagtcaacagcctgtccaaaaggcagcttgcaggcctgcgtggctgtgatcattgtatactaacatgcccattgcttctctcttccctgaagagatgtataaaagaggcttcttccagggcgaagctcagcagaatatgccacactgttttccataagtaaaatcctcgtgccgaattcgccaccca

SEQ ID NO: 349728 - DNA, 873 bp, Homo Sapiens
cctttcagttttcagtaagtaacactctcacacatttcaaaagttaaaactgtatagaaaggaaccactgagaactctttctcccacccggtcccagccccactgttccccattatcctactaccccagggaaaccacctgattagtttcttagcctttgtctagcttttatttatgcaaatatgttttctaatttcctttctttcttacacaattaacagcatactattagtaatatactatatgcactgatctgtatcgtgtttttttaattataattattcttttaataaaatgcttcactgagagcagggaagccaccttactttcccaaaagttacacaatacatggtagtaccaaagaaatatctgctgagagaaatactattttgggaagtagttaataattttacaatatgcaatagaagcagacacatgaacagctacaatgtggatacaagttttgtcaaataatcaggagaaaaaagaataaaaattacaatggcaaatggctgtccaaattttccaagtccaactttatagtgctgtgaagaaaagcatgaatatgagactctcaataaacatttgtgcatccatgaaattgaattatttaggtttaaagatgatagaattttggaaaactgaaaataatttttgtaatttcaaggtaaaataatctttactttcagaaaacacattgtaactgtgataagccatagcatttattcatgtgtataagataaaaacacagaaagtattctactcttattatttaaggtggaaaaaggaataattgtgaaattatgtttcattttccagcctggccatcatggccaaccccatctctactaaaaatacaaaaatgagcacgct

SEQ ID NO: 349729 - DNA, 1805 bp, Homo Sapiens
caagcgtaatgcggcacacctacctaagccccttcaccatcgtcacgcccaacattgtcatctccgtagtgcgcttggacaaagggaactttgctggggccaagctgccccgctacgaggccctgcgtggggagcagcccccggaccttgagacaacagtcattctacctgagtctgtcttcagagagacgccccccgtggtcaggcccgcaggccccggagaggcccaggagccagaggagctggcacggcgacagcgacggcacccggagctgagccagggtgaggctgtggccagcgtcatcatctaccgcaccctggcagggctactgactcataactatgaccctgacaagcgcagcttgagagtccccaaacgcccgatcatcaacacacccgtggtgagcatcagcgtccatgatgatgaggagcttctgccccgggccctggacaaacccgtcacggtgcagttccgcctgctggagacagaggagcggaccaagcccatctgtgtcttctggaaccattcaatcctggtcagtggcacaggtggctggtcggccagaggctgtgaagtcgtcttccgcaatgagagccacgtcagctgccagtgcaaccacatgacgagcttcgctgtgctcatggacgtttctcggcgggagaatggggagatcctgccactgaagacactgacatacgtggctctaggtgtcaccttggctgcccttctgctcaccttcttcttcctcactctcttgcgtatcctgcgctccaaccaacacggcatccgacgtaacctgacagctgccctgggcctggctcagctggtcttcctcctgggaatcaaccaggctgacctcccttttgcctgcacagtcattgccatcctgctgcacttcctgtacctctgcaccttttcctgggctctgctggaggccttgcacctgtaccgggcactcactgaggtgcgcgatgtcaacaccggccccatgcgcttctactacatgctgggctggggcgtgcctgccttcatcacagggctagccgtgggcctggaccccgagggctacgggaaccctgacttctgctggctctccatctatgacacgctcatctggagttttgctggcccggtggcctttgccgtctcgatgagtgtcttcctgtacatcctggcggcccgggcctcctgtgctgcccagcggcagggctttgagaagaaaggtcctgtctcgggcctgcagccctccttcgccgtcctcctgctgctgagcgccacgtggctgctggcactgctctctgtcaacagcgacaccctcctcttccactacctctttgctacctgcaattgcatccagggccccttcatcttcctctcctatgtggtgcttagcaaggaggtccggaaagcactcaagcttgcctgcagccgcaagcccagccctgaccctgctctgaccaccaagtccaccctgacctcgtcctacaactgccccagcccctacgcagatgggcggctgtaccagccctacggagactcggccggctctctgcacagcaccagtcgctcgggcaagagtcagcccagctacatccccttcttgctgagggaggagtccgcactgaaccctggccaagggccccctggcctgggggatccaggcagcctgttcctggaaggtcaagaccagcagcatgatcctgacacggactccgacagtgacctgtccttagaagacgaccagagtggctcctatgcctctacccactcatcagacagtgaggaggaagaagaggaggaggaa

SEQ ID NO: 349730 - DNA, 543 bp, Homo Sapiens
gccacagccacacgtgtgacctgctgggccgtggttctggagtctacctgcggatgagcctgcggcagtcctggggaaatttttccagagcctgttagcccgtggctacggtcaggctctggccagggcagagggctgcccagggccaggctcacagtacaggagggtggcgaggcccctccctcactggcacgcatgagcaccacccgcctccccgactcccaagagtgcacctgctgcggccacagctccgtggaaggactccccctacctgagcagagcagaagccccagggcggagctcccagccagcatggtccgctgagggctggggggcggtctccgaggcccctcaacagagaagcctccacctgaggatggggaggacatggcaggcagcttccacggcagggctgggaagttcatgtgcctggaaataaagagcaaggaaaaatggacctcaggcttcgtggctcctttaggatgtcacctcaccggcctggggaaggcggggggtgcccaagtcacaggccctgtgcccccg

SEQ ID NO: 349731 - DNA, 828 bp, Homo Sapiens
ggacatgtgatgagaaatttaacattggtgtatctaactctgacatttttcacgaagtgattttttaaaatgtggtaaaaaagacaaaatataattcaaacatatgcattatatgtcaaagtatgcttcgctggcatcaagtagactcaccttgagatacaatcttggacaacctccatcttcagaatatctactttttcaaaccgaaactctccaaccaaaaatcaataacatcaaaagtttgcaaatacaagccgacggaaaataaatacatgaattctaccacagtgaattggaccgcactgggaaacacagatgaagaaagtcaataccgctttgtccttcagtgcctggctcctttttcagctcgtcttgctactctaggcattatgcctgaaaagtctcccaggtgcctgtgaggctctaattccctgggtcccattgccatgtctctggatttgcgaagatccaccggaccttctgtggaactcccgtgtcggtgaacttttgtgccacggcccctaattctgcccatggtcatctgcacctgcacgacttagggtccatgttccttggacgggaagagacaggcaggagtcggaatgatgaaccagcacactggggcgttttctcatgtagcccaagtgaccccatggtcttctcgagctttggaaccagtcgcgtcccctttgacactgcccccagccattatctcaatctaggtataatgttggccttccctgtttgctgtccagttaggtattgttttcgacaacactcctgcatgtgtatttttcccaggagagagccagtgtggtagagggtacc

SEQ ID NO: 349732 - DNA, 1643 bp, Homo Sapiens
cagtatacaaaagatgggccttgcatctacaataatctagaatttggaattgaccttgacacacgagtggctctggttagggcccaatggagcagggaagtcaactcttctgaagctgctaactggagagctactacccacagatggcatgatccgaaaacactctcatgtcaagatagggcgttaccatcagcatttacaagagcagctggacttagatctctcacctttggagtacatgatgaagtgctacccagagatcaaggagaaggaagaaatgaggaagatcattgggcgatacggtctcactgggaaacaacaggtgagcccaatccggaacttgtcagacgggcagaagtgccgagtgtgtctggcctggctggcctggcagaacccccacatgctcttcctggatgaacccaccaatcacctggatatcgagaccatcgacgccctggcagatgccatcaatgagtttgagggtggtatgatgctggtcagccatgacttcagactcattcagcaggttgcacaggaaatttgggtctgtgagaagcagacaatcaccaagtggcctggagacatcctggcttacaaggagcacctcaagtccaagctggtggatgaggagccccagctcaccaagaggacccacaacgtgtgagccctctacctgggttcgggtcaggagctccatctgggaactaacagctgctaacctgaccagccgctcaggacaggaccctggggctacactcctgcattgctgcaatactgctcccccagcctctcccctgcccctcaacctgccttagctgcactctcttacctacagctggacagtacctgtctgtttcctgtcctccttccagttacatctgtccatgtctggactcggctggccgttccctccagccccttgctggttatcttactctgagtgtgatgcagtcagaggcacctgcgggttagcccaggggcccaagccctggatttggcctgcggaggagcttaggatcctcgttttctgggttttggtgatgttggaggagtaccccccagcccaccgccccgattcctttttgcttctggtttggagctccggaccaggaccttcgtcctggtcagtttttaaataattatttagcagtgtaacttttagacctgcgtgacatctacaaagcgcccaataaagaaagaggaagccacggtccctaccttccttctcgggtctctggggccttctcctccctgcagtgccaacatgcactgcccacagcaggagctggatccagcgtcagtgtgtcgatgggaactgaagactagtccataggagctggaagaactttgtccctttacttctgatttgaaattgtaccttttctcaggcctgtgattcacagactttaacatgaatcagaatcacctggagggctcatgcaatcagattgccagatctcgcctcagcgtttctggttcaataggttttgggggagaccaagaacgttaacatttctagcaagtttccaggtgatgctgtgttgctggtctagagactattttgagaaccactgtccaggagcgtggttttctgattgtgatctgaggttctgccccaactgcacagcagttgggctgcttgt

SEQ ID NO: 349733 - DNA, 641 bp, Homo Sapiens
cttaatcaactataaaagcttacaattagtcttcacagttatgggattgttatactaacccgtgtgattggaactccaaagactttttctttagcttaattttgtgtgtgcactaacattccctggtttttgtgtgatcattcccgagtgttgctgcaagattacagtggacgtgatcttttagcatgtgcttttataaaaagtggtagctacagatgatatagcaatctaccttatatagagccttcagaaactgtgagtggaaatgaatgcgcagcgtactgactgttggtgataagtgtatctgtgtgagtgtgtgcaactacttgtgtgagggcatggtagctaacgtgtgtatgagatcctatataccagcatgtaccaagaatgtgtgtgtagttttaattatgctgcaatgtataatctggtgtgttatttaaacagcactagtactgtacactggtttttttcccttgtgtttgctgttgcacactgattgctgagggtgcatcaattacaagcattgaatactccatccccttccctcccagtgaatggaatgagaaaagccttcttcctttgcttcaggcagctgtcaccttctctttattggtggtcctaagtgggtcacttaagaaaaa

SEQ ID NO: 349734 - DNA, 2251 bp, Homo Sapiens
  misc_feature (60)..(72): n is a, c, g, or t
  misc_feature (1564)..(1592): n is a, c, g, or t
tgtaccagggcagcggaggtcccgagtggggggccattttaagcagtccccactgttgtnnnnnnnnnnnnnttcccaggcagcccctgagcatcctgaagccactggatcttggcgccagacatggcgagctgcgtgaagagttcgtccgcgctcagatacgggtgatgccctcagggagatctgtcacctccagcacccgccccaggacaacatctgctgtccccaggtcagtggaggcagatttgagtgcttgtctcttgccccggtttccatgcttcagtccactctgtccctggtgcaccgtgtaagttgactggccatggagcaagggagggcagatggacagattgtactgtaatggctggcccaaaagggagtagcgcccatcaccctgtgctggacccccaggccgggggaactgtgtgaggacaggcaggggactgagtcctgtgcagacactgctgaggctggtgacaggagagggtgctggagactgggtaggagatgtgacagggctgctgctcatttgtgtgttggcctgggggctgctgtcaggactgtacaggtctccaggcttctgcgccccgctggtccatgctgtagtatttacaatgactccactggaccatggatgggttctgagggggctggggtccattagggacattcagctgcatgaccactacacctggtccagaaggtgacactcctgagtactgctgtggcatctgtggtggactgcagggagagggagactgaggcatctggtactgctcagagccagggggttgcagaaaccctacagaaaggctcggtaccgttctgctgagcaggggggatcatgctatagtacactggtacccccgctgctgggaggcctccttgcacagactggctcacagggaccagcatgggttgctggaaaggcggctggaccacattttgcgagtcactacccactggaacttggtaagaaggcagtggagtgtactgaaccaccaggccttgcatctggccccccatgctgctcctctggctgctgagcaggccctggttctgtggctgctggaccccaatcatgccttggtaagccgcctgctgctggttaggcatcatgggctgtaaaccaggctgctgggatggctgaggcagctgctgaccacgttgggggctataggccaccgggtgagagagaggtcgatattgctggttggagttaggatattgtccagggggatagtaagaaacctggatctgttgagggggctgcatgtacccctggggtggcagaacttgctgagtaggtcgtgcatggctagaggtggaatagttggaatggggaggggctgacccgtggaagccatgatgaagctagtctgctgagggtgctgggagataagtggggtctggaatagagctgcagatgggtcagctgcttcagtagaaccttggcgactaaggctcatttgtccaaaggggttgctgaggtcatctgcctgtgagatcatgtgattattcaagggtggctgttgctgaggcgtgggtgggagagcaggaagtnnnnnnnnnnnnnnnnnnnnnnnnnnnnnggcagtacaagggagaagcccccggacagactgggatgaggtgacctggttgcacacttctggggcacctagtgccatacctggcctggagatccttcccgcactgccgcctttactgctgccgatgctgtcacctcgggtaaggatagagattccactgaagctgctagctttggtgacagggggtcgcatgctccggacagagccatcagagtctgtgctgctccaagggcgtggctccagggatttgagttcgctgtctgtgctgctctggcggctgcttgaggtgcggctcagtccttcacggttccccctgatgtcatttagatatccgttctggccagtctctcgggcaaatattctctctcggaccctttgatattcctcctctctctcttctattgacttgctcctccttccatcctgcaatggaactctgatctggttatcatctcggtccatactggcatcatctctcttgagaatgaacctctgttgaaattctgtattcttctcatcctttatatgttctgagaacctctgttcagggattcttgtgttactagttttgttgatgatgtcagctttcccagtttgatcaacattgtggtccatcccaaaataggcagctacccggtgtaatagcatccggtgaaaag

SEQ ID NO: 349735 - DNA, 480 bp, Homo Sapiens
  misc_feature (12)..(12): n is a, c, g, or t
  misc_feature (43)..(71): n is a, c, g, or t
attatcaaggtntgttgctgaggcgtggtggagagcaggaagnnnnnnnnnnnnnnnnnnnnnnnnnnnnnggcagtacaagggagaagcccccggacagactggatgaggtgacctggttgcacacttctggggcacctagtgccatacctggcctggagatccttcccgcactgccgcctttactgctttcgatgctgtcacctcgggtaaggatagagattccactgaagctgctagctttggtgacagggggtcgcatgctccggacagagccatcagagtctgtgctgctccaagggcgtggctccagggatttgagttcgctgtctgtgctgctctggcggctgcttgaggtgcggctcagtccttcacggttccccctgatgtcatttagatatccgttctggccagtctggttatcatctcggtccatactggcatcatctctcttgagaatgaacctctgttgaaattctg

SEQ ID NO: 349736 - DNA, 986 bp, Homo Sapiens
  misc_feature (592)..(592): n is a, c, g, or t
  misc_feature (829)..(829): n is a, c, g, or t
  misc_feature (831)..(831): n is a, c, g, or t
  misc_feature (885)..(885): n is a, c, g, or t
  misc_feature (897)..(898): n is a, c, g, or t
  misc_feature (900)..(900): n is a, c, g, or t
  misc_feature (904)..(905): n is a, c, g, or t
  misc_feature (954)..(954): n is a, c, g, or t
  misc_feature (969)..(970): n is a, c, g, or t
  misc_feature (975)..(975): n is a, c, g, or t
  misc_feature (977)..(977): n is a, c, g, or t
  misc_feature (979)..(979): n is a, c, g, or t
  misc_feature (984)..(985): n is a, c, g, or t
actccctccctccctctctccttcccctatttgcaatcatattctccctctgcttcttttctcttctgccctccttgtgggcagtcatgaaaatcaattcagactgtattcattagcagatttattattctattgagaaagcactggaatgttttgtgagattatttttatatgaaggaatagcctgaactcaaacagatggtaagaatagtacaaacaccttagcacatcactgcacacacagtattctgaaaggagatttgacacttaattcccattttcttaaaataacagttttgttgacttaaaaatatgagatacataggatgtgaaaaaaaatgtttgcagtactcagcaaaaaatagggtacataaagcagggtggctgtccatccactgattctggggtgagaagcgatttctacctcgcaagagtgactagaaagtttctaggagcacctccaggcttgcaaagaaagtgaggcctcttggtatcctttcctcagtgtgtatatgacagccaggataatcaataccctaggttatgcgtctatatgatactcatctgtgaatattattggttttgtaatctntgttatataagaggatgtctaggctgtatatactgggggtagattattgcctgccccttatacataggaatatgctgcataatttgcgcataacttccatctcacttactggcttgtaggcagaggaaactgtatatgttactgccttgtacttttctcatacaccaaaaacacaccaaaaaaatcaataaaataagcaatcttctattctcattccttttcccacagcagcatatntnagaggcacatacaaaacctacattctctagttgggagtggatttttaaagtttnccttttatcttnnantttnnttttgtatgatgcactgagatgtgaactatctaacaggggattggaacnaaaaaaatgaggtannaaaanananaaaanna

SEQ ID NO: 349737 - DNA, 454 bp, Homo Sapiens
  misc_feature (173)..(211): n is a, c, g, or t
ctggcttgtaggcagaggaaactgtatatgttactgccttgtacttttctcatacaccaaaaacacaccaaaaaaatcaataaaataagcaatcttctattctcattccttttcccacagcagcatattttagaggcacatacaaaacctacattctctagttgggagtggannnnnnnnnnnnnnnnnnnnnnnnnnnnnnnnnnnnnnngtatgatgcactgagatgtgtactttctaacaggggattggtacctaagaaacgtggtagcattattcagaaaactattatactttcaaatgacacatagtaaggagaatggaataatacatgttgcatatttgttaccagttgtaatttgtctgtattatggaaagatgtaatggtttgtcagctgtcactgttgttttcttgtaacatgatatggaataaagtatagcagaatctccgtaa

SEQ ID NO: 349738 - DNA, 1319 bp, Homo Sapiens
  misc_feature (1027)..(1027): n is a, c, g, or t
  misc_feature (1297)..(1297): n is a, c, g, or t
  misc_feature (1307)..(1307): n is a, c, g, or t
cggtgggacgttgaccccgccccctgctgctggtagtctgcgccgggcggcggtggcggcggagacccgaacatggcgaccgcgcgcaccttcgggcccgagcgggaagccgagccggccaaggaagcgcgcgtcgtgggctcggagcttgtggacacttatacggtttacatcatccaggtcactgatggcagccatgagtggacagtaaagcaccgctacagcgacttccatgacctgcatgaaaagctcgttgcagagagaaagattgataaaaacctgcttccgcccaaaaagataattgggaaaaactcaagaagcttggtggagaagagggagaaggatctggaggtctacctccagaagctcctggctgccttccctggcgtgacccccagagtactggcccacttcttgcattttcacttctatgagataaatggcatcaccgcggcactggctgaagagctctttgagaaaggagaacagctcctgggggccggcgaggtctttgccattggacccctgcagctgtatgccgtcacggagtcagctgtcagcagggaaagcccacgtgcgccagtggggatgccaagaccgacctcgggcacatcctggacttcacctgtcgccttaagtaccttaaggtttctgggcacagaaggaccttttgggaccagcaacattcaggagcagctcctgccgttcgacctatcaatattcaagtccctgcatcaggtggagataagtcactgtgatgctaagcacatcagagggctggtcgcatcgaagcccaccttagccacgctgagtgtccgcttctcagcaacctcgatgaaggaagtccttgttcctgaagcctcagaatttgatgagtgggagcctgaaggcacaaccctagaaggccctgtgactgccgtcatccccacttggcaggcattgaccacgcttgacctgagccacaacagcatcttccgagatcgacgagtctgttgaaactgattcccaaagatttgagttcctggancctgagtcacaatggatttgctggttgttggacaatctgcagcacctgtataaccttgtgcatctggacctgtcctacaacaagctctcctccttggaagggcttcacaccaagctggggaacatcaagaccttaaacctgggcagggcaacctcctaggagagtctgagtgggcctgcacaagctcttactcactggttcaacctgggatctccggggacaacagggattcgaacagatgggagggaggttccggagcttagggcagcntcccgtgttntgggagcacgtg

SEQ ID NO: 349739 - DNA, 672 bp, Homo Sapiens
aaaccttaacctgaagtataaatgtcaaaagatacggctctttctcacacttgcaagacttacaaatacagcctcaaacattatgacacaccaacaatatctagaaagtaagaactggtgtagcaatgatgcttcatattctagctgtagccacagagttgagggtagtttttgtaggtctaaaataataatctataaagatgtccaaagttaaattttcaacaatacaaatctagagaagtgacagcctacattacttcattattactcttcttttagtctttagtctttaatattttaaagtttactctataaatcagcattttgtaatcctttataaactcatccagatttaaatgctactttttcatgaagaaaggataactttatagacagtcagtgcaacacacacattttatctcatcaccgtcttactgcctccccatccactgtctcataaagccctcagctgaactaagataaataatacaatggaaattattttcagttccccttgcactgtcaaagtaaaacaagaaaactgaaaagctgcacccccagcaagaaagggaagtatgctgttgtatgcatcattactcaacaattaccctctaactaaacatcctgtttaagagtttaattcaaacaacagccagactgttaagaaaaaaa

SEQ ID NO: 349740 - DNA, 1262 bp, Homo Sapiens
  misc_feature (1138)..(1180): n is a, c, g, or t
agcggaggaccagcaccggctgtaccagcagatcaaagccggcgcctatgatttcccatgcgtccggaatgggacactgtcagccccggaagccaaggatctgatcaataagatgctgaccattaacccatccaaacgcatcacagctgccgaagcccttaagcacccctggatctcgcaccgctccaccgtggcatcctgcatgcacagacaggagaccgtggactgcctgaagaagttcaatgccaggaggaaactgaagggagccattctcaccacgatgctggccaccaggaacttctccggagggaagagtgggggaaacaagaagagcgatggtgtgaaggaatcctcagagagcaccaacaccaccatcgaggatgaagacaccaaagtgcggaaacaggaaattataaaagtgacagagcagctgattgaagccataagcaatggagattttgagtcctacacgaagatgtgcgaccctggcatgacagccttcgaacctgaggccctggggaacctggttgagggcctggacttccatcgattctattttgaaaacctgtggtcccggaacagcaagcccgtgcacaccaccatcctgaatccccacatccacctgatgggcgacgagtcagcctgcatcgcctacatccgcatcacgcagtacctggacgctggcggcatcccacgcaccgcccagtcggaggagacccgtgtctggcaccgccgggacggcaaatggcagatcgtccacttccacagatctggggcgccctccgtcctgccccactgagggaccaggctggggtcgctgcgttgctgtgccgcagagatccactctgtccgtggagtggagctgctggttctcccaggtggattttgctggaattctcccatgtcatcaccccaccaccgtcacttctgtacctgcatcaagaaaacctgcttgttcacaaaagtcatcgcaacttcagagcgaacggccacatctccccacctctcacccccaccctctcccctgccaggctggggcttcctcaggcatgggtgtccacagcactggccccctctccccagcctcagctgctgtccgcctgatctgtcttgggctgtaggctagaatgcccgggcnnnnnnnnnnnnnnnnnnnnnnnnnnnnnnnnnnnnnnnnnnnaggaaggcagcatccgtccgtccctctcccagacctctcctcttccagtgtccccggggaagggcagatgacactcccttcc

SEQ ID NO: 349741 - DNA, 904 bp, Homo Sapiens
  misc_feature (56)..(93): n is a, c, g, or t
gaaccccgaatgtatacgatcatatagggcgaaccggcttactcgcggtggcggcnnnnnnnnnnnnnnnnnnnnnnnnnnnnnnnnnnnnnnatcaggccaaatcggccgagctcgaattcgtcgagagcggggagggcaaatggcagatcgtccacttccacagatctggggcgccctccgtcctgccccactgagggaccaggctggggtcgctgcgttgctgtgccgcagagatccactctgtccgtggagtggagctgctggttctcccaggtggattttgctggaattctcccatgtcatcaccccaccaccgtcacttctgtacctgcatcaagaaaacctgcttgttcacaaaagtcatcgcaacttcagagcgaacggccacatctccccacctctcgcccccaccctctcccctgccaggctggggcttcctcaggcatgggtgtccacagcactggccccctctccccagcctcagctgctgtccgcctgatctgtcttgggctgtaggctagaatgcccgggctggtgcccaccaggggctggggagaacggaggggtggcatgatgaggaaggcagcatccgtccgtccctctcccagacctctcctcttccagtgtccccggggaagggcagatgacactcccttccccctaagccaaccgcactgaaggagtggggagaagagcatacgccaggagcctcctgcctcaaagtgctcccctaagtcttcttcctcctgtgctgacctcagggtggtctgacccttccctcggtgtgggggatgtggccctactcaggtgcccctacttgctttctgcttccttctggtgaagtccactcctaacattaacctgcccaccccaccccgtcgggtagagcgggaccgactga

SEQ ID NO: 349742 - DNA, 172 bp, Homo Sapiens
ccggagggaagagtgggggaaacaagaagagcgatggtgtgaagaaaagaaagtccagttccagcgttcagttaatggaatcctcagagagcaccaacaccaccatcgaggatgaagacaccaaagtgcggaaacaggaaattataaaagtgacagagcaggtgattgaagc

SEQ ID NO: 349743 - DNA, 467 bp, Homo Sapiens
cacagatctctcgtcagccccaaagcctgtggctgcagccacgaattgtgtcccattcaggctgaagagggcctcaccttaccccaggactccgctatgacaccgcctctgcccctacaagacacagatctctcatcagccccaaagcctgtggctgcagccacgattgtgtcccagcaggctgaagagggcctcaccttaccccaggactccgctatgacaccgcctctgcccctacaagacacagaactctcgtcagccccaaagcctgtggctgcagccacgcttgtgtcccagcaggctgaagagggcctcaccttaccccaggactccgctatgacaccgcctctgcccctacaagacacagatctctcggtcagccccaaagcctgtggctgcagccacgcttgtgtcccatcaggctgaagagggcctcaccttaccccatgactccggtatgacaccgg

SEQ ID NO: 349744 - DNA, 1900 bp, Homo Sapiens
ctggtgggagtgctgctcaccgctctgctggccatgttgctggctttgccactgcgaccagacttccgagggccgcccttggaactgcccgctactttgtccactttcagcgaaccctggagtcctgttggcaagactggagtaggcattcccacttggcgaggaggtagctgggctggagagggggctgtaggaagaggggtctgccgggtaggtgtggctcgttccaatcccaaagggagatgactgagtcttgctggactgagatgggatttgctgtcccggaaagggcggacgactccctgtccatgccacctgactctggtttagctgccgggagatttgggacatgttctggcccgtggaagaagaggactgaatatcattcactccaggcacatgaaccactgaagagctgaaggccttcccggagtgtccagagggaaatgggcttccttgggagtagatctgctgggttcctgctgcagaggctgagctcatcatcttcttctccgatgcactaattcctgcaaacatttcagcaaaccgaggatctctttcctgggagaagattgcatccgccttttccacggacttcccggcctcatgaacaccggctggtaggttggggacggggacctgggataagtcatacgatgacaatccatctctctggtgcacttccaattctgcctgctgttgctgaagttgcttgacgttggtgttggtgcagatgatgtactcaatctcatcagaatagggattctggaatgtgaagctgctggtgcggatcaacatccactcccggttcttggtgcgaaatcgatacatgaccgacaggacttggcctttcagcttaaccacctgctggaagctctcacgcagatggctttgatcctcagggtggcagaattccaaaatgtcctttcccagaagatcctggggttggtagccaatcacactgatacatcttggatccacaaatgtgatgattccatcggagttatgccgggataagaactctgtgggcaccgacatcccattcatgtccatgcatacaggagagctggtcacctggagtctcccaattgccacgaggcaatatttactgccttgtccccacatcagcgtcttcttcaggtatggtcattcctgctggtggccaggccttgatgtatcctgtacagtggaccacagcatattgggcttctccttctttcacagggccaaggccattcctgaaccttttcctcatggtggttattctgtttagaggaaggtggtccaaaggagcatttccacacctcatcctgcagatgaaagaccgccgcgagcccatgcacatcctcatggatgactgctgcccttctttcttgaccgtcccagtcttcaggtccaagatccggcctgtcattgagttttctgaggtgcacagttgctctctcagcttctccacgtcatcagaacgcacctgttcatacaatctagctccccagaacactctgactgggcctgattcagaacagggacgacggagtcagacacataaatcactcgccctgtctcagcagccaccacaaacagaaatccatcagctgcttcaaggatgagatgcttcagttcctgctctgtgaggaaggaaggcttgtacgcgccatcggtggacttgttccctgtacccctcatggacttcatgtgcgagacgaccatgcagaggatggtgagctcgtatgagcttccgacacagtgcgctgaatgtgtgcgaccatctcggagagctccgtgatgtactgagtcatcttgttcacgtctgcgcctatcgatttcactatgattctctctatcccaggaacgcccatgatggggcatctctttagagtcgaacctgcacatatactcg

SEQ ID NO: 349745 - DNA, 540 bp, Homo Sapiens
aaactgagaaaagtcaaaaggaaatatagcagaattcatcacacaggaattcatcaaagcagtttcatcatgagaaaaatgagttagttacagaattcaagaggctaacatgtgaccttgtatgctttccattaaaatgtaaatggtgaagttatgattaaactacaaagcaaataaaaatatgtaaatgacaaattaatgacagtaagtgtggaaataaacctaacactaatatcgatcataaaatcataattatgttcttttgtaatttaagtaaaatgtccccaaattattgagctaaaactttcaaatttgttttatttgaaggttggctttctgtttgtttttgagacaaagatgaatgcccaagtctcaaaattcctattgataatattaccaaaacttgtatcttctgggaaaatttcagagataaagatctttaaaagaaataacagagaagttgatgaaatatgcttaagccagatgcttctggctagaagagacagaattaagggggaaaaaaaccacaatgatgcgtga

SEQ ID NO: 349746 - DNA, 708 bp, Homo Sapiens
  misc_feature (393)..(463): n is a, c, g, or t
  misc_feature (531)..(531): n is a, c, g, or t
caaacaaaaaattaaaagggatagaatataatgaaatatattttgaacttaaattatattctatatgtgtatcttcctaggcaaaagctgtaatttccagagagaccattaggaacaggtagtatctatttttctccattatttatttctagaaactcataaaatggattgtatttttctataagaacaaatattaattaaggtatagatgactgaccaagggcttaatcaaataaaatgactaacagcatctatcataaagccacacaagccttatgttctcatctcaaaaatgctgtgacagctttttggctgctttaaccataagaaaaatgattggtggatgattttattagcccaggcttttaaaaactttcatctaagccacgtgcnnnnnnnnnnnnnnnnnnnnnnnnnnnnnnnnnnnnnnnnnnnnnnnnnnnnnnnnnnnnnnnnnnnnnnngttctcgagaccaccccgtgccaaattgatgaaaacccctgtctcctcctcaaaattcaaaaaatttnttggggggttattgggggcagggccccctaatcccccgcttctcccgggggggctaaaggcgggaggaaattgctttgaacatccgcgagggaggggggaaattttgctaaaaccccaagaatttttggggccccgtggcctcctcacccctccggtgggtaagaaaaaaaccaaaa

SEQ ID NO: 349747 - DNA, 573 bp, Homo Sapiens
cttacccgtaaattaatccatccacccagtgtgacatgttcctgccctaccctaattaatccatccaccttgtgatatgttccttccctaccctaagtaatccatccaccttgtgatatgttcctgcccttccccaactaatccatccaccttgtgatatgttcctgcccttccccaactaatccatccaccttgtgacatgttcctgccctaccctaaataatccatccaccactgtgacatgttcctgccctaccctaactaatccatccgccttgtgatatgttccttccctaccctaattaatccatccaccttgtgatatgttcctgcccttccccaactaatccatccaccttgtgatatcgtgccttatgacttcccccaccttgtgactatgcaccttgtaacattcttcccctgcccaaaaaaactgcccctaactgtaactttccactacctaccccaaacctatagaaccagttccactcccaccacccttcgctgactcctttctctgactcagcccacttgcacccaagtgaataaacagccttgttgctccactaaaag

SEQ ID NO: 349748 - DNA, 940 bp, Homo Sapiens
aagctccatttcatgagtaagcgtgagagccgctcagtttcctccagctctgctgaagccagcacagaagtagcccaaactcttccctctgctgacagcaaattttaggcaaagtcttgagaaagaagaaattgggtccagaaagggaagtgaggagaatcagatcccagacctttggggagaaggagcaaccgcctctggcacagcccatcagggagaaagagcagcttcctgagcgtcgtgggtacctggtacgtcacagccatcgttatcatcaagtacatctggccagataaagagatgaccccagggaacatcctgaccaggccggcttcctggatggctgtgttcaatgccatgcccaccatctgcttcggatttcagtgccacgtcagcagtgtgcccgtcttcaacagcatgcagcagcctgaagtgaagacctggggtggagtggtgacagctgccatggtcatagccctcgctgtctacatggggacaggcatctgtggcttcctgacctttggagctgctgtggatcctgacgtgctcctgtcctatccctcggaggacatggccgtggccgttgcccgagccttcatcatcctgagcgtgctcacctcctaccctatcctgcacttctgtgggcgggcggtggtggaaggcctgtggctgcgctaccagggggtgccagtggaggaggacgtggggcgggagcggcggcggcgagtgctgcagacgctggtctggttcctgctcaccctgctgctggcgctcttcatccctgacatcggcaaggtgatctcagtcattggaggcctggccgcctgcttcatcttcgtcttcccagggctgtgcctcattcaagccaaactctctgagatggaagaggtcaaaccagccagctggtgggtgactggtcagctacagagtcctcttggtc

SEQ ID NO: 349749 - DNA, 1388 bp, Homo Sapiens
cggagacaggctctggagggtggaagtgttagatccccgaggtctgtggagcccctcagtccccgccaccgcggaaaagctcagaccctttccctgcaggggtccagatcctggcgtcctcgccccacgcccgtccctctgttgcgccagctctgccgcgcctttacccagccagagggtctccacccagtcctaggccgggatcgggtcccggagctcctccgcaggttaccccgacagtagcccacccttctcgctccaggcctgggaatcgccccgccccggcctcctggcccgggtgcgccctggctcacctcacaaagcctcagctcacaaagcagcccaccctttctatctcagggctccaaccccaggctggactgggagcacactccagttgggatctgaggggcctacatcgctggcctgagcatgtgggcatcaggcttctattctggctctgccagctacccactgtgaccttagtctaacctctccctcctgggcctgttttcctatctgtcctgaagctccatttcatgagtaagcgtgagagccgctcagtttcctccagctctgctgaagccagcacagaagtagcccaaactcttccctctgctgacagcaaattttaggcaaagtcttgagaaagaagaaattgggtccagaaagggaagtgaggagaatcagatcccagacctttggggagaaggagcaaccgcctctggcacagcccatcagggagaaagagcaggttgagaagagtcctaagctaacagccccaaacaggtgggtgttgctcagctccctgaggcatgtggttgtaaggcagaacccacagaccttgcaggaagaaggctctcggggccatggcccaggtcagcatcaacaatgactacagcgagtgggacttgagcacggatgccggggagcgggctcggctgctgcagagtccctgtgtggacacagcccccaagagtgagtgggaagcctctcctgggggtctggacagaggcaccacttccacacttggggccatcttcatcgtcgtcaacgcgtgcctgggtgcagggttactcaacttcccagcagccttcagcactgcggggggcgtggcagcaggcatcgcactgcagatgggtatgctgggttttcatcatcagtggccttgtcatcctggcctactgctcccaggccagcaatgagaggacctaccaggaggtggtatgggctgtgtgttggcacagctgacaggtgtgctattgttgaggtggccatcgctgtctacaccttttggcacctgcattgccttccctaatcatcattggcgaccagcaggacagattatgctgtgatggcgaaagaagcgggagggggcacggccttga

SEQ ID NO: 349750 - DNA, 901 bp, Homo Sapiens
  misc_feature (392)..(418): n is a, c, g, or t
  misc_feature (787)..(814): n is a, c, g, or t
gcctacgactcacacaacaccaaaggaggagaagatatcccgccacttggtgagcacgggcccttctccgacacaatggtatgaagtcttctttactggtgaacacacaggagaaccaagagagggaagagaaggctctctagaacccaagtcctccaattccatttccaaaaccctcagccgggctcctatgtaagtccggcccatgccctctcccggcggccccccacatccctcaattgagggcctgtcatgctcatgggtgtgcccccttgccctgggcctgctggggttgtaaagtggtctggacttcaactgcctttctacccccaatggcagctgcccccttagcactcactgtgttggggagagggtgccgattgcaatggatnnnnnnnnnnnnnnnnnnnnnnnnnnnattgaaggaaaccctctcctctccccttcccttctctctcctgtccatgggaagcttttccccctctgcagggctccctcagctggaccatcgtccctgcttctcttatgatcgccccacctcatttccatttcagtctggggaccccatttctccctcctttccaacttccttcctttcttgtcctgtttcccttcctgcccttgcagtcctgaggtcctgcagccccggcccctcctccgtgacctggtgtggccaggctgcggggacgggaggggacgtgggggccccgggtgtacatatataatgtatattttttcaatgttgtcgtgagtgcagcccatgttcctgcgtgcagctcacggcctnnnnnnnnnnnnnnnnnnnnnnnnnnnnaggcatcgtcatgtcctggggcaggggcggggggttgggtgtggtgagggaggggacatatcctagggttttcaaataaaacaatca

SEQ ID NO: 349751 - DNA, 2190 bp, Homo Sapiens
  misc_feature (88)..(115): n is a, c, g, or t
  misc_feature (485)..(516): n is a, c, g, or t
tgattgttttatttgaaaaccctaggatatgtcccctccctcaccacacccaaccccccgcccctgccccaggacatgacgatgcctnnnnnnnnnnnnnnnnnnnnnnnnnnnnaggccgtgagctgcacgcaggaacatgggctgcactcacgacaacattgaaaaaatatacattatatatgtacacccggggcccccacgtcccctcccgtccccgcagcctggccacaccaggtccacggaggaggggccggggctgcaggacctcaggactgcaagggcaggaagggaaacaggacaagaaaggaaggaagttggaaaggagggagaaatggggtccccagactgaaatggaaatgaggtggggcgatcataagagaagcagggacgatggtccagctgagggagccctgcagagggggaaaagcttcccatggacaggagagagaagggaaggggagaggagagggtttccttcaatnnnnnnnnnnnnnnnnnnnnnnnnnnnnnnnnttgcaatcgtcaccctctccccaacacagtgagtgctaagggggcagctgcctattgggggtagaaaaggcagctgaagtccaggcccactttccaacccagcccagccccagtgcaaggggcacacccaggagcatgacagccccaaaagtgagggatggggggccggggaaggggcagggcgaactccagagggcccgctggggttttgaaatgaaaggaggactggttctgaagcctctctccctcttggtctctgtgttcccagaaagtccttctcccatgtctggagtgtctgtttcaccagggcagaattccccctctgcgtggggagaggtgtaggccttagtagcggtgtgggggggtctcgatgatgcgtctctcgtcgctgctgggggaatcggccacctccgagtcactgctgtcctcatcctcctgctggcccccaacagcccccgtcacacaggactgccgattctggtaggactccatggggttcacaatgatggtgagagctgagtcatcccagaagaggtctgggtccttggggtcactggaggcccctggaggcccgccggcccctgagacgcggcggtgaagggaatggatgcgcaccaggcccaggacgaccatgagcaccaggaagcccacgcacaccacaatgatgagggttgcggcgctgggtatcatggagtttctgtgggagctggctaggctgtgtccagccatctcaggcgggggctggtgaccacggtgcaggaactgctgggagctgagcacgtggctggggtgggcaacccggttcatgctgtgcaggacattgacctccacgatgaattcattgctggagtaacggccattcatttccgagcaggaaagccggaacttcctggtgtagagggcagctccgtgtcgcagccgataacgagcctgcctcaggatctcttcatacacagtgatgctctccaccccagcaatagtgaggtaggcagatgtgttggtgagctccagcccccgctgctgcagagaggttgtgtccaggagcaggctttcccgctcgggatccaggtcatcccccaccagagaaatttcacagccatccaggttgtgcacaatctcatccgacatgcgtgtgtctgtcactgtgccctgccaactctcatcctttttggcctccacctggtgagaaatggagcaggtgatttgaagatcagggaacaaagggacgccgttggttccctcaaagtccacagctgggcgggcaaaatgagcagtgccactcagcaggatctggggggcgtcaggctgaaggacgaccacgtagccctccacttcagggatggagacgcaggactcttcgctgaagcacttgacagcagtggtgaggcgcaggggcctgacgccgggcgtggcaaagcgcagagtgttcatgtaagccacatgctgcagggcatggttgaaggtctccacatcatccccctccagggtgagcagggactgtgaggggttcacgtggaccttcatgcctttgcccaggctctcgaaatccctatagtccagcccctccccacatgcatagaggcactcgatgacctcgcggctctccaggcgacctgagcgcacgctgaaaccagccaggtagccatggaagtagtggtggatcgacaaagggtc

SEQ ID NO: 349752 - DNA, 642 bp, Homo Sapiens
ggggggggggaaggtgtcccgctctcagttaaagaaacagatctggaggggctgactgaggcgccccgggccaggtggcaggaagcagaggggcgagtgcccctgtcaaactgtctgactccagaaagggagacagagtctctatgggcccaggaccagtggcttggctgggcatggggggacaattccagtacggactggcagctactgggtcccaacaggagtagccggtcgctgagaagggagtgccattccccttgtccagaaacagcacgtccaggtcacggcgtgcaagtggagtgagcttgggagtgggagagcgcgtgcatttccagctcacacacgccccagccaggaggtactttaggcccgagtacatctgcggcaacagcactcggcatccagcctacagtgctgtgccctggcacggatcggatgcctgtcaatgccacctttcaaaaacctctgtagtcaacaccgaggggcaatggcaaggggtctattttcccacagcaaaatacattctaatttggtaaatgtatttcagtccagcctccccttggcctgcagagaaagggcagcagagtcaccacgggctctgtaactatctggccatcgaacgtgcacagatggctgagatgt

SEQ ID NO: 349753 - DNA, 346 bp, Homo Sapiens
  misc_feature (26)..(26): n is a, c, g, or t
  misc_feature (176)..(176): n is a, c, g, or t
  misc_feature (270)..(270): n is a, c, g, or t
aaaaatcacaacccttaattacctanatttgtcatttaaaggtttaaagaaaaaagggaggggctttcttacaagctttttcacaagtgtcacattttctccttaaaagggaaggatttcaaaagaaaggtgaaatagcttaaacagaaatattcataaaaaggaactttacaganattgtcaacaatattaagacaaaattgaactaaccggtttcattaccgcatcttcccccgaccccaacccccagtgtgttccgccaggactagnaacaggctttgtgttcaggacaggaaatgcttcaaaatcccagtggaaatggaactgtggctaaaaacccgaacag

SEQ ID NO: 349754 - DNA, 781 bp, Homo Sapiens
ttggggccctccaacctcaggtgatgagctgagaaagatgttcacgtctaagcgtccagtgtgcacccagcgctccatagacgcctttgtgaactgaaaagagactggcagagtcccgagaagatggggccctggctttccagggagtgcagcaagcagccggcctgcaggtgagcatggaggcccggccctcaccgcctcgaagccatgccccagatgccactgccacagcgggcgctcgctcctccctaggctgttttagtatttggatttgcattccatcccttgggagggagtcctcagggccactagtgatgagccaagaggagtgggggttgggggcgctcctttctgtttccgttaggccacagactcttcacctggctctgaagagccactcttacctcggtcccctcccagtggtcccaccttcttccaccctgccctgccaagttccctgcatgcccaccgctctccatcctccctcctctccctcttcctcccgtggagacagtatttctttctgtctgtccctttggcccagacccagcctgaccaacgatgagcatttcttaggctcagctcttgatacggaaacgagtgtcttcactccagccagcatcatggtcttcggtgcttcccgggcccggggtctgtcgggagggaagagaactgggcctgacctacctgaactgactggccctccgaggtgggtctgggacatcctagaggccctacatttgtccttggataggggaccggggggggcttggaatgttgc

SEQ ID NO: 349755 - DNA, 3675 bp, Homo Sapiens
  misc_feature (1955)..(1994): n is a, c, g, or t
  misc_feature (2016)..(2016): n is a, c, g, or t
  misc_feature (2170)..(2170): n is a, c, g, or t
  misc_feature (2644)..(2653): n is a, c, g, or t
  misc_feature (2971)..(2986): n is a, c, g, or t
  misc_feature (3362)..(3435): n is a, c, g, or t
agcgggggcgtggttgggtggtaagatggcggctgtgagtctgcggctcggcgacttggtgtgggggaaactcggccgatatcctccttggccaggaaagattgttaatccaccaaaggacttgaagaaacctcgcggaaagaaatgcttctttgtgaaattttttggaacagaagatcatgcctggatcaaagtggaacagctgaagccatatcatgctcataaagaggaaatgataaaaattaacaagggtaaacgattccagcaagcggtagatgctgtcgaagagttcctcaggagagccaaagggaaagaccagacgtcatcccacaattcttctgatgacaagaatcgacgtaattccagtgaggagagaagtaggccaaactcaggtgatgagaagcgcaaacttagcctgtctgaagggaaggtgaagaagaacatgggagaaggaaagaagagggtgtcttcaggctcttcagagagaggctccaaatcccctctgaaaagagcccaagagcaaagtccccggaagcggggtcggcccccaaaggatgagaaggatctcaccatcccggagtctagtaccgtgaaggggatgatggccggaccgatggccgcgtttaaatggcagccaaccgcaagcgagcctgttaaagatgcagatcctcatttccatcatttcctgctaagccaaacagagaagccagctgtctgttaccaggcaatcacgaagaagttgaaaatatgtgaagaggaaactggctccacctccatccaggcagctgacagcacagccgtgaatggcagcatcacacccacagacaaaaagataggatttttgggccttggtctcatgggaagtggaatcgtctccaacttgctaaaaatgggtcacacagtgactgtctggaaccgcactgcagagaaatgtgatttgttcatccaggagggggcccgtctgggaagaacccccgctgaagtcgtctcaacctgcgacatcactttcgcctgcgtgtcggatcccaaggcggccaaggacctggtgctgggccccagtggtgtgctgcaagggatccgccctgggaagtgctacgtggacatgtcaacagtggacgctgacaccgtcacttgagcttggcccaggtgattgtgtccaggggggggcgctttctggaagcccccgtctcagggaatcagcagctgtctaatgacgggatgttggtgatcttagcggctggagacaggggcttatatgaggactgcagcagctgcttccaggcgatggggaagacctccttcttcctaggtgaagtgggcaatgcagccaagatgatgctgatcgtgaacatggtccaagggagcttcatggccactattgccgaggggctgaccctggcccaggtgacaggccagtcccagcagacactcttggacatcctcaatcagggacagttggccagcatcttcctggaccagaagtgccaaaatatcctgcaaggaaactttaagcctgatttctacctgaaatacattcagaaggatctccgcttagccattgcgctgggtgatgcggtcaaccatccgactcccatggcagctgcagcaaatgaggtgtacaaaagagccaaggcgctggaccagtctgacaacgatatgtccgccgtgtaccgagcctacatacactaagctgtcgacaccccgccctcacccctccaatccccccttctgaccccctcttcctcacatggggtcgggggcctgggagttcattctggaccagcccacctatctccatttccttttatacagactttgagacttgccatcagcacagcacacagcagcacccttcccctgaggccggtggggaggggacaagtgtcagcaggattggcgtgtgggaaagctcttgagctgggcactggccccccggacgaggtggctgtgtgttnnnnnnnnnnnnnnnnnnnnnnnnnnnnnnnnnnnnnnnnggctctcgccccaggatagaanctgcccagaaactgctgcctggctttttttcttccgagcttgtcttatctcaaaccccttccagtcaaggaactagaatcagcaacgagagttggaagccttcccacagcttcccccagagcgaagaggctgtagtcatgtccccatcccccantggattccctacaaggagaggccttgggcccagatgagccagtacagactccagacagaggggcccttggggccctccaacctcaggtgatgagctgagaaagatgttcacgtctaagcgtccagtgtgcacccagcgctccatagacgcctttgtgaactgaaaagagactggcagagtcccgagaagatggggccctggctttccagggagtgcagcaagcagccggcctgcagacccagcctgaccaacgatgagcatttcttaggctcagctcttgatacggaaacgagtgtcttcactccagccagcatcatggtcttcggtgcttcccgggcccggggtctgtcgggagggaagagaactgggcctgacctacctgaactgactggccctccgaggtgggtctgggacatcctagaggccctacatttgtccttggataggggaccggggggggcttggaatgttgcnnnnnnnnnngttacccaagggatgtcagttttttatccctctgcatgggttggattttccaaaatcataatttgcagaaggaaggccagcatttacgatgcaatatgtaattatatatagggtggccacactagggcggggtccttcccccctcacagctttggcccctttcagagattagaaactgggttagaggattgcagaagacgagtggggggagggcagggaagatgcctgtcgggtttttagcacagttcatttcactgggattttgaagcatttctgtctgaacacaaagcctgttctagtcctggcggaacacacttnnnnnnnnnnnnnnnnaagatgcggtaatgaaaccggttagtcaattttgtcttaatattgttgacaattctgtaaagttcctttttatgaatatttctgtttaagctatttcacctttcttttgaaatccttcccttttaaggagaaaatgtgacacttgtgaaaaagcttgtaagaaagcccctcccttttttctttaaacctttaaatgacaaatctaggtaattaaggttgtgaatttttatttttgctttgtttttaatgaacatttgtctttcagaataggattgtgtgataatgtttaaatggcaaaaacaaaacatgattttgtgcaattaacaaagctactgcaagaaaaataaaacacttcttggtaacaaccaatccaaannnnnnnnnnnnnnnnnnnnnnnnnnnnnnnnnnnnnnnnnnnnnnnnnnnnnnnnnnnnnnnnnnnnnnnnnnccccttaccccccacctttcaaaccacacctcccgacttagtactccctcgtccgaccacgcaagcctgataaaattccctccgcccgtttctttcctgccctgtggtcgcctaaatttaactccttaaaggttctcgtttcgcttgttcccctagaacgttttgtgatcccacctcgtcctcccttgttccttcccaaaaattaatctaccctcgccttcgtcgtcgtcgattttcccc

SEQ ID NO: 349756 - DNA, 2546 bp, Homo Sapiens
  misc_feature (658)..(658): n is a, c, g, or t
  misc_feature (703)..(703): n is a, c, g, or t
  misc_feature (729)..(729): n is a, c, g, or t
  misc_feature (792)..(792): n is a, c, g, or t
  misc_feature (894)..(894): n is a, c, g, or t
  misc_feature (2284)..(2284): n is a, c, g, or t
  misc_feature (2321)..(2321): n is a, c, g, or t
  misc_feature (2498)..(2498): n is a, c, g, or t
  misc_feature (2519)..(2519): n is a, c, g, or t
ggggagttgtagtcgcgatcctgaggtaacggataagtttataccatggatagcacaagggagaagtgtgacagttacaaagatgatcttctgcttaggatgggacttaatgataataaagcaggaatggaaggattagataaagagaaaattaacaaaattataatggaagccacgaaggggtccagattttatggaaatgagctcaagaaagaaaagcaagtcaaccaacgaattgaaaatatgatgcaacaaaaagctcaaatcaccagccaacagctaagaaaagcacaattacaggttgacagatttgcaatggaattagaacaaagccgaaatttgagcaataccatagtgcacattgacatggatgctttctatgcagctgtagaaatgagggacaatccagaattgaaggataaacccattgctgtaggatcaatgagtatgctgtctacttcaaattaccatgcaaggagatttggtgttcgtgcagccatgccaggatttattgctaagaggctgtgcccacaacttataatagtgccccccaactttgacaaataccgagctgtgagtaaagaggttaaggcaaatactttgccgattatgatcccaattttatggccatgagtcttgatgaagcctacttgaatanaacaaagcacttagaagaaagacaaaattggcctgaggataaaanaaggtatttcatcaaaatgggaagcnctgtagaaaatgataatccaggaaaggaagttaataaactgagtgagcatgaacgatccatcnctccactactttttgaagagagtccttctgatgtgcagcccccaggagatcctttccaagtgaactttgaagaacaaaacaatccccaaatactccaaaacncagttgtttttggaacatcagcccaggaagtggtaaaggaaattcgtttcagaattgagcagaaaacaacactgacagccagtgcaggcattgccccaaatacaatgttagcaaaagtatgcagtgataagaataaaccaaatggacaataccaaattcttcccaatagacaagctgtgatggacttcatcaaggatttacccattagaaaggtttctggaataggaaaagttacagagaaaatgttaaaggcccttggaattattacatgtacagaactttaccaacagagggcattgctttctctccttttctctgaaacatcttggcattatttccttcatatctccttggggtctaggttcaacacacctgacgagggatggagagaggaaaagtatgagcgttgagaggacattcagtgagataaataaagcggaagagcaatacagcctatgtcaagaactttgcagtgagcttgctcaggatctacagaaagaaagacttaagggtagaactgttaccattaagttgaagaatgtgaattttgaagtaaaaactcgtgcatctacagtttcatctgttgtttctactgcagaagaaatatttgccattgctaaggaattgctaaaaacagaaattgatgctgattttccacatcccttgagattaaggcttatgggtgttcggatatctagttttcccaatgaagaggacaggaaacaccaacaaaggagcattattggctttttacaggctggaaaccaagccctgtcagccactgagtgtacattagagaaaactgacaaagataagtttgtaaaacctctagaaatgtctcataagaagagtttctttgataaaaaacgatcagaaaggaaatggagtcaccaagatacatttaaatgtgaagccgtgaataaacaaagtttccagacatcacaaccattccaagttttaaagaagaagatgaatgagaatttggaaatatcagagaattcagatgactgtcagatacttacctgtcctgtttgctttagggctcaagggtgcatcagtctggaagccttgaataaacatgtagatgaatgtcttgatggaccttcaatcagtgaaaactttaaaatgttctcgtgttcacatgtttctgctaccaaagttaacaagaaagaaaatgttcctgcttcttcactttgtgagaagcaagattatgaagcccatccaaaaattaaagaaatatcttcagtagattgtatagctttagtagatactatagataactcatctaaagcagaaagcatagatgctttaagtaataagcatagcaaggaagaatgttctagtctcccaagcaagtcttttaatattgaacactgtcatcaaaaatctntcttctactgtttcattgggaaaacgaagatgttggnatcatttagacaaagaataccggccagccttacttaatgtggaagtgaaaacaggccaagctctagtttgtcctgtttgtaacgtagaacaaaagacttcagatctaaccctgttcaatgtgcatgtggatgtttgcttaaataaaagttttatccaagaattaagaaaggataaantttacccagttaaatcacccnaagaaagctccagaagtactggtagct

SEQ ID NO: 349757 - DNA, 1018 bp, Homo Sapiens
aagaaaataaaaccaaacaatcccaaacatacccttgatatattttttaagtaaacattgaacattttatcattaatttttaattgaaactagttattttataatcaatgaatttgttctttctgattttaagtttgcagatttatttagtgaaggcaagtgcaataatccttcctcagatgatgtttgcttttctaagatacatatactgattctgtgtatctttttttataaccatgagaattttacttccattatacatcaattggaaatcaatcctgttaagagataattcttaaaagggaaattaggaatgggataagaaggtgatttttttattatttttatactgaatataaaaacatttgtaagggctctcaaagattcacacatgcctatattatcataagaatttttcagcacttaactactttgttggcattgatcctagtgtctttaaatacttcatgagcattcataattaaaatttatcttaagttctatgaagagtattaatgtaactagcataagtggttttcttcaggaaaataaatatcacagtattatctgtgttaaaatggtttttgcctaaaatataatttttaatttggcttttcttatttaaaattccattatcttatgaataagcacttgaatcagtttttaaaatatttagtctaagatgattcaaagtagttttattttaatacaggacttttaaatggcagtatttcatttcttgtcaattatgttggtactttccacaaatctataaagaaggataaattgtaccatcattttattataatcctcaagagaaaatgtgtaattcaaaagattaatgtgtattaaaacacattatgtatcttagttacatttctatcagtacttttattaatatttgtgaaagaagacagcttaatagtagttagcttaagtagtttctccaagtacttttgtgctatcaatgagttcttctcaaaaaataattagttaggccaggcacaatggctcacac

SEQ ID NO: 349758 - DNA, 738 bp, Homo Sapiens
gtcttacaccccggcttacctagttaactacttacctagttaactacttacctagttaaatccactggtgtaggcacagccatgacaaaactgacagtttattaatttgtgattagcattctagctattcatgttcttcaagcatgcatgaagaattccggtctctgaacattgtcctcaatacaacttctgtaaacagatgttcttaactttttcttctttgttgaaagataccttccaactctaaactttcatgattttcctgagtatttcctggccattcaagctttttccactctactaagctgtctagattttatccattttaccttgatgatccagattttgggcagttcaaaaatgagtagagagtaagggggaagagaactattcccactcccaacagataaatatcatgctcagtagacactctgtgtccagttttgttttctgctttttccatctgttccacccacttgcttacccatacataaaagcctttccttagtctcttgagaaaatatatagaaggaacagtttgcacagcagcaaaatagcctgaaatgtgctccagttctttatggttaacattatcgtttagaccatatgacccaatttgcctcagacagtctcagcgtgtaattattaataaaactcctttttcactctcaaaattgtccatgtgaataataaatgatacgaccagcataattatgggatctcagccagctgaaggga

SEQ ID NO: 349759 - DNA, 461 bp, Homo Sapiens
  misc_feature (77)..(130): n is a, c, g, or t
gactgtttattaagcacctactgtgtgccaagcgcttttacgtggcttctccctcagccagccttgagaaggctggnnnnnnnnnnnnnnnnnnnnnnnnnnnnnnnnnnnnnnnnnnnnnnnnnnnnnnggcggagacctgtcccacgatcacccagcaggagtcgtggcagaacggagcatcagccagaccctgttgtgggcgttgtcatcaagggagcttgaatggagggtctggtgtcagatacagccgactccagccccagctcatcccccatgatgctgtgtgacccactgggcactctggtgagggagctttccagacatcaacagcccactctgcttccctttttgagtcccctgtccagcactgcctagtgttggagggtagaccaaggctgtgcatgattcaccccctccttccatcctggagctggcagtgaataaaagcccgtatttac

SEQ ID NO: 349760 - DNA, 464 bp, Homo Sapiens
cactccacaccaaggcctctggatgccagccggggccgccgccttgggggcccaagagacccagcccctgagaagtccagagccacctccattttacagacaaagcagctgagaccccagccgaggggcggagacctgtcccacgatcacccagcaggagtcgtggcagaacggagcatcagccagaccctgttgtgggcgttgtcatcaagggagcttgaatggagggtctggtgtcagatacagccgactccagccccagctcatcccccatgatgctgtgtgacccactgggcactctggtgagggagctttccagacatcaacagcccactctgcttccctttctgagtcccctgtccagcactgcctagtgttggagggtagaccaaggctgtgcatgattcaccccctccttccatcctggagctggcagtgaataaaagcccgtatttacaaagatg

SEQ ID NO: 349761 - DNA, 987 bp, Homo Sapiens
  misc_feature (453)..(512): n is a, c, g, or t
  misc_feature (602)..(655): n is a, c, g, or t
actctagaggatctcggactacgggggaagggatatgggagctggagctttgatggatgaataggtgttcaccggatctgggcagaggggtcatccgctccccaggtgggcactgataaaggaaggtacaggcctcacctggaactgccaagggcagcctccagaaatgctcggctgtctcggggcacgctccagtatgccagtcctgcgggattacgtccagctacttccagaaacactcagtgtcccctcccctcaggctctgccttggcctggccttgtccagtctaccctggacaagatgccgtgtgtttgaggcccagcagagtaagcccttggccgtgatgtgtctgaaatacctgttaggggttccctccatatgtcagagcctctctgggatgaagttcaagccagaaaacccagtcgaggctcaagtttgaatttcagcttcannnnnnnnnnnnnnnnnnnnnnnnnnnnnnnnnnnnnnnnnnnnnnnnnnnnnnnnnnnngactaatcccattgactgtttattaagcacctactgtgtgccaagcgcttttacgtggcttctccctcagccagccttgagaaggctggnnnnnnnnnnnnnnnnnnnnnnnnnnnnnnnnnnnnnnnnnnnnnnnnnnnnnnggcggagacctgtcccacgatcacccagcaggagtcgtggcagaacggagcatcagccagaccctgttgtgggcgttgtcatcaagggagcttgaatggagggtctggtgtcagatacagccgactccagccccagctcatcccccatgatgctgtgtgacccactgggcactctggtgagggagctttccagacatcaacagcccactctgcttccctttctgagtcccctgtccagcactgcctagtgttggagggtagaccaaggctgtgcatgattcaccccctccttccatcctggagctggcagtgaataaaagcccgtatttaca

SEQ ID NO: 349762 - DNA, 1420 bp, Homo Sapiens
  misc_feature (332)..(385): n is a, c, g, or t
  misc_feature (475)..(534): n is a, c, g, or t
gtaaatacgggcttttattcactgccagctccaggatggaaggagggggtgaatcatgcacagccttggtctaccctccaacactaggcagtgctggacaggggactcagaaagggaagcagagtgggctgttgatgtctggaaagctccctcaccagagtgcccagtgggtcacacagcatcatgggggatgagctggggctggagtcggctgtatctgacaccagaccctccattcaagctcccttgatgacaacgcccacaacagggtctggctgatgctccgttctgccacgactcctgctgggtgatcgtgggacaggtctccgccnnnnnnnnnnnnnnnnnnnnnnnnnnnnnnnnnnnnnnnnnnnnnnnnnnnnnnccagccttctcaaggctggctgagggagaagccacgtaaaagcgcttggcacacagtaggtgcttaataaacagtcaatgggattagtcnnnnnnnnnnnnnnnnnnnnnnnnnnnnnnnnnnnnnnnnnnnnnnnnnnnnnnnnnnnntgaagctgaaattcaaacttgagcctcgactgggttttctggcttgaacttcatcccagagaggctctgacatatggagggaacccctaacaggtatttcagacacatcacggccaagggcttactctgctgggcctcaaacacacggcatcttgtccagggtagactggacaaggccaggccaaggcagagcctgaggggaggggacactgagtgtttctggaagtagctggacgtaatcccgcaggactggcatactggagcgtgccccgagacagccgagcatttctggaggctgccttggcagttccaggtgaggcctgtaccttcctttatcagtgcccacctggggagcggatgacccctctgcccagatccggtgaacacctattcatccatcaaagctccagctcccatatcccttctccaggctgaagccagcaggattggaggcagactctatatatagagcaggcactgcctgggcatggcagctatgatggtgggaagtggccttcagaatccagtccatcgctgggattacattgttttgtgggtgagaggaattgtttacggacactccaggttgtagccgaactgggccggtacaggtgaccaggtgacttcaactccatcccctcaaatgggtaggtgtggggaggggaatgagaccaggtaacacaaaacacttaaaaagtacagaaaaactggaaaacacaaacacagatgacttgtccaaagtgcatccttctcaacccagagggcagggcctgcaaacagagtcccaggtgcctggggcaagacctggcagccgccttcagggggcggctcagtacggctatcgcttataaaaagtaataaattaggctgggcccaagtgtcacgc

SEQ ID NO: 349763 - DNA, 608 bp, Homo Sapiens
gattacacacacacattgattaaattataggaataataggtatttttggcaactgcagtagtcttgagaaaagtctgcctttagcaattattcgtagtatttatcttcagaaatcaggattgagttggttggtctgcattcatataatgctttgaatgtagataaatggtcaataaatacatgaatgaattgatattgtgaaatagaattctcagtcataaactgaagtatttagaaataaaaggaatgtaatttcttgcttattggtaataactttgtaaagtggagtaaaaagaatgaaaaaattgaaattttaattctcttcaaatggggaagggaaaatagaaatgtattttatattctaaatcttaagagtcattaggttgatgtttgcaattttttatagttaatgcaaggcatgttaaaatataatttgtcttggttttaacattctgagccactgtgtagcagaatttatctgtattacttgacattgcccaattcttcctatattctgtgggataatgttttagctttacttgttcaattggaatatagtttgtacttttttagtttagttattttacccaggaggcagctgttagtta

SEQ ID NO: 349764 - DNA, 1363 bp, Homo Sapiens
gtcttcttttagggagcaggagtgcatcttggtaattgagggtggatgttgtgtgtgctggggaaggggtccttctgtttggtgctacccttgtctactctgcccctggatggtgcggggtgctttctccacccccacactccctgctcagctcctcgtgctgccctgcatgcccaggcttgtgagccaagctgctttttggggcaggagtagcagcaggtgggaggggttacccatcagcccttgcaagtcccccactcaggcctctggaaggtccagggatgggctctgatgagagggtaaaagatgctcagggaaacacaggcctcagctgcctagaggaccctccccctgccttgcagtgggctcgggtagagcagtatcaggagctagggttgtctgctgcccacactcctgcttttagggatatctaactgctaaggagggagttgacatcccccttctggctcatgtgtctgacaccaacaacatggtctctgtccctctctctttgactctccctttgtcctccccatagagctggggtggggtggatccctatacctggggcaggcagccccaaagtgcggagagggggatggcagagactgtaaaggcgccactggactctggcaaggcctttattacctttactcccctccctctcccatcaccagcctcaaggcctgaggggtgcaggggctcctggcagctactgggtgaggtttcctggcacagactcacccttctttctggcaccacctctttcccttttgaagagacagcaacagccgtagcaaaagcagctgctgctcctgctatgagggtgtatatattattttacccaaagctctggaattgtacatttattttttaaaactcaaagagggaaagagccttgtatcatatgtgaacattgtatcataggtaatgttgtacagacccttatatacagtgatctgtcttgttcctgcagcaaaaatcctctatggacataggaggtgctgtgtcccatgccctcttgccctgacagtgtcccatgggcccccttctgctccctgccccctccctgctactgctgatgcactctcctctccctgcagcccctggcttcccagccttcctcctgaccccttccaacagccttggaactccagctgccaccaccctctgggtcggacactgggacccactggcccagtcttggctgctgcttacccctagccttgatgcctgcccagggacccccagccccctcccgttgccctgcagctttaacagagtgaaccatgtgtattgtacaggcgcggttgtcattgcagaaaccgctgggtggagaagaagccgataaagtctatgaatc

SEQ ID NO: 349765 - DNA, 195 bp, Homo Sapiens
caaaactattttctactccaatgtgcaaagcaacctaacaagaaaaaccttaaatatttattctttttttccctgctaatgactggactgcattaacctcgtattttcatttgaaaatcatcttgtttcaatgataattgctttgtcatcaaaacaaataatttttttaaatttagtttgatgactgacagcacc

SEQ ID NO: 349766 - DNA, 930 bp, Homo Sapiens
ccaaaattaggtggtaccggtccggaatttccgggatcgcagaggctgtcggactctgactgcgcggagaccgctggactctggtcgcggccttagtccgctgatcctcgcttgggtgcccgcccttagcggcccggcgttgaattccgggaagtgggagcttcaggctcgctccgtgcgggtatgggcgctaatgtcacttgggatggttgcgcaaggacatcgcggcggacactgacaaggaaccggggaggaacgggggtggggagagactgcgatgggactcgggaagccgggaagggccgcgctgaataagcctaaggggccgggtcgcaaggagtgtcgggtagcacaggcctcggctcagtcggagcgccaggcctcagggtccgggcgggggctgctgcgtcacaccaggcagcctgggaacgcaactgttgggcaaccgtggtggcctctcgccacctcttacgcttgggcgatctgcgattgacgcatcctgggagctgatgtcccgcacgggcggggcgccggaggaggagagaaaatagagacccggttgttgacagcctgtgatgccgcttgattcatgtgtgggtggcctggtttagaaatgtaccacccttcctttctaggttcctccccggagggcggggtgacgggtgcggcgccgaatcgcaacaaaaaacgctgctcgagggatgttagtaactgtctcagcttaagttgctgccttttagcttacagtttgtatcgtaactgtaattggggatcttagttaaatcccttcagtgtgttggaaacatatttttaagtgtatttttgaaacatacttagagcatttgtgaaatgcttttttgaaagcgtcttttaaatcaaaattctgttacccttaatatttacagtctgccagaatgtactgtactcctc

SEQ ID NO: 349767 - DNA, 891 bp, Homo Sapiens
  misc_feature (32)..(32): n is a, c, g, or t
  misc_feature (87)..(87): n is a, c, g, or t
  misc_feature (124)..(124): n is a, c, g, or t
  misc_feature (380)..(395): n is a, c, g, or t
  misc_feature (875)..(875): n is a, c, g, or t
tgctgtgcaactctgcaagtttctgtctttgnaggaaacagccctgagtctccatttgaaccctgggaaaacattattctccctccnaccttctttcagactgaatgcctattcaagggccccnacggtgaatcacggagtctgaatctaggcacgtggagctgatccagaggatgtggggaggagcctggcacaggaggacaaagcaaagcatctgctcattcaaatatctgctgagcaatctactgtgggccagataccccagagagggcacacaggagaagcatatttcaaaaaccaaggttaggacaggaaaatatcctctttccctgggttagcaacttagaaccacgagtacttcacttaggtgatcctggacnnnnnnnnnnnnnnnncgagcctacttttaaagaattatgcacaactctgggaacaaatcagtgcttaatttacctcagatattccagctacctagcacggcccagcacacaaagaggttttgaaatccatcctgcctgcaatggaatccttggctgataaatacacgtggccctatctagccagtcacaagttatgtgcgtaacaaggcaaaaaagcagcacagaccacttgaaatctcttttcagaacactttagtaatttttaacttttttccttttcggttggaaacaagtggcagaaagatttatttccttcctgtccctgccctgtgagggataccaatatattatggaactgtcagaagatggtggaagatgggaagacttgtggattcagcgtaggataaagaatgggggatattttcttccacagtttagacaactcctgtttaatgagatgctgacttcttcctggtatttctgagatgcaggaanaaaagctcaattctga

SEQ ID NO: 349768 - DNA, 417 bp, Homo Sapiens
gaaggaggaagtaacgctcaagctgtgtcattgttcttccctgtagacccggactattaaacgttaggttgcagaaactttgtgtgaaacttttgcctctgccttaatctcatccctcggataggatgaaactcagaagtgaggagtcagagccaattttaaacaagtccattcagacctcataaatttcaagtttcctaaagatatttcagagatccctgtgatttcatggacataatttcaaacacattgctctaactgcttctaccagccttcctctttctttccttcaagtcaaaaacttgcagtttcttgaaaaatcttccttaaaatctggaatttagaattaaatatttgaaaatcccaaattgggcaggaaagcttgcagtctttttcttcttccttcctctcttcctc

SEQ ID NO: 349769 - DNA, 1129 bp, Homo Sapiens
ccggaattctcgggatgagctgtgggcgcaaccccagtggcagttatgtgtcctgcacccctagagatgccatttgtgggcagctccagtgccagacaggtaggacccagcctctgctgggctccatccgggatctactctgggagacaatagatgtgaatgggactgagctgaactgcagctgggtgcacctggacctgggcagtgatgtggcccagcccctcctgactctgcctggcacagcctgtggccctggcctggtgtgtatagaccatcgatgccagcgtgtggatctcctgggggcacaggaatgtcgaagcaaatgccatggacatggggtctgtgacagcaacaggcactgctactgtgaggagggctgggcaccccctgactgcaccactcagctcaaagcaaccagctccctgacaacaagggatgctcctcaacatcctggtctaattggtacatggtaagacatgggaccagctaatggtaccgtgcccgactgcaacagcgaatctgccagctcaagggacccacctgccagtacagggcagcccaatctggtccctctgaacggccaggacctccgcagagggccctgctggcacgaggcactaaggctagtgctctcagcttcccggcccccccttccaggccgctgccgcctgaccctgtgtccaagagactccagtctcaggggccagccaagcccccaccccccaaggaagccactgcctgccgacccccagggccggtgcccatcgggtgacctgcccggcccaggggctggaatcccgcccctagtggtaccctccagaccagcgccaccgcctccgacagtgtcctcgctctacctctgacctctccggaggttccgctgcctccaagccggacttagggcttcaagaggcgggcgtgccctctggagtcccctaccatgactgaaggcgccagagactggcggtgtcttaagactccgggcaccgccacgcgctgtcaagcaacactctgcggacctgccggcgtagttgcagcgggggcttggggaggggctgggggttggacgggattgaggaaggtccgcacagccttctcgctcagttcaataaacgtgaagtctgggagc

SEQ ID NO: 349770 - DNA, 1060 bp, Homo Sapiens
ttttgggagctgtgggcgcaaccccagtggcagttatgtgtcctgcacccctagagatgccatttgtgggcagctccagtgccagacaggtaggacccagcctctgctgggctccatccgggatctactctgggagacaatagatgtgaatgggactgagctgaactgcagctgggtgcacctggacctgggcagtgatgtggcccagcccctcctgactctgcctggcacagcctgtggccctggcctggtgtgtatagaccatcgatgccagcgtgtggatctcctgggggcacaggaatgtcgaagcaaatgccatggacatggggtctgtgacagcaacaggcactgctactgtgaggagggctgggcaccccctgactgcaccactcagctcaaagcaaccagctccctgaccacagggctgctcctcagcctcctggtcttattggtcctggtgatgcttggtgccagctactggtaccgtgcccgcctgcaccagcgactctgccagctcaagggacccacctgccagtacagggcagcccaatctggtccctctgaacggccaggacctccgcagagggccctgctggcacgaggcactaagcagctcagggctctcagcaaagcccccacccccaaggaagccactgcctgccgaccccacagggccggtgcccatcgggtgacctgcccggcccaggggctggaatccccgcccctagtggtaccctccagaccagcgccaccgccctccgacagtgtcctcgctctacctctgacctctccggaggttccgctgcctccaagccggacttagggcttcaagaggcgggcgtgccctctggagtcccctaccatgactgaaggcgccagagactggcggtgtcttaagactccgggcaccgccacgcgctgtcaagcaacactctgcggacctgccggcgtagttgcagcgggggcttggggaggggctgggggttggacgggattgaggaaggtccgcacagcctgtctctgctcagttgcaataaacgtgacatcttgggagcgttaa

SEQ ID NO: 349771 - DNA, 2800 bp, Homo Sapiens
  misc_feature (2503)..(2503): n is a, c, g, or t
cgcggcgctgctgggttctccgaggcgacctggccgccggccgctcctccgcgcgctgttccgcacttgctgccctcgcccggcccggagcgccgctgccatgcggctggcgctgctctgggccctggggctcctgggcgcgggcagccctctgccttcctggccgctcccaaatataggtggcactgaggagcagcaggcagagtcagagaaggccccgagggagcccttggagccccaggtccttcaggacgatctcccaattagcctcaaaaaggtgcttcagaccagtctgcctgagcccctgaggatcaagttggagctggacggtgacagtcatatcctggagctgctacagaatagggagttggtcccaggccgcccaaccctggtgtggtaccagcccgatggcactcgggtggtcagtgagggacacactttggagaactgctgctaccagggaagagtgcggggatatgcaggctcctgggtgtccatctgcacctgctctgggctcagaggcttggtggtcctgaccccagagagaagctataccctggagcaggggcctggggaccttcagggtcctcccattatttcgcgaatccaagatctccacctgccaggccacacctgtgccctgagctggcgggaatctgtacacactcagacgccaccagagcaccccctgggacagcgccacattcgccggaggcgggatgtggtaacagagaccaagactgtggagttggtgattgtggctgatcactcggaggcccagaaataccgggacttccagcacctgctaaaccgcacactggaagtggccctcttgctggacacattcttccggcccctgaatgtacgagtggcactagtgggcctggaggcctggacccagcgtgacctggtggagatcagcccaaacccagctgtcaccctcgaaaacttcctccactggcgcagggcacatttgctgcctcgattgccccatgacagtgcccagctggtgactggtacttcattctctgggcctacggtgggcatggccattcagaactccatctgttctcctgacttctcaggaggtgtgaacatggaccactccaccagcatcctgggagtcgcctcctccatagcccatgagttgggccacagcctgggcctggaccatgatttgcctgggaatagctgcccctgtccaggtccagccccagccaagacctgcatcatggaggcctccacagacttcctaccaggcctgaacttcagcaactgcagccgacgggccctggagaaagccctcctggatggaatgggcagctgcctcttcgaacggctgcctagcctaccccctatggctgctttctgcggaaatatgtttgtggagccggggcgagcagtgtgactgtggcttcctggatgactgcgtcgatccctgctgtgattctttgacctgccagctgaggccaggtgcacagtgtgcatctgacggaccctgttgtcaaaattgccagctgcgcccgtctggctggcagtgtcgtcctaccagaggggattgtgacttgcctgaattctgcccaggagacagctcccagtgtccccctgatgtcagcctaggggatggcgagccctgcgctggcgggcaagctgtgtgcatgcacgggcgttgtgcctcctatgcccagcagtgccagtcactttggggacctggagcccagcccgctgcgccactttgcctccagacagctaatactcggggaaatgcttttgggagctgtgggcgcaaccccagtggcagttatgtgtcctgcacccctagagatgccatttgtgggcagctccagtgccagacaggtaggacccagcctctgctgggctccatccgggatctactctgggagacaatagatgtgaatgggactgagctgaactgcagctgggtgcacctggacctgggcagtgatgtggcccagcccctcctgactctgcctggcacagcctgtggccctggcctggtgtgtatagaccatcgatgccagcgtgtggatctcctgggggcacaggaatgtcgaagcaaatgccatggacatggggtctgtgacagcaacaggcactgctactgtgaggagggctgggcaccccctgactgcaccactcagctcaaagcaaccagctccctgaccacagggctgctcctcagcctcctggtcttattggtcctggtgatgcttggtgccagctactggtaccgtgcccgcctgcaacagcgactctgccagcccaagggacccacctgccagtacagggcagcccaatctggtccctctgaacggccaggaacctccgcagagggccctgctggcacgaggcactaagcaggctagtgctctcagcttcccggcctccccttccaggccgctgccgccctgaccctgtgtccaagagactcccaggctgagctggctgaccgacccaatccccctacccgccctctgcccgntggaccccggtggtgagaaagcccgaaagtctcagggggccagccaagcccccaccccccaagggaagccactgcctgccgacccccccaggccgggtggcccatcgggttgacctgccccgggcccaaggggctgggaatccccgccccctattgggtacccctccagaaccaagcgcccaccgcccttccgacaggtgtccctcggcttctaccttctgaaaccttcttccgggaaggttcccgcctgccctcccaaagccgggactttaaggggctttccaagaagggcggggc

SEQ ID NO: 349772 - DNA, 962 bp, Homo Sapiens
gagcggtacgagacctctgaaccccagagtcgggttctctgcgggtccgggagcaccccatcctgggcccgtacgtgcaggacctgtccaaattggctgtgacctcctacgcagacattgctgacctcatggactgtggaaataaagcacggactgtggctgccaccaacatgaatgagaccagcagcctggctctgaacttaggcatgctttatcttgccccctcggccctctctttctgacccccctttgctgctggttccctgagtctgtgccccttgaacccttcactctccctgatcacttgacttcactccctgccccctgcgccttcatggatctagagttcttagccccgtcctcccttaaacctgacttccgcccacagcaaccagctccctgaccacagggctgctcctcagcctcctggtcttattggtcctggtaatgcttggggccagctactggtaccgtgcccgcctgcaccagcgactctgccagctcaaggggacccacctgccagtacagtctcaggggccagccaagcccccacccccaaggaagccactgcctgccgacccccagggccggtgcccatcgggtgacctgcccggcccaggggctggaatcccgcccctagtggtaccctccagaccagcgccaccgcctccgacagtgtcctcgctctacctctgacctctccggaggttccgctgcctccaagccggacttagggcttcaagaggcgggcgtgccctctggagtcccctaccatgactgaaggcgccagagactggcggtgtcttaagactccgggcaccgccacgcgctgtcaagcaacactctgcggacctgccggcgtagttgcagcgggggcttggggaggggctgggggttggacgggattgaggaaggtccgcacagcctgtctctgctcagttgcaataaacgtgacatcttgg

SEQ ID NO: 349773 - DNA, 1259 bp, Homo Sapiens
  misc_feature (883)..(883): n is a, c, g, or t
  misc_feature (1083)..(1083): n is a, c, g, or t
aagagacggggttctctgcagggtccgggagcaccccatcctgggcccgtacgtgcaggacctgtccaaattggctgtgacctcctacgcagacattgctgacctcatggactgtggaaataaagcacggactgtggctgccaccaacatgaatgagaccagcagccgttcccatgccgtctttaccatcgtcttcacacaacgctgccatgaccaactcacggggctggactcggagaacgtcagtaagatcagtttggtggaccttgctgggagtgagcgagccgactcctcaagggcccggggcatgcgcctgaaggaaggagccaacatcaataagtccctgactacactagggaaagtgatctcggcccttgcagatatgcaatcaaagaagcgaaagtcggattttatcccctacagggactctgtgctcacctggctgctcaaggaaaatttgggggggaactcacgcacagccatgattgcagccctgaacccctgctgacatcaattacgaggagactctcagcaccctcaggtatgctgaccgcaccaagcaaatccgctgctaaggccatttcatcaacgaagggacccctaatgccccggggttgaattaaaagaaactcccagggacggaaagtaacccccgtgcttggcggggcaacttcggagtaagtggatttcaacgggcaaatggtttaagacctattcttgtgctcgtgggaaaggggcccccttgaaaaaaccgggatataaatagggcgggacctgggccccagaaagtgacattccccctttggcccccacggcttcgtatgtttttcaaattcgtgtctccccccaggattctcgacccaaatttttacacccctctgcnatgcattcacatcccccactcctcacataaaacaaataaagaggggagcagattgctattggggaaaaacgcggtgacgagtgttccgctccccccgctaaaaacatcagcggagagcttcccccccctatatctggggcgccccgtgttaacggcaataaccccctattgtgtagggaagtgggcctgcacccacgcgnagcccactccccccagcaaaaaaattttttatagtttagtagactcttgtaaaacctcttacatacttgtgccacacatgcatcacaaaaaacctccctccccacgggatcagtgagaaataatccacctaccgaggtacgatgcctaagaagggagaatgcttttgtggactcgg

SEQ ID NO: 349774 - DNA, 558 bp, Homo Sapiens
gatcccttggagccttaccctaactgcagttctcatcactgctctctgccagtggtgctcttcattaggtgatcggggtgccctcagccttcagacactctgagccccagaagcagcaaagggtgagcctcctgccttggtttctaccaccatctggtggtcaatggcgggactgcagtcggccaggcactgcggttgacctacaccttcctcccctgagacatcagctggcatgcctccaagccctctgcgcatgccctcattctctcctgccccctggctgactttgcatgttgacttgaacccctctggggaatctctgtgcattgtccacagcccctggttatgctctcacagccacttgcccctctctctgttcaggctgagctggctgaccgacccaatccccctacccgccctctgcccgctgacccggtggtgagaagaccgaaggtaacggtggggggagagaagggcacggcctctccccccacctagggctgtggtgctggtagacatgacggtggttggcgtggtgagatgccccctcagggcatg

SEQ ID NO: 349775 - DNA, 878 bp, Homo Sapiens
  misc_feature (108)..(116): n is a, c, g, or t
cacggtggccctactgggattaaaggaaggtgatgtattataatgtgtagtgaggtataaagggctagttcattctctcccaacaagaacttagaataaaataacacnnnnnnnnncatgagacttacctcatttttgttaggctatggcagttttgtccagttcctctgtcccttgagtgaattagatattggtgaattaatctcagaaactgacctataaaataatgactcattatagattgggtgaactactcattttatttagcttttaaaagtgctaaatcctctcataaaggaaaaattataggaaactatagcggtatccagattctgatgagctttaaaaattataaaatatagcaaatgtcttcatattttagccagaaatattagtacacaaccaatatagaagtcttgtttgtttctgggttctccagcagagactttttgtttgtggcttactctgtatagcctcatgtgccttaaaggtggtgaactctaatttttgtcaatatcaggcttttcaaaactcaaaaacaatccaaatgttgtaatttgttttgcataatgcccatggaattggatatcagtaagcaaagccattaaatcgaaccaatcaatgctaatagagtataaaaacaaaaaccttcaaattttaagtttcaattgtgtaactttattttcggcctagctagatcattgaagagccttgaaagttatctaaagtatggcttaatgtatttttttccctctgaaaaagatcatatgccaggatacttcttcaaaccagatcacttttaatatctagaaagataattttcaaggtataggcaaaagcacttcaaggacagagattatgtagcaagtgattctcta

SEQ ID NO: 349776 - DNA, 1288 bp, Homo Sapiens
taaggcaggaagttgacatcgggcaaccaaagaaatgagttttggggaggaacacaactcccatcccagtcagtttccttcccatggctgcatcttaagatggatgcacggagaaaccgtctgcctggctccctgtcttcattctccacgcagcctggtgatggcaggcctgggtttggatttcagaatcctagctccgggctccactcgtgtggcagcaagactgcttcgttccagcgtttagaaacacacctgtatttgattctcagccaggggagcactcgctgcactggtgggaggcggttgggaaagttgcaggaaaaccttagtcttccatccttctgacccatggtggaaattcacaccatggatttttaatggatctttgttctaggcagctgggaatagacatggtacttaccttagagttttccaatttatctcaattttatatggcttgtgattcattttcttaatccaaatatatataaacgtgtgtggtcttattcttccccctgcagtttcttgctttcttcagcacatcttatagtatgagaaggaaggtttgggcatgttgggaagggcggtggagggggagttgcagaaagagagggcagtgagggtgaggagaggggatctggggacttgggtgtgacacctgcttgacagaggcagggctgtggccaggaccaaccttcaattccattccaatcagcctttgcatttgttggatctcgtggcttctttttaatcttttgttggggattagtttcatgctgcacataatggggttgcactggtctgacccaggactttggagccacccacactgggaagactaggctaggcagtcggtcttctaggagtttctcagccccttaggacgcgggtctccttgggctcccccaagggttctgcgaagaggcagtggaagaaggcatgaggagagggtctcttgagaatttgccaataggaaggagtggccacggctgaaaggaacaagacagatcctgacatagctttggcctgggtgttaggtcagaaggagtactggtgcgtgggggccttaccccagggttgagtattttatctgtaaaatgttatctgccctttggctgcattggaatttcagagaaggctgcagaggcctgggttacacagcctgagtcacaacgtgggaaaggaatctctgccacgggaaaggtgggcggaagcagctggcagcctgggggcgtgctttcaggctcctccctctaagggggcgccatggggaacaggctcccggagg

SEQ ID NO: 349777 - DNA, 492 bp, Homo Sapiens
  misc_feature (16)..(16): n is a, c, g, or t
  misc_feature (60)..(60): n is a, c, g, or t
  misc_feature (84)..(84): n is a, c, g, or t
  misc_feature (129)..(129): n is a, c, g, or t
aaagaattttggggangaacaaaatccccaccccaatcaatttcccttccccaggctgcnaccttaaaaaggaatgccacgganaaaaccgtctcccccggctcccctgtccttcattctcccacgcanccctggtgaatggcaggccctgggtttggatttcaagaatccctagctccgggctcccactcgtgtggcagcaagactgcctcgttcccagcgtttagaaacacacctgtatttgattctcagcccaggggagcactcgctgcactggtgggaggcggttgggaaagttgcaggaaaaccttagtcttccatccttctgacccatggtggaaattcacaccatggatttttaatggatctttgttctaggcagctgggaatagacatggtacttaccttagagttttccaatttatctcaattttatatggcttgtgattcattttcttaatccaaatatatataaacgtgtgtggtcttatt

SEQ ID NO: 349778 - DNA, 551 bp, Homo Sapiens
  misc_feature (124)..(461): n is a, c, g, or t
  misc_feature (480)..(480): n is a, c, g, or t
ggacattagtcactggatctagggtccaccctaagtccaggatgatcttatctcaagatccttaacttaatttcatctacaaaaccctatttccaaataagatcacattcacaggtacaggggnnnnnnnnnnnnnnnnnnnnnnnnnnnnnnnnnnnnnnnnnnnnnnnnnnnnnnnnnnnnnnnnnnnnnnnnnnnnnnnnnnnnnnnnnnnnnnnnnnnnnnnnnnnnnnnnnnnnnnnnnnnnnnnnnnnnnnnnnnnnnnnnnnnnnnnnnnnnnnnnnnnnnnnnnnnnnnnnnnnnnnnnnnnnnnnnnnnnnnnnnnnnnnnnnnnnnnnnnnnnnnnnnnnnnnnnnnnnnnnnnnnnnnnnnnnnnnnnnnnnnnnnnnnnnnnnnnnnnnnnnnnnnnnnnnnnnnnnnnnnnnnnnnnnnnnnnnnnnnnnnnnnnnnnnnnnnnnnnnttgggtgcccctattcaanccttgttttgacttagatgacattctctacagggaaaatttcttaggactattggacaaaatataaagttc

SEQ ID NO: 349779 - DNA, 1365 bp, Homo Sapiens
cgatgatcttcccactgcactggcagtgcccctacattcctctgtgcccgctggtgctggcagatgtgctgagtgccccagtgcccttcattgtgggtatccactccagctactttgatctgcatgacccgcctgctgatgtcatctgtgtagaccttgataccaacacgctcttccagactgaggaaaagaagctcctctcccctcggaccctgccccgcagaccctacaaggttctgctggccacactgacaaacctgtaccagcagctggaccagacatacactggacctgaggaggaagcatccctggagttcctactgacagactacgaggcagtgtgtggccgcagggcccggctggagcgcgaagtccaaggagccttcctccgcttcatggcctgtctgctcaagggctaccgggtcttcctgcgcccactcacccaggccccctccgagggagctcgtgatgttgacaaccttttcttcctgcagggcttcctcaaatcccgggaacgctccagccacaaactttactctcagctgctgcacacacagatgttctcacagttcattgaggagtgctcttttggctctgctcgccatgctgcccttgaattctttgactcttgtgttgaaaaggtccacccagagcaggagaagcctgagccgacacccttagtggagctagaggagctgtcaggaagtgagctcactgtctttatcacacctcccgaggagcctgccttaccagagggcagtgaatccactccccagtactgctatgatggattcccagagctacgggctgagttgtttgagtctcttcaagagcaacctggggccctgcctgtgccaggcccttcccgtagcgcccccagcagtcctgctcctcgccgtaccaaacagggagatgaaagttgcacagcggatggcacagaagtcagcagctgtgcctgagctgtgggcccggtgcctgctggggcactgctatgggctgtgggttctgtgtctgccggcctatgtgcggtcggcacccctcccgagtgcaggcactgcacacagcctaccatgtgctgcgcccaaatggaaaccggcaaagtgggcttcccctggatgagtgggtggttaccgggtacttgatgcagctctgctcacactatgggccaaccctgtggctggcctgggcggggtcatggctggaagtatgccgtcagggcaggcattgtggcccaaacaccattcacctatggctaactaacaataaaagggctgtggtttggaaaaacaaagggggccgtctggggaaacccaggggggggcggtttggcgcttgggcccaaacctccgggaatgtgttggcccc

SEQ ID NO: 349780 - DNA, 324 bp, Homo Sapiens
  misc_feature (12)..(12): n is a, c, g, or t
cctagacttagncgttgatactggtttactttatcaacttcatcatcataataggccacgtagtaggcagagttagaaagcagtaacagcacatccacgtctctgtgagtagcatcaatgagggtgcactctgaaaattgttgcttgagccaagccataaaaattacgtcatgacacattttaatatgaaataaattctactactaattacagtgttactttcatcctagctcctattttggcattaatatttacatcagccaaacatgatccccagtcaaaaacattatgtccttaacaaaaagcacttggcacgtaacaggc

SEQ ID NO: 349781 - DNA, 2632 bp, Homo Sapiens
  misc_feature (2498)..(2525): n is a, c, g, or t
aagtgctggtacggtccggagtacgggatatcgtcgaccacgcgtcgaagactaccataagtcagtggaggtttttcccttaaaggcaagaaaatctatggaaagagaaggctacgagtcctcgggcaatgatgactacaggggtagttacaacaccgtgctctcacagcctttatttgaaaagcaggacagagaaggtccagcctccacgggaagcaaactcaccattcaggaacatctgtaccccgcgccttcatcacctgagaaagaacagctgctggaccgcagacccactgaatgtatgatgtcgcgatcagtagatcacctcgagagacctacgtccttcccacggcccggccagttaatctgctgcagttctgtcgaccaggtcaatgacagcgtttacaggaaagtactgcctgccttggtcatcccggctcattatatgaaactccccggggaccactcctatgtcagccagcccctcgtcgtcccggctgatcagcagcttgagatagaaagactacaggctgagctgtccaatccccatgccgggatcttcccacacccgtcctcacagatccagccccagcccctgtcttcccaggccatctctcagcagcacctgcaggatgcgggcacccgggagtggagccctcagaacgcatccatgtcggagtctctctccatcccagcttccctgaacgacgcggctttggctcagatgaacagtgaggtgcagctcctgactgaaaaggccctgatggagcttgggggtgggaagccgctatcctgcaccccacgggcgtggttcgtctccttgtgatggcaggtccaacgctcacgttagacattcatacatgtgatctccaaagagctggaaggaacggaagtaatgatgccagtttggactctggcgtagatatgaatgaaccaaaatcagcccggaagggaatggggagatgctttgtctctgcagcagaactacccgcccgtccaagagcaccagcagaaagagcctcgagccccagacagcacggcctacacgcagctcgtgtacctggatgacgtggaacagagtggtagcgaatgtgggaccacggtctgtacccccgaggacagtgccctgcgatgcttgttggaggggtcgagtcggagaagtggtggccagctgcccagcctgcaggaggagacgaccagacggactgcggatgccccctcggagccagcagccagcccccaccagagaagatctgcccacgaggaagaggaagacgatgatgatgatgaccaaggagaagacaagaaaagcccctggcagaaacgggaggagaggcccctgatggcgtttaacattaaatgagctatcgcagacccacctgactgtggaatataaaattgccaaatatcctttctcatggaagcgcgtacccgttcgtggaggaaacggaacggcagcccagccgtgggacggacgtggacgtttactgcattcctgtttgccgtgtaaatgttagaaaggaattaaagttattactcggaataaaggatgactttggcggatgtcgcccctgcaaggaggtggctgaaagtggtgtccagatgtccttccgaggactcggcgtatccgccaccagggacattaagaaaccgcacgtgatgtcgctatgctctaacgatcacctcagttctccctcggattctgggaacagatgaaactttttgcatcgcttgagtcatttttatcacaataatcctactgtgaaagctgtcgttgagaacttaggttggcacgtagcgtctcaaggtatgcgttctctcaaaggaaagctatgcatcgctgcttcgttgtctgattttgcttagattttgctttggttaggttgcgttttggggtttgcctttttttgttgtcgcttaaatgcaatttggttgtaaagatttgattcctttgtgttcatctgttccgcttctcagcggtccatctcagcgtctcccttcaggaaccgctgagtgtcctctcttaacatccaagccttttaatgaaatcgtactgaaatctgtatcagctaagagtcctccaatcctggtcccattaactccaagtgcctttttgacagtgacaacagacagtccctcgctttttgttgttgttggttttcttaacccctttaatggaactgcctggattttatacagttattaaaggatgtctcttttgctttaaactgcatgctgccaagtgccatttggggtcagcatcctcgtttcaacacagtgtgctctctagttatcatgtgtaacgtgggttctgtttagcgaagatagactagaggacacgttagagatgcccttccctgctccatccctgtggcaccattatggttttttggctgtttgtatatacggttacgtattaactctggaatcctatgggctcatcttgctcacccaatgtgggagtctggtttgagcaagcgagctgaatgtgactattnnnnnnnnnnnnnnnnnnnnnnnnnnnntcttatgtactatccaaaagtgccagaatgactcttctgtgcattcttcttaaagagctgcttggttatccaaaaatgaaaattcaaaataaactatgaagaaaagg

SEQ ID NO: 349782 - DNA, 1002 bp, Homo Sapiens
taactttgatttaaagcttagttgatctgtaatttaggcagaagctttatcaatagtctgccttggcaaaaaagtaaaacacaaacaacgcttagtttattacacagccctccaaccccccgagttatctccctcaggtagtgtccttgtgtctgagggaaggggtggggctttcagggcattatgaacatagatgaatcagagtcctaagatgttagatgctatgtctcataaatcctctagtttccaggacaacgacccatctaatttctgccttgtcggctggcatttgtggctaaagtgtaactcttgccttttgctcttcttactgcatagaaactgtcaaaatcaccagtggcagccagtttgctaagtctaatggttaattctctgtcgttatttgtgtcactcttcagcagcatctgtcacaattgatttttcccttctctttcaggttttgcattcacatggctgctagaacaccacattaccttggttattctcctttactctcaaagcttcttcatcagtttccttggatggctcttccttttattcctaacctcttaattttggagttcccagatcactcttctgaaatccagtcccatatatctaataccttactcagtatctccacttggacgtctgagagacaactcaaacttaccccaaacctgccctagacatatcttccctttatcagttgcaatactacagtttcttagaccaaaaatcttggggtcttcaggctctgctagtccatagctttgtctctttcctcataggggagaaacatagatcaggattttttttctcctaaggtcttgcctctgtgattcacaaccctttctcttaattgacaattactgtattacagtgcataatcattttacatgtgcaaagttgttttgaaacctagagacctaggtaaatttggggtaaaaccatatatggaatttgaaatttataatctgaaataatctttttcatcaaaatcag

SEQ ID NO: 349783 - DNA, 268 bp, Homo Sapiens
gtagcattcaaaccatagcaggaagcaactttgcttaaaattgtatacctggtaagtggaaaaagagggatttgaatataggcaaatgacttcagaggatttactcttaatttctgttgtactgccttctaatcttggcctccatcatttcagattaccaaagctgtctcttaactggtttctttgtctccaaccttgtgcacttgctatctattctgtgtgctgcagcctgagtttttaaaaaacagaaaatgaggggccaggtgtg

SEQ ID NO: 349784 - DNA, 1172 bp, Homo Sapiens
  misc_feature (707)..(769): n is a, c, g, or t
  misc_feature (828)..(828): n is a, c, g, or t
cggagggcggcgggtgcgccgaaatgcttggggcctatgcttcgccatgtcggggtgtctgcagaggagtgggcgtggggacgctgaggctgccgagagcgcggtggagacggaagagcgcgggctgcgggccgccggagagtgcagagaggtgtctcccagagggagggggggccaggtagagggtagacgagagacagagacagttggacaggtcctctgagaagaggccttgaggagcagctgacagacgaagaaaagtgctggacaggaagggagaattctgacgccaacatgcagcgaagtatcatgtcatttttccaccccaagaaagagggtaaagcaaagaagcctgagaaggaggcatccaatagcagcagagagacggagccccctccaaaggcggcactgaaggagtggaatggagtggtgtccgagagtgactctccggtgaagaggccagggaggaaggcggcccgggtcctgggcagcgaaggggaagaggaggatgaagcccttagccctgctaaaggccagaagcctgccctggactgctcacaggtctccccgccccgtcctgccacatctcctgagaacaatgcttccctctctgacacctctcccatggacagttccccatcagggattccgaagcgtcgcacagctcggaagcagctcccgaaacggaccattcaggaagtcctggnnnnnnnnnnnnnnnnnnnnnnnnnnnnnnnnnnnnnnnnnnnnnnnnnnnnnnnnnnnnnnnccccgaaagaaagcctcacagaggctgaagtggccacagagaaggaaggagaagacggngaccagcccaccacgcctcccaagcccctaaagacctccaaagcagagaccccgacggaaagcgtttcagagcctgaggtggccacgaagcaggaactgcaggaggaggaagagcagaccaagcctccccgcagagctcccaagacgctcagcagcttcttcaccccccggaagccagcagtcaaaaaagaattgaaagaagaaggagcagggggctccaggaaaagagggaagctgcctgagggacccctggatccatctgggttacaatccctgcccaggaaacaactattcttccccgtgggaaaaaagcccttgcctggaaaacccggggccaaaaaggc

SEQ ID NO: 349785 - DNA, 831 bp, Homo Sapiens
  misc_feature (26)..(26): n is a, c, g, or t
  misc_feature (31)..(31): n is a, c, g, or t
ttccgatcgtgcagtaactccagggngttantggtagcgaggcctgggtggccgaattcggcacgagggagaggcgcgcctggcggatctgaggtgtgttgcccgggcagcggcgcgcgggaccaacgcaaggagcagctgacagacgaagaaaagtgctggacaggaagggagaattctgacgccaacatgcagcgaagtatcatgtcatttttccaccccaagaaagagggtaaagcaaagaagcctgagaaggaggcatccaatagcagcagagagacggagccccctccaaaggcggcactgaaggagtggaatggagtggtgtccgagagtgactctccggtgaagaggccagggaggaaggcggcccgggtcctgggcagcgaaggggaagaggaggatgaagcccttagccctgctaaaggccagaagcctgccctggactgctcacaggtctccccggcccgtcctgccacatctcctgagaacaatgcttccctctctgacacctctcccatggacagttccccatcagggattccgaagcgtcgcacagctcggaagcagctcccgaaacggaccattcaggaagtcctggaagagcagagtgaggacgaggacagagaagccaagaggaacgaaggaggaggaagaggagaccccgaaagaaagcctcacagaggctgaagtggcaacagagaaggaaggagaagacggggaccaggccaccagcctcccaagcccctaaagacctccaaagcagagacccgacggaaagcgtttcagagcctgaggtggcccgaagcaggaactgcaggaggaggaaga

SEQ ID NO: 349786 - DNA, 907 bp, Homo Sapiens
  misc_feature (531)..(582): n is a, c, g, or t
tcagaggagaaagaaaccagccggtgtataaacggggggtgcagacagcagagtagagaggtcgtaaagaacgggaaggctcgaggacaagggtaagctgctgaatcaactcaccttgatgccatctcttcaaactacggcacaatcctcattgaggcttgggaagaagttttgtttcattgtgcactggctgttcaggcggggagtaagagaggaaagagtgcactaaatccagccctttgtaatgcatctgtctttcacggctagcagattcacaccacagccctcatgggcagtttggctttatataccccacttggtgcttcagtggaaggacctcgacctctcctctatggtatgcaaggagctcagtttcttcctctgaaatttatcccacttgatctttgatagccgaaattattttgttaaactgacaataatccaggatatttaacatctctaagccagttttcccgtacctgtagttccagctacttgggaggctgagatgggaggattgcttgggtccannnnnnnnnnnnnnnnnnnnnnnnnnnnnnnnnnnnnnnnnnnnnnnnnnnnggacagagtgagacccaggttctgctgttaggaagatattatagacgagttggctccagcgagggcagacctcacctgccacaggatctctggaaatacctggatgcctctgtatgggatctcctcactcccaaacgtcacaaggtcagaaattctctgtgcatcttctagaggaaggaaaaggtgcctttcatttatgcttctccacctccctcttctctggggctacatcctccgtaaaatgtggtatgtttcgtgcccatgtgggatgaaacagcctttgatcaatgtgctctcccactaaattccaatccctgggaaatgc

SEQ ID NO: 349787 - DNA, 2647 bp, Homo Sapiens
  misc_feature (772)..(772): n is a, c, g, or t
  misc_feature (2327)..(2327): n is a, c, g, or t
ttttttctgctaaggtagatttattgttacacatggttagttttcataacgtaatcccctgccccagagcaactcaggactccatggagcaggaagcctgctcttggtcatagctcataccacagcaggcaggtcacgggggcatgctgtgctgccaagtcctccaaaggaagtcacaaaggtttgcatttggacatttaaatccacaaaatcaggagaaacaataaatgcacaagggctggtgcatatactttggttacagtgacgccaccacacacggtcacgactgtgcaaaaatactgctttcaaatcattaaataaaaaagaactcacacaagctataaaaatgttgccacaaaaagcaaaactttcctctaagaaatattaactgactttgactatgaactaactccagatttgctaaagtacaagaattgtaccataaataattatattttgttcataagtaacattctataaatcttgaagacctagctcacaggcatcttgaaacatggcactgtcctacatccatgggacatttaaaggaagtaagtttgcacaccactaactgggcttttctctcattcttttttttaatcttctggcaggtctcttctagccattacaattactttgattcttttcatgtgaaatattaaaaacaaaaattaattcttaaccccggaactggtcccagtgtttattgcaatacaaacaagtgaccctctaattgacacaacaaaatgttacaaacattattgttaaaganaaataccccttcagacgggtctgttggagtataatgatgaaagctaaacataattgcccgaaaataaatcatgtagtttttactttaagtggtcagaccagaagattctttaaacaagtagaaacaaactacttaaaaccagaggactcaagctgcagaaccactcctcacaccccattttcacaaaagtgcatttggctggttgtaggatatattattaggtggggaaacaaaaccccacttttctctctgatcattttttcataagagattctaagagggagtgaaaaagtaccaactggactccattccaggtcttacctctagaagacagccagctctcatttaagaatctcagaacttggaaggaaggaggaaatccacattaaattctagggcccaacagacagagtgtcttcattgccacccccagtagtggggactacagtgcacctgtagtcccagtagatgctctgacatcacagagcttcctgctctaccagcccacctcatgcatgtcaccaccataactatagcctgcaagtcctcgtggccacctgatgtggatcctctacagtctgtccttggctggcccttcccacttcctttcctgctactttctctttcttcctagactgacctactcatcatttctcaaacaacctgcagtcgacccttggcctggaaacactaccaattccagttgagagccaccaaaaatgaaaacatcattccaatactacttactactacctgacataacataggaagtttcgttacctgtcatcagtgaagccccgtgatgtcagagtgtctgctgggttaagtctggcaacacatttcaaatataaatcatttaactataaatattcagaggacattcaggagacaagcgtatgtctaaagtacaatatcagcatataaattaataggatcaagttcatgaatcaagatagcatacatatattatataaaccaattaaacacgacagagttcaaacacataagccaacatattccaccagctaagagaacaatcaagtcccctgagaaacaagttggggttcttgcccacttgggcatacaggacattcctgtaccacattcaccccacctaacccatcatgtacaataaacaggaaaattacatacattcattctcaagcttgacttagataatctatccagccctgaccaagatttctatagtcacagcacagaacacaccacctcaacgtgggaaagtgtataaacatgaaaataatgagcaggctatgccaattaaaatacttcaatgtaaatataaagggatttccactccaactaaaagtgaaaactatctccagaaaaagagaaaaattccatttctaacagatcttgtgatatgtgtgtgtgtgtaaacgcgtgtgtctaagtacaaatcaaattcactttgacactcatccatacatgaagcaagtacttccagaaagctcccttcctcacaatgtgatgcctacagaccctggctattctaaatttttgccatgcacatgttagcatacggaacaacacnaaaagcaaagaaactagtcactagcaccatcaaaataatcacaggataacaaaaatagaaatgatttctaatgaagttataaactcattcctagtaactgtcctaaactaaacacacatttaaagaacatattcagatgccaaagcacagagaaaatgcaaagcatctatgagaacaactgggctgagtactcaagtccaacaaaaaggacataaaaacacgtggcaacactaaacataggctccaccaataccaatgaaatatgaggaatgagattctgaagtacttctcaggaaacgctgggggttcgtaataagcat

SEQ ID NO: 349788 - DNA, 1039 bp, Homo Sapiens
  misc_feature (129)..(182): n is a, c, g, or t
agcgggtggcctcggtccggggtggcggccgttgccgccaccagggcctcttcctgcgggcggtgctgccgaggccggcctgcgcggggcagtcatggtacccccttgagcgggctgtggcggagagcnnnnnnnnnnnnnnnnnnnnnnnnnnnnnnnnnnnnnnnnnnnnnnnnnnnnnnctctggctccttcttcctctgcatgtggctggcggccgcagagcagttcagttcgctcactcctcgccggccgcctctccttcgggctctcctcgcgtcactggagccatggcgttcgccgagacctacccggcggcatcctccctgcccaacggcgattgcggccgccccagggcgcggcccggaggaaaccgggtgacggtggtgctcggtgcgcagtggggcgacgaaggcaaagggaaggtggtggacctgctggcgcaggacgccgacatcgtgtgccgctgccagggaggaaataatgctggccatacagttgttgtggattctgtggaatatgattttcatctcttacccagtggaataattaatccaaatgtcactgcattcattggaaatggtgtggtaattcatctacctggattgtttgaagaagcagagaaaaatgttcaaaaaggaaaaggactagaaggctgggaaaaaaggcttattatatctgacagagctcatattgtatttgattttcatcaagcagctgatggtatccaggaacaacagagacaagaacaagcaggaaaaaatttgggtacaacaaaaaagggcattggcccagtttattcgtccaaagctgctcggagtggactcaggatgtgcgaccttgtttctgactatgatggcttctctgagagggttaaagttctagctaaccaatacaaatctatataccccactctggaaatagacatttgaggtgaattacagaaactccaggggtatatggaaaagataaacccatggtgagagatggagtatttgtatatgaggcctacatggacaccaaagaaaatttgtagaag

SEQ ID NO: 349789 - DNA, 1080 bp, Homo Sapiens
gatatggcttaggtttctggttacctgagacatactatacctcctcagatactctcagacctgaatcatttaacaaactaaggcagaaatactaaaaatatctggttcaataacataggggcatggagtagacatgcagaaaatgcttgttcacttggccttgaaatggctccagggtgggcctgaaggaatcaatgaaacttctcaagtatctacattacaaccactggtccccactacacatttatttctaaataaaggaggagaaactctagcaaagtaatatttaacattttcattgcttccaggataaatcttattgaatatggaggatctgatagtggtaggtctatcaggaatatcagggaaaatgcttttgatgttgttggcaaagtcaattcctatcatttgtacttgacaccagctacctagcaggctcattgtgaacttcaggtttcgcccacgttatttatataaagtatctcagtgtaatatagggagttgctggttatttgaaaatagtaacaaaaataacccaaacgagaaactccatttccataattagctttcctgaaagtcaggcatgtctttgaggacaggttttggcagtattatttttgtgcacaggaggaaaattgttagtaggtttatagatgttatttttataatagaatgttaaacccctgaaaaacatcaaaaattgtctcctagaactaattctatgttttaaaaacttgttttaaaaaggattctaaatagcaatagggtctttcctcctttctccactccaatggtttaatgggatagaggaatcaatgtttatatttttaaacctgtaaatattttattttgggtattttgtatatttgttgatataattccattttgtgcatatgtaccattgtgcatgttgctgtttttgatagtcactcttttaatgaatgtaagaagcttgggctaatagcacttttcttgttccattcaaacatctgaaaatgaaattacaacactgccattttactgttgtgtttaattcagtcaataaattttgttgctcctttgcatttaaaaacaaaacca

SEQ ID NO: 349790 - DNA, 1191 bp, Homo Sapiens
agcggcctggatggatctactagagttgaacagagacaggccttgatggaacgtttcaatgcagacaaacgcatattctgcttcatcctttcaactcggagtgggggtgtgggcgtgaacctgacaggagcagacactgttgttttttatgacagcgactggaatcccaccatggatgctcaggcccaggaccgctgtcaccgaattggccagacccgggatgtccacatatataggcttatcagtgaacggacagtggaggagaacatcctaaaaaaggcaaatcagaagagaatgttgggggacatggccattgagggaggcaacttcaccacagcctatttcaaacagcagaccatccgagagctgtttgatatgcccctggaggaaccttctagctcatcccggccctctgcccctgaagaggaggaagagactgtggccagcaagcagactcatattctggagcaggcatcgtgtcgggcagaagatgaagaggatatccgtgcagccacccaggccaaggctgaacaggtggctgagcttgcagaatttaatgagaacgatgggtttcctgctggtgagggagaggaagctggccggcctggggctgaggatgaggagatgtcccgggctgagcaggaaattgctgccctcgtagaacagctgacccccattgagcgctatgccatgaaattcctgaaggcctcactggaagaggtgagccgagaggagctcaaacaggcaaaagaacaagtggaagctgcccgcaaagacctggaccaagccaaggaggaggtgttccgcctaccccaagaggaggaggagggcccggggctggagatgagagttcctgtgggactggtggaggcacccaccggcgcagtaaaaaggccaaagcccctgagaggccggggactcgtgtcagtgagcgtcttcgtggagcccgggctgagactcaaggggcaaaccacactcctgtcatatccgcccatcaaactcgcagcaccaccacaccaccccgctgcagtcctgccagggagcgagttcccaggccagcacctaggcctcgacccactccagcttcagctccggctgcaattcctgcccttgttcctgtcccagtttctgccccagtacccatttcagccccaaatccaataaccattctccctacccggactcgcttta

SEQ ID NO: 349791 - DNA, 767 bp, Homo Sapiens
aaacgataagactctaatgtatttatattttcttatgaaaaacgcgagaagagattttccaaaagctgatcagaagattggatgcccaagatgaccatgaggaacagccttcaaatcaaactgtccgaagacctcaggctgtcattgaagatgctgtggctacctcaggcgtgagcacgctcagttctactgtgtctcatgattcccagagtgctcaccggtcactgaatgtacagcttggaaggatgaaaatagaaaccaatagattactggaagaattggttcggaaagagaaagaattacaagcactccttcatcgagctattgaagaaaaagaccaagaaattaaacacctgaagcttaagtcccaacccatagaaattcctgaattgcctgtatttcatctaaattcttctggcacaaatactgaagattctgaacttaccgactggctgagagtgaatggagctgatgaagacactataagccggtttttggctgaagattatacactattggatgttctctactatgttacacgtgatgacttaaaatgcttgagactaaggggagggatgctgtgcacactgtggaaggctatcattgactttcgaaacaaacagacttgactgttgctcaatctaatcttcgatggaaattctaaaaattaatacagagctgatcttcttgggggtgggaaaatcgaagggagaggagaaaggcgctgcactttaaatccagtatttgtttactcatgttaaaaaaaa

SEQ ID NO: 349792 - DNA, 2131 bp, Homo Sapiens
ttggcacctccctcacctagtgaccacccatggcaagttgccctctcccagcagagggggtgggtggggtggcatctgccctccctgctagcaccaggctccttggacccctttccctctgaccctgcctccagagggaaagcaagacagatgcaggcccctgcaaagccccaggtagaagcatgccccccaggacaaggcgcctcccactagttaggaggaggcccgctctgcagccgccgtcctcaccccaggccaggcctgcagtaccagacgggatagctggccactccacccctgcaccccagggtctcctccctctaccttttggggcaccctgggagcgtgggaagcaggtccgagggcccctgagctggcaaggggaggtgccaggccagctgtggtgccaagatactgagtgacctgggccctggctcagggagcatgtggggccaggcccagcgccccgtcttcctccttctacccccgctgggcctggcctgggcagcgccccctgcagaggcctttgggtccttggtcctgtaacaggaagggggaggctggctggggacgaccgaccacaggctgggacacagctcctggtctgggggctccaagtgacagcatgcaggggagggggctcccagtcagtgctgtgttgggagctttctggaggctgtggactgaaggccttgagggaagcagtggctggaggagggtgctggacccatgacacgttgcttcctctggcttttccctgctgggccgctttctcagaggcacttccccacccctaacacccagtgggcccccccaggttctgtgccactcagagggaccctggcaggggccagaaccacttaagggtggtgctggagggccttgtgccccagtcccatcccaggacgccctgagggatggacgcagccatgcaccccccatctggggcctctccctgctccctctcccacctggcagctgggagttctggcttctaggcctgccctgtcaccaggcctctgagtggccaggcccttccacctccccatctgtaaaacgaggcagctgcccggacagccttggggtccttagtggccctgcaggtcctctggcagctctgctgaccccaccctctcccggactgcccttctgtcccagaggggtcaccctgacccggcccaccttgccactgggctttggactccagccctgacagggcccagccacactggctctgcccctcgaaggggctatgagcaaggtaggagggagctggtctcctttcttcgggccccacccaggccatgagcaccccccacccctgtgagggccccaggccttaagtccctggcggggtcatgggtttgcgacttgagcagagcggaggaacagggcactggaaggccgacgagctcagcatgcgactcggtgacggaccaggctcggcagggccggtgtactttttgtggttgtcattggtgtgttgttgcacattccaggacgtcagtattttaacaggttctaagtgcctttctatcgtagcttatgttttcctcctcttggctccattgctgttagcatagagttttaaaaaaagagataagctaatgactataacaatatattcctccatgggagaggaagtttataaagaaacaataaaagtgagttgcaaagatggcttgtatgtcgtggatgtgccaggaacccggccctgacatgaggccaccactgccctgagcccctgcaggcctgatccgggctttctccccgaccctgcaggtgcccctccctctcaatctgccgcttaggagcagggaactgggaaggttgggaaggaggtaggtgctgagggcgcacaggtgacaggaactgagacagaagattccagggcggagcattcccaaggtccaagtccttcagcccacttactgcccgctgcggctttggagagtggtgggcaaaggcccttctccccccagccacattctggggtactgtgcccagattactgaggtgctaggttcaaacctgccccagggacagggtggctgccgacaagagctctggggccaggagaccgccaccccgtgggaggggcaggggcgctatgggagggagcctcaccctg

SEQ ID NO: 349793 - DNA, 1183 bp, Homo Sapiens
ttagggcccatttaaggcggggaaattctatttcctaaaacccccccttcccatggatatcaatagtccgggtcctaatatttccttgcccttaggcagggatttttctggggattctgaattggggtctgattaccaagctgaaagatatcttaaattaataaacagggcagggaagaaattgagtggggaaagaaggccttcggacagtagataagtatccaaagcagtgtgggcaaaaagagtaagcaacatcccctgggatttttcccatgtgggtatcactgagcaaagctgctgtgggaagatatgtagattaatgggaaatgcagggttattatggaggaaataactcacaggatgatttcatagcctggctaaattactacttgattaactcctgataaaactcagagcgcacaaagcgaggcagagaatccttttccatcagggcatggattcttttctgggccatgtcaaagctgctcagggaaggttccaccaggttcttcattgtgatgtccttagtgaagtggtcaatattcacctctttaggagcctccgtttgaatgaattcttcataaatttgctttgccttctcagccatcttggcaggggacttgatcttcttgtaatcctcacaggcaatccagaactcaaggttttcctcactgaattcagacttcaggaaacttttgaaactggcaagtccatagttgttctgcaggagtttgtccagggaatcacgccactgcagggcctcgtccagcgaggttttctgggtcttggctggtttctctggcttctcattgtacggaatgacaaggtcaccaactgagtctggcttctggaggagaattcccaacttgatcttaatctccttggccctttccaggcatgagtggggcaaagctgcaagtcctttgcacattttggcaggtggcttagctcctccgctttaagtacaacttcttaacagcagagccagtctttgaaaacttcaaaactgtctgggatgcctttcctcctgaggtatatatagaagctctttcccagccctctgttgctcttccagccaatccagagccttagaggaaatctgcaggctggagagcagcagcagtgggacctgaggtggaggagcctcgtgccgaattaaccacccggcctcgtacctagccta

SEQ ID NO: 349794 - DNA, 1056 bp, Homo Sapiens
  misc_feature (966)..(1002): n is a, c, g, or t
gtccgtcgattctttgccttaggcaggatttttctgtgattctgattgtgtctgactacaagctgaagatatcttaattaataacagggcaggaagaattgagtggggaaagaaggccttcggacagtagataagtatccaaagcagtgtgggcaaaaagagtaagcaacatcccctgggatttttcccatgtgggtatcactgagcaaagctgctgtgggaagatatgtagattaatgggaaatgcagggttattatggaggaaataactcacaggatgatttcatagcctggctaaattactacttgattaactcctgataaaactcagagcgcacaaagcgaggcagagaatccttttccatcagggcatggattcttttctgggccatgtcaaagctgctcagggaaggttccaccaggttcttcattgtgatgtccttagtgaagtggtcaatattcacctctttaggagcctccgtttgaatgaattcttcataaatttgctttgccttctcagccatcttggcaggggacttgatcttcttgtaatcctcacaggcaatccagaactcaaggttttcctcactgaattcagacttcaggaaacttttgaaactggcaagtccatagttgttctgcaggagtttgtccagggaatcacgccactgcagggcctcgtccagcgaggttttctgggtcttggctggtttctctggcttctcattgtacggaatgacaaggtcaccaactgagtctggcttctggaggagaattcccaacttgatcttaatctccttggccctttccaggcatgagtggggcaaagctgcaagtcctttgcacattttggcaggtggcttagctcctccgctttaagtacaacttcttaacagcagagccagtctttgaaaacttcaaaactccgctctcgacgaattcgagctcggccgatttggcctgatnnnnnnnnnnnnnnnnnnnnnnnnnnnnnnnnnnnnncggccgccaccgcgaaagccgccattcgccctatagtgagtcgtatacggtgtt

SEQ ID NO: 349795 - DNA, 563 bp, Homo Sapiens
  misc_feature (208)..(247): n is a, c, g, or t
gctcccggtagcaaacagatcatctcagccaagctcttcatgtatatttgacctattaggtgaacaaatgaacctcacaggacacacagtattttttaaaggcagactcgctctcttttttgccagtgagcagttctagctaaccaagttacacacagtgggtattcctgcctgcctcttgaatacaaaggcctagttcaagtgttgnnnnnnnnnnnnnnnnnnnnnnnnnnnnnnnnnnnnnnnngagataaaactattaaaagtactactatatatataaaatctcaaatcaacttttcggcctcctcctcgtgtaccaggaagtatattctgacgaagggccccacttttgcaggtcttgcacgcccctcccttacccagaactgcagagcttcaggatggcgaaggtcacccaagggcatgagtagggagtggtgtctccaaccatcagttccgtggcactgttcagcctttgtgtgctgccctgccacccaccactcacagtgcctctgaagcgtgttacccctggagtgacgtgagcatttgaggcttgtctaagg

SEQ ID NO: 349796 - DNA, 628 bp, Homo Sapiens
acaggaagcccttggtacgagacttgggattggcctggttgagcttcttttgtcttctggcctgttgggccatcaattcttgaaacctgatgtatctggacggaagcttcaaggaaggatgtttcacatggatattgactatgttaggaggaaatttcactttgactccttgctggctagtcacggtccagaggcaaggtatgtgttgaatggatgacatgcgtccccaatgccttgcctggctgctgggaatgctgataaagtttaggcacgctggcaccatggactgggatctgacaaagttttcctgtgaaatttggagggcactgacatttgtcccttgaactgcactggccaccattcatacatggaagatggcaaattaccactcggaagttcgtggccgtcagggtgtcggcagcatgaccattctcactaatgagagtggtggtgttccccttctcacagctgttctgacagctgcccttggtgcaggtcactttacagatgctcggagtaaagaccaccttgatgcggccagtgtggttactcactaggagcggaggcagggagaaaaagaacaacaaacacatcagcttagtatccatgaacttgccttggaaggttt

SEQ ID NO: 349797 - DNA, 756 bp, Homo Sapiens
agcggactggagccttagcgggcgcagcagctggaacgggagtactgcgacgcagcccggagtcggccttgtaggggcgaaggtgcagggagatcgcggcgggcgcagtcttgagcgccggagcgcgtccctgcccttagcggggcttgccccagtcgcaggggcacatccagccgctgcggctgacagcagccgcgcgcgcgggagtctgcggggtcgcggcagccgcacctgcgcgggcgaccagcgcaaggtccccgcccggctgggcgggcagcaagggccggggagagggtgcgggtgcaggcgggggccccacagggccaccttcttgcccggcggctgccgctggaaaatgtctcaggagaggcccacgttctaccggcaggagctgaacaagacaatctgggaggtgcccgagcgttaccagaacctgtctccagtgggctctggcgcctatggctctgtgtgtgctgcttttgacacaaaaacggggttacgtgtggcagtgaagaagctctccagaccatttcagtccatcattcatgcgaaaagaacctacagagaactgcggttacttaaacatatgaaacatgaaaatgtgattggtctgttggacgtatttacagcctgcaaggtctctggaggaattccatgatgtgtatctggtgacccatctcatgggggcagatctgaacaacatggtgacactgtcagaagcttacagatgaccatgttcaggtccttatctaccaa

SEQ ID NO: 349798 - DNA, 732 bp, Homo Sapiens
gttgtagagacacttaaaattccgggaaaggggattcaaataggaatttaagtcaaaaaccaaataactcatggtgggtttacaagtcattattctagttagactcttcatccacatatctacagggtaggcaaccgaaatacatattcaataaataacgttgaaaggtccgatcaaaccgaagcatcatttactacgaattgatgtgcttaggaaagaaacaactgcctttaaaattctgaggttaaacagttactctaactgttctttagtttcatttcctcccaggatgtactgctcttttttaaatagggcgtgtactagaaatgaagtttaacgtaagtctgttgtttacaatgttcagagagagagggtaagagggaaaaggagagctgagagaatgcagcccacttgcaaaacaggcacctgtttcagtatgaagcagcagggagagggagaatgaagtgtgctttccacttcttcaggtcctttccttgatgaatggtctggaaatgtataaaacaagggcataggcagaccaagggggcacgttccacacaatactgagcacagcatgtcacttgtatcacatattaaacatcggtgaatatctttttgatgttgacacaagagttgggattattgttcgtggtgcaggtggcagtggaattgcccgttttgaaaggggtctgggggaaagcgctatggttcatacccccctcttcgatcacc

SEQ ID NO: 349799 - DNA, 1103 bp, Homo Sapiens
  misc_feature (161)..(161): n is a, c, g, or t
  misc_feature (164)..(164): n is a, c, g, or t
ctgttctcctgttttgccagttatatagtaatgaaatacattggtaaattttatgcaacaaatggcaaacgtatcattattttgaaattgtgtatgtaaaagttatatttttacatgtagactcttgttattatgtgttttaatacattgtatcagttttngtntttttttaaaaactgtggtttaaaaagaagtctcatttaaatgaaatagctacaagaatcagaattttatgttcatttctgaaaatgtaagaacaaataagatagttaccacgtggtcatcttttacaaacccataaacattttgattagctgtgtgtgtgttgaaaaactgtaaatatgttcagtagcgataaaactaaaataactttgatttgttgataagttcctaaaatgtggaggtggattaaaaccttaggagaatagcagaaatcaaacttcatgaaaagttattttggggctttcctgtgaaatgtatgaacaaagaggctcagagaaggacatggaagacaataatgtatactctctcctcctccctgaataatgaaaaccatgtgtatttgttccctccgtatgttaaagatttccttttagtggtacattctgcactcattttgtatagtctaccaaggcgggtatccctaggaacaatattatataggaagcaggtatactctgatcacattcaggataagtgtacagaagaaaatacggtgtttactctttagggaactggaaacactccctgcattgatgtacattttaagaatggcacttttgatacatgttatcataaaggtgcttaatagagctgaattaaagtttttcaaatctgtaaacaaagcaaaaaagtaaattgtagtcatttgattattttttaaattggtgctttatattttgttctcactcagagtaaaagctgcaatttattgttcaccagctttgatgtattcattactcagtaatgcaatacctctattgttgaattccctttggaaataagtgaaaattctaacggccactgaaagctgctcgctaggttttgcttggtggagaaacataatctgcacctatccatattaattgggttgtatccccatt

SEQ ID NO: 349800 - DNA, 285 bp, Homo Sapiens
  misc_feature (57)..(57): n is a, c, g, or t
tctggcaaagacctatccccaaggttattttaatgaattccagacatttttccctgnggatatttcccccaccctaaaaaaagtggcaacccaaggaaaatatttagatgcaacttactagagtgatgatgtgaaagaaatggtgattctggtatcatggtgtttattttctttcttataactgcagagaaaatatcctgactaaaaaaaattcatttttttggattcctttcttttacaaattgtgctgaggcaactatggcatagaaataaacatttgacatt

SEQ ID NO: 349801 - DNA, 881 bp, Homo Sapiens
  misc_feature (352)..(369): n is a, c, g, or t
ggatggtgaaggctgctggatctcatattgattgaagcaacacgattgagatctggaaaatcaaagctgcagcaagtgcattgcaggaagatctagccttatctggcctaaaaactgcctgcagtcaactccctcagccctgccacaatttctatgcataattctgcttgcactccacagcctaagtatgttgaaaggagaaaaaaagttcagatcacatccaatgaagaaggcggtaactcgtctcacacacatccaagtttttcactatcagtataagcagctcgatgaaaaccgaaatcttaacacatgcacctaggattaatactgagtaattaaaagtggctacttnnnnnnnnnnnnnnnnnngtcatggtacgagtgtatttttgatgggaaggccatgctaaatctataaaacagatgttcctctcccaacagtggtcaccagtagtttcaactttttccccccagtagcatcaaccaaacttagcatagtgatttttaactctttgctcccacacgcactcatcccaacttccccgcttgccccactccctggggggaaataaccctgcctttaaaataaatagcaaccaagtgctcagttctatggaaagtatgaatatttatttcaggctttcgatcccaatcgatttcaaaaaacaaagtctgatttctctcctcagagcagctgaggcctccatgttacgatggtttcatggagattgaaggagcacatttcatcaggcttagcacaaagtccctgatgcccaccatgtcccagccttaggaaaggaaagaaacagaattcaccaccatggggctgaacgaatgcacacacactaatgtaaatgagcagctaaaccttggcaaatttg

SEQ ID NO: 349802 - DNA, 1588 bp, Homo Sapiens
  misc_feature (50)..(86): n is a, c, g, or t
  misc_feature (184)..(207): n is a, c, g, or t
  misc_feature (1488)..(1488): n is a, c, g, or t
ggaatgatacatcactatagggcgactcggagctcacgcggtggcggcgnnnnnnnnnnnnnnnnnnnnnnnnnnnnnnnnnnnnnatcaggccaaatcggccgagctcgaattcgtcgagagcgggaggggaggggcctggtccggcccggccggtgcgtgaggactggggcccgggcccggnnnnnnnnnnnnnnnnnnnnnnnngatggcccagcagcagatgaccagctcgcagaaggccctgatgctcgagctgaaatcactgcaggaggaaccggtggagggcttccggatcaccctggtggacgagtccgacctctacaactgggaggtggccatcttcggaccccccaacaccctctacgaaggcggctacttcaaggcgcatattaaatttcctattgactacccctattcaccacctaccttcagattcttgaccaaaatgtggcaccccaacatttatgagaatggagatgtatgcatttcgattcttcatccgcctgtagatgacccacagagtggagaactgccttctgaaaggtggaatcctactcagaatgtgaggactatcctattaagtgtaatctcactgcttaatgagcccaacaccttctccccagccaatgtcgatgcttcagttatgttcaggaaatggagagacagtaaaggaaaagacaaagaatatgctgaaattattaggaaacaagtttcagccactaaggccgaagcagaaaaggatggagtgaaggtccccacaaccctggcggaatactgcatcaaaactaaagtgccttccaatgacaacagctcagatttgctttacgacgacttgtatgatgacgacattgatgatgaagatgaggaggaggaagatgccgactgttatgatgatgatgattctgggaatgaggagtcgtgacgtgctccttcagtgcccctgtactgccctgccatctcaggccaaagggaggggagcaagtggggacctggccatggcccctcagcaaaaacctattcacagcgggtggggaaacacacacagctcctgctgactccccttatggatctcagtttgctcctttttatggacctttaatggagagagagtaaccctccacagaatgtctgaattcttgcattctttacccttccatcactatattgattctttttttaaaaaacatgaacccaaactcccgcctcacttcgtctctacagaatgttcacagcaaaacacgtttggtctgtttttagattcttgaagaattcaatagtctttcaagatgtttaatgtgtttaaagctgggaacctgttgggagttcacaagtgctgcatatactgggtagcaaaagaaaatggaaaaaaacccacaaaacaaactgtagaaatataaaatgctgcagctgctttggaaaagtctggcagttcctcaaaaaattaaacagttacctcatgacccggcaattctactcgagaattgnaaagatgttaatataaaatgtatacaaaaatgttcacagcagcattattcttataaagccacggagtggagacaacccaaatgtccatgaacagatggac

SEQ ID NO: 349803 - DNA, 2204 bp, Homo Sapiens
aactcaggggcgagctgcccagatggacgacctgctggccgacttcgactcgccctgtgtgatggactgcaagatgggaatcaggacctacctggaggaggagctcacgaaggcccggaagaagcccagcctgcggaaggacatgtaccagaagatgatcgaggtggaccccgaggcccccaccgaggaggaaaaagcacagcgggctgtgaccaagccacggtacatgcagtggcgggagaccatcagctccacggccaccctggggttcaggatcgagggaatcaagaaagaagacggcaccgtgaaccgggacttcaagaagaccaaaacgagggagcaggtcaccgaggccttcagagagttcactaaaggaaaccataacatcctgatcgcctatcgggaccggctgaaggccattcgaaccactctagaagtttctcccttcttcaagtgccacgaggtcattggcagctccctcctcttcatccacgacaagaaggaacaggccaaagtgtggatgatcgactttgggaaaaccacgcccctgcctgagggccagaccctgcagcatgacgtcccctggcaggaggggaaccgggaggatggctacctctcggggctcaataacctcgtcgacatcctgaccgagatgtcccaggatgccccactcgcctgagctgcccacgccctccctggcccccgcctgggcctcctttcctcctcctgtgcttcctttctcgttcctaacttttccttcacttacacctgactgaccctcctgaactgcactacaagacactttgtagaagaggagatgagagtttctagtcattttcctaacttcagggcttggaggtggtgtttgcactgctttttgtagagagggtcacctactagaagagaaatgcccagtcttagaggtgggtcaggtgtagagctggagggggtccctggctgctgaggggaccctaccagatgagccctgcctctgggagccccctaggaagcaccagcctgcacctaccacctgcggaggcctgctgccccctggcggccagtgctgttagagtgctgccaagcacagccttatttctgccggggcctccccaccggagagcccagggggccggccgggttcctggtccctggctgggagcagggctttctggtagttggggcacaaaaccatcggggaaccacatgttgactgtgagcaaagtgtcttccgattagcagcctcagggatgccctggtggcctctccagggctgctcaggcaaggccccccacccatctggtatggaaacctgccggctccaggccagacccaggagccaagagaaggctgaagccagcttggctgtgttctctgatctaggccttcccagaggaggcgagcagaagctgtgccacttggaattgcaacccatgagttcagaaggcacactctgccatgctgagctccaagggtgctaccaggggaagatgggatctatagagtctctgggccctggccccagggaggagcacatttttcttgaccctcacctacctggtgctagttggtcaaccctgcctgcatacatgggctcctgtcatggggcccagagtcccttgcagatatagaaataggggaggagctcaggtctgcgccaggcaggaagaaggcaggcttctggcttccagaggtgccgcggtggcctcctggcatcattttgttattgcctctgaaaacaagcctttactgcctggagggcttagatcctgcttctccaatgtagtgtggggaatctggaagggtatgtggtggaatgccagggcgttgctccaaggcacctctatcctgaaagtccctggcatttgggagaattcgtggaaaacccatattaggcccaattttttacctgtgaaaccaccatgaagacttgtcaatgctaaaaggggaaatgttacaaatatttgccgcgtacttctttgaagaacgacatataccccccacttctgggtgccccccaagtgcatccctatgtggagtctgttccaccacccaatccccatgtgtgatgttatacgaaacggtatcaagaacacttgtgacacgtcccagtcacatttcaggacacaacgaaagggagagacacatggtcatccaagaggtgtagtgttctgttgtcgaaaaccacggtacacccactcacaccg

SEQ ID NO: 349804 - DNA, 1168 bp, Homo Sapiens
  misc_feature (16)..(16): n is a, c, g, or t
  misc_feature (21)..(21): n is a, c, g, or t
  misc_feature (54)..(54): n is a, c, g, or t
  misc_feature (78)..(78): n is a, c, g, or t
  misc_feature (113)..(113): n is a, c, g, or t
gactatgattttccanccagnctcattgcgggacccttagaaaacaggcactgnagaataagaggaccaaactgtatnctgaacccgggttctctttgctggtcaaccagtgnagccttttgtgtgtgctgtaacagtgatttctgcctcagtgaaatgtgataatgacttcatatttgtgaagagctaagtatcctgatattttgatcttttcaagcagataatttcaggcagaaatgatatagcttgtcttttgttaggtctcactaggggaaaaaaatcgctcacaagagccttgcctacctcaacaagaagtgtctctacttacacaaatggcatggtttccttttctggttactgggtcacaggtggctcgcccatttgctttgagtttgcaaataaagtacatccttgggtttccttatctttaaacaagtaaagataaattaggttaaagtgggagaaggttcacaggatgagaacatcaattcagctcacagcaggtatgggtctaaagtgcctctctgcaggaaagaaagccaccaccagcagtccacctgctctcaggggaagggaccaggcattggaaaggctgcctcgggagaagtgactcaacaaaatcataagccggatgtagctttgtttcctctttctaatacgggcatatttattgccatctcaattatacctaattcaattaatggaagaaaatgtacatgaaagaactcccagaaactaaaatggctaactgtaggcaggatgtgtgattaatatttagaatctatcaaacccagtactggcagggctgttctctccccagtacttaccagagagggagtagagctaatgcacacccatactcctccccttttcatgaaatagtttcatctttaccttgaggtcacgctacagatgaagagtaaaatgaaagactgaatatgatcaatactaattaaaatgggggggaggtattgaaaagagtctaaaattggctacaaataatgagatacattggactcttcgtcattaacaagatttagaataggctgggaaatttctctttggaactgtgaactgtgacgggtgtggtccaacagaaaaaacactggagagtcatggataacgaaatacaactgagaagttacggaaagcacacaatgccctaggg

SEQ ID NO: 349805 - DNA, 362 bp, Homo Sapiens
atgatgtgtttcattgatccctgtttcataccttgttaatatttaagatttcaggcaaatacttgaaaagtaaacaagcaaaaggcagactagaacagtataatgaagtcccacacccctaaaaaccaggtgagctatgaccaactcctgacctacctggccttcctctcagattgatgcattattagggtccagtttctatgttctgggcgtgcccttccctggagtagtttcctgtttgtagggacattactctgcccccttattctttgtgttataataattttagatgggatttgaccattgttatggacctggactgaatgctggtttccccctcaaaattcataggctgaaatcct

SEQ ID NO: 349806 - DNA, 383 bp, Homo Sapiens
ggtctctctttccacagtctgatgtaaatcactatctttctcaactggacttccaaggcaaagatttctttccatttatctatctggagttttacgaagttgggcctctggattgccctttttcccaaagctactttcaccacaaagggcacccctcaagtcagggagctggactttcatacacctgcacctgtcaatcatgggtaaataattggcaggcaaggttgctgggtgctgtgggattgcacataaatctcccaggtattgccagtcttctgagcctcaggcaagcttgtgactaaatgactccagtagtctgaggacagtccttactgtcagaaggttctttggaagcaaaagcagacataggcatgagagggtaa

SEQ ID NO: 349807 - DNA, 611 bp, Homo Sapiens
gcggccgcaagcagcccggctcggacaagaacaccatgggcgaaaagtcccggacaccggccgccgagacgctcagccaactcgggcaaactttgcaatcgctcaaaacccgcctggagaacctcgagcagtacagccgcctcaattcctccagccagaccaacagcctcaaggatctgctgcagagcaaggatcgatgagctggagaggcaggtgctgtcccgggtgaacaccctggaggagggcaaggggggccccaggaacgacaccgaggagagggtcaagatcgagaccgccctgacctccctgcaccagcggatacagcgagcttcgagaaaggtcagaaagagaaccgccctggagacaggttccagctcagattcccaatgcggacaaactatatgtatgccaaggtgaccaagagccttcctgggatgtacgcattcactgtctgcatgtggttcaggtctaaaaccaccccagttgttggcacacctttctcctaaaccttgaccggttaggccaacgagctggtcctcatttagttggggaacaacccccaggagattctcatccatgacaaggttggcaactttgcctttgtcaataat

SEQ ID NO: 349808 - DNA, 599 bp, Homo Sapiens
  misc_feature (44)..(68): n is a, c, g, or t
  misc_feature (407)..(428): n is a, c, g, or t
  misc_feature (485)..(547): n is a, c, g, or t
cttgggaaaagagagatgtgtcgcctccgccagtccgactcctnnnnnnnnnnnnnnnnnnnnnnnnnacatgtaccactgcaacgaagacactccttctgtccccacctgctccgaagacaaaccaacctccgtttcttttataaacagtcggctttttcttaataagccctcactgtacagaacagcccgttgatggtttatttggggtccccctctccccccagccctttttttctgttggtttagcacaaatacttccctcctccggcacctccaaacctaccccacagtcagtgtacttgttttatatatatttaatcttattcaatggaaaccatgcttttgtcgttttatactttgctaggtagactttattacccccccactatgccctcatttttttnnnnnnnnnnnnnnnnnnnnnnctgggttccagtcttaattcattttccgtgccaggttttatttcgtggtgtgtgagnnnnnnnnnnnnnnnnnnnnnnnnnnnnnnnnnnnnnnnnnnnnnnnnnnnnnnnnnnnnnnnccccctccggtcccatacttcacagcactctggtgcgggaagaagcagaagc

SEQ ID NO: 349809 - DNA, 466 bp, Homo Sapiens
  misc_feature (22)..(22): n is a, c, g, or t
ctgcaaccatccataccttttncccgtggctgctatggagtcccccaaactccccagtggggcttatgagggtggggcacttattaagtcgtctgggaagctcatgctgctccagaagatgctgcgaaagctgaaaggagcaaggacaccgagtgctcaatcttctcgcagatgaccaaaatgttagacttgcttgaggactttcttagactatgaaggctacaagtatgagcgcatcgatggtggtatcacgggtgccctgaggcaggaggccatcgatcggtttaatgctcctggggcccaacaattctgcttcctcctgtccacccgagctgggggcctgggcatcaatctggccactgctgacactgtcatcatctttgattctgactggaacccccataatgacatccaggcctttagccgggctcatcggattggccaggccaacaaagtgatgatttac

SEQ ID NO: 349810 - DNA, 1295 bp, Homo Sapiens
  misc_feature (75)..(127): n is a, c, g, or t
gctcaattcagcaaaaaacagatctgatgggatttggttattctctacctgatcagaacaaaggtaacaatggtnnnnnnnnnnnnnnnnnnnnnnnnnnnnnnnnnnnnnnnnnnnnnnnnnnnnncaatggatccacttgggccaatgtccctctacctccccccccagtccagccccttcctggcacggagctggaacactatgcagtggaacaacaagaaaatggctatgacagtgatagctggtgcccaccattgccagtacaaacttacttacaccaaggtctggaagatgaactggaagaagatgatgatagggtcccaacacctcctgttcgaggcgtggcttcttctcctgctatctcctttggacagcagtccactgcaactcttactccatccccacgggaagagatgcaacccatgctgcaggctcacctggatgagttgacaagagcctatcagtttgatatagcaaaacaaacatggcacattcaaagcaataatcaacctccacagcctccagttccaccgttagggtatgtgtctggagccttgatttctgatttggaaacggatgttgcagatgatgatgccgacgacgaagaggaagctttagaaatccccaggcccctgagagcactggaccagactcctggatccagcatggacaatctagacagctctgtgacaggaaaagcctttacctcctctcaaagacctcgacctaccagcccattttctactgacagtaacaccagtgcagccctgagtcaaagtcagaggcctcggcccactaaaaaacacaagggagggcggatggaccaacaaccagcattgcctcatcgaagggaaggaatgacagatgaggaggccttggtgccctatagcaagcccagtttcccatctccaggtggccacagctcatcaggaacagcttcttctaagggatccactggacctaggaaaaccgaggtgttgagagcaggccaccagcgcaatgccagcgaccttcttgacataggatatatgggctccaacagtcaaggacagtttacaggtgaattatagtaaatgagaggagacatacaaagctgctctgaaggaccatcaggtccggactcatggaagtgatgactctaaacagtgcaatgaacaatttatttatgtactattaaaagaactgtaaatgcaatgtaaagacacacagccacacatatcccacagatattttcattgtgttcttctcttaagtacaccacccaccttaactctttcttgtcaggagtatat

SEQ ID NO: 349811 - DNA, 1026 bp, Homo Sapiens
  misc_feature (15)..(15): n is a, c, g, or t
  misc_feature (23)..(23): n is a, c, g, or t
  misc_feature (59)..(59): n is a, c, g, or t
  misc_feature (65)..(65): n is a, c, g, or t
  misc_feature (518)..(538): n is a, c, g, or t
gccccactaaaaaancacaaggnaggccggatggccccaacaacccgactttgccctcnacgaanggaaggaatgaacagatgaggaggcccttggtgcccctaatagcaagccccagtttccccatcctcccaggtggcccacagcctcatccaggaacagcttcttcctaagggatcccactggaccctaggaaaaccgaggtgttgaagagcaggcccacccagcgcaatgcccagcgaccttcttgacataggatatatgggctccaacagtcaaggacagtttacagagtaaatgagaggagacatacaaagctgcctctgaaggaccatcaggtccggactcatggaagtgatgactctaaacagtgcaatgaacaatttatttatgtactattaaaagaactgtaaatgcaatgtaaagacacacagccacacatatcccacagatattttcattgtgttcttctcttaagtacaccacccaccttaactctttcttgtcaggagtatatnnnnnnnnnnnnnnnnnnnnnctcgccctacaggaagaaaaggattctcctctgtatataatttcttttgtgcattgctatgcaagctcactcttgttaaatgaggtcatctttttgtcttacttatctatggttctgctgaatgaactacgtggtgttgcagattaatgtgttgccagtatcctgtcttcatctttgcttgtcttataagtttgtttctgtagtctttgggggataataattagtaatattgtcttgaggtagtcaaattatgaatcttttgagttgtgctttcctatcttgaggtcataaagacataaaaatttctgccccaaaaaatgggggggattggggaagggtatctgctatgcacctgactagttcacatgtgagtttatttaatccttataaagaaccatcttggttggtattatcaaccttattttaaagatacggtaactgaacttttaaatgtcttttttgtagtaaatatataaaatttgccactt

SEQ ID NO: 349812 - DNA, 468 bp, Homo Sapiens
gctcccaaaacaacaataacctaaggtggaaactggaagctgtggaggttgaattaatgcctttgaaatgtgcccatgtttgttttgcctatatcaaaactgaataggcctcttgtcaaactccatcccaggtgaagcctgcagccatgggttgcatctccttcccgtggggatggagtaagagttgcagtggactgctgtccaaaggagatagcaggagaagaagccacgcctcgaacaggaggtgttgggaccctatcatcatcttcttccagttcatcttccagaccttggtgtaagtaagtttgtactggcaatggtgggcaccagctatcactgtcatagccattttcttgttgttccactgcatagtgttccagctccgtgccaggaaggggctggactggggggggaggtagagggacattggcccaagtggatccattgtttttctgtggtttagaagag

SEQ ID NO: 349813 - DNA, 1097 bp, Homo Sapiens
  misc_feature (19)..(19): n is a, c, g, or t
  misc_feature (89)..(89): n is a, c, g, or t
  misc_feature (95)..(95): n is a, c, g, or t
  misc_feature (240)..(240): n is a, c, g, or t
  misc_feature (352)..(352): n is a, c, g, or t
  misc_feature (371)..(371): n is a, c, g, or t
  misc_feature (395)..(395): n is a, c, g, or t
  misc_feature (420)..(420): n is a, c, g, or t
  misc_feature (435)..(435): n is a, c, g, or t
  misc_feature (551)..(551): n is a, c, g, or t
  misc_feature (878)..(878): n is a, c, g, or t
  misc_feature (971)..(971): n is a, c, g, or t
  misc_feature (1011)..(1012): n is a, c, g, or t
  misc_feature (1014)..(1014): n is a, c, g, or t
  misc_feature (1019)..(1019): n is a, c, g, or t
  misc_feature (1029)..(1030): n is a, c, g, or t
  misc_feature (1032)..(1032): n is a, c, g, or t
  misc_feature (1039)..(1039): n is a, c, g, or t
  misc_feature (1041)..(1041): n is a, c, g, or t
  misc_feature (1063)..(1064): n is a, c, g, or t
  misc_feature (1066)..(1066): n is a, c, g, or t
  misc_feature (1068)..(1068): n is a, c, g, or t
  misc_feature (1071)..(1071): n is a, c, g, or t
  misc_feature (1079)..(1079): n is a, c, g, or t
  misc_feature (1083)..(1083): n is a, c, g, or t
  misc_feature (1087)..(1087): n is a, c, g, or t
tcccggtgataagacattngccattgccctggtacaaattcggaccacagggcccggagggatgtggatccctgcagaagtccacatcntgaggnatggaggtgctgctcctcccctacccttatcccctcgagagattcaggatccacccagatacctgagaggatcattcccacccaggccaactccaatctctacccgcaaaggaaagtggaaggcaggcaggaaccaagtgcaaantagtcttagaactgcctcgccgccacctttctacccagcccccagaacatccccgagggccagggaagggcgcagggtgcagggggaggctgaggaccaaccatcaatatcnaacggcctacaaatcaccntagagtcggactgataataccatncatccgtccgctcccatgccttcanctggccctgtgagtntccttaggaaaggtctcaatcttgccacaagggaggggctagggtagtcccaggcccagctgactcagcttgtgctggtttcaggcacaagcatgatggtggagaacatggcagtncgcccagcaccacaccctggcaccgtcatttcccactccgtgcgatgctgatcctcataggctccctggagctctgatcctggaacccctccctctgcgccgcagctggacgccacctccgacggacacagccagccccttcctgctgccaaggtggcctgacactgtgccagagagtggctggttttaaatacctactttaaacagtgccctttttgtaggaggtaggatattttatattctgccgcagatagaacccacgcaaggattttctttaaattgagaggcaccagggcagtaacttccatgatgacactgacgcctatnacctgagctctaggctgcctgggaggggaagggaacagggcccatggggaaggaaggggggtttttaaaaacatgtctttcacctcagcaganatggccctctgggacccttatacggactgcgccacttgannanagtcntaggcccggnngnacaacananatgacaggttgagaactggagnnantnacnctcacatncttngttnaggagaaggg

SEQ ID NO: 349814 - DNA, 2207 bp, Homo Sapiens
  misc_feature (64)..(64): n is a, c, g, or t
accacaccctggcaccgtcatttcccactccgtggcgatgctgatcctcataggctccctggantctgatcctggaacccctccctctgcgccgcagctggacgccacctccgacggacacagccagccccttcctgctgccaagagatggccctctgggaccctatacggactccgccacttgagagcagtcctaggcccggcagaaacaccagacatgaacaggttgaagaactggagcgaagtgcacacctcaccatccttcagtctaaggaagaagggcaagccctgggaccaagagctctcccgccttctccctcgagcagcagcaaggaccctgacgctgtccccgataactccctaggggctcctgcctgcccaagcggctgagaaccagcgccccgatgcctgaggctgggagcctgagccccttcagctttgaggggggtgatactccaggctgtttggggtgggagccaaaaagagttgagaggccagggcccttggtggaaaggggcaccagccttggtctgagatagtcacaacccaggtgacgatgccctctcagccaacactgccaacctgaccctgtcatcccgattgacagcgccacttcaggtggctgggtgactaaagggcttgtcttggtggggtctcccacccctccaagacccattctgcacagtccctccagggtttgggcaggagatggccaatcatgcgcccacctctccagtgctgcctgcagtcagctcggcctccccgacctgcagccccagactctgctctcccagcactgactcactcctgcctgggaggggaatgcagcattcatgctgtgtgtcctggtattgggaggtttctgggaagggcagaggataaatgtggccctgcctgctcccaggtatacctaggaccacctggccagatccgctcccagacggccttggactgcttgcatttccccggagaaaaaggggttaataaatgggccatcctttcctgagctctgggtatactaccagtcacagaacgtcagagctggaagaagccttagagctcaacttcttcaagcccctcactttacagatgaggaaatggaggtggtccagagagggtctgggattcccaaggtcacacagcccagaagagatggggctgggttaagaactcgagtcttccacctttctgttcaaggctgtttgtctacccagaggaaggaggcactgctgaatggctatggcctggctaagaaggtgattagtcagtagggtatgaagaattctacttcaaggggttcggattggtgatcatggggattggcatggctgggttccagtccaaggtgtgggcagagcttctaccaaacttcaacatggagggctgacttgaagctccctgtcccccgtcactcttgccccaagaaaagaggccaaagcaagagcagattccctaggcaagagcagcagcacaactaggaaaccccaaagcccatgctccgacaggtggcccttcacagggggcagcgggacaggcatcttgaagggcatatgtcctcggaagctccgagcctgttttctgtagtttatagttagagctctattttgttatggttttttaaacttttaagtcctgctctattttcctgggcaggtttatgttgatgtttacccactacaattttttaaaaatataagctcacatgccttttccctgccacagccaaacccccactgcaccctacccacccacccctagcccaggtcagctttcctggagctggctaatcaaagcctcctcacctcttcccaacccttacaagcaagggtgctaggggctcagctatacgaccattctccctgacagggagtccaaacttggcctagcatccctcctggcccccctctgggcacgacttggcctgtggctggttctctatccgaaaaggggatgctggacaaaaactcccttcaagtttttatccattccttcctcattggctcgggctggatcaggggaaaacaggggacagggggtccagttggttgggccccagggaaaggaacctggttttggcattggaccctaacccgtggaagcttgaggggtaccgcccactaaactttgctttcgggcccaccgatagttcccttcccaggaagggacccttaaaggcctaaatggaggcccctctaaaaaggggggag

SEQ ID NO: 349815 - DNA, 2306 bp, Homo Sapiens
  misc_feature (177)..(181): n is a, c, g, or t
  misc_feature (183)..(183): n is a, c, g, or t
  misc_feature (185)..(187): n is a, c, g, or t
  misc_feature (189)..(245): n is a, c, g, or t
  misc_feature (248)..(248): n is a, c, g, or t
  misc_feature (250)..(250): n is a, c, g, or t
  misc_feature (252)..(255): n is a, c, g, or t
  misc_feature (258)..(279): n is a, c, g, or t
aaattcccaaacccctctagtttccttggccccggggattttcccttatggggaagccacgcttattggccccaaggttccccctttcccttactggggggcccggcgggcgcccaaaaagaaatggtttttagaaaagctttttttgaggggcccgagggcgggcccaacaaaagnnnnntntnnntnnnnnnnnnnnnnnnnnnnnnnnnnnnnnnnnnnnnnnnnnnnnnnnnnnnnnnnnnggngngnnnnggnnnnnnnnnnnnnnnnnnnnnngaaggttaatgctttaatgtattgacattttcacttacaaatgtacaatttgcgtatgtaggaaaaaatcagttctctagacacaacagaatactactagagacgggaaagcaatcacaaaaagatcaactctggggagaaagtggaactgcattccatgccttgtatctacatacactagggaaggaaaaagaaatattacacaggatcaaaacttgtggaaaatacacttgggtcattttgtctcaactgcaggaccttcttatgatccagatggctaccttaagtcctggatagcctaaaatgggcaaagtctggccttgttcacaaatgatgatccaaaacattaaccacagttctccttctctttagtatccaagaccctgaagttgactcaaggaatgaaaagaacaatcagatcagcatgtatataatatcattggccaacttcttcaaggtatggattatttaaaagtacacatggaagtaaaatgcttactcaaacctgaataagaagtttcttgtaactcaagcacttcttgactcacactaagtgtagcactgtaaacaaaagacatcgttgagaaactgaggctatcaaaacattggcatctatgggagttgtggccaaggaaataaaatacctgagcaaccttatacccagtatgcatttcataccaggatcaagtcactaatgacagccaagttccaggcttatctatggctgcctaatgagactggccccactaggatggggactggggaggggacacacatgagtgcccaagcttcagtctacacctccccccttcagccagaagcagccaggggagcacagggacatctgcttcaagagcattttggcagcaaaaatcaatactctgtggttcctggaattcccacccagtaattccaagttcaaaattaccaccagtgcaacatgaaaaactgttaatagtttttaagtaaagtgtacatacagctttaataacgattataatctgaagaaagccattcttcttatacaggatggaaaatcctcaaagcaacattttaaaccatggacactagagttgtcatacatctattcagagatgagagataaacagacatccttccatgtggaaacagacactcccatgtcaacaagtcccctaggatcacagagaaaagcagacccgtggtcatcactaggtgtctctggtgtctcgctaaagatggagtcctatgtaggttggcctaagttggcctcagagggaggtggctgagcagcaaagcaagacagcatgtgtgtaaccagccaggcaaaataacaagtctgtgctacctggagtgtattttcaggaaaacaggaccatatggagtgtggggcagggacattcgctgtgctaaactgccactgtaaaagcacactgttgaaagcatgcaggacagaaaactgcaataattcagagcttgaaaacaagaaataacagaaatatgaatatttcaaatacacacttcatatactgaaaataagagcatttgaagaaaggctggaatgggttttccaaagactcacacattttggggttccaaattcaatgttctaagcttctctatcacaaagagatcaagaacaaaagcaaagctgggggtcctggccaggctgagtggtaccttgagccggtccctgtgtcctgagggtccctgggccccatatcccatccataacccaagtctgctcagctacagtctgccctggtgctcagtgaacagccacagagtcccacttctgcacaggatgggccttcagagtgatgagagagcatctcccgcacagtgcaaacccccaaaggccagaaatgggaacgctctaactaaggctctccttccactccctcactgttcctttaatattactctctcagcaagtagaaaaataggctataaggaggcttaggcagacacacactcaaacagcctcttggaataaagcaaatctgcctccacatacttgtttgtatattgttctggcttctccagga

SEQ ID NO: 349816 - DNA, 718 bp, Homo Sapiens
  misc_feature (23)..(23): n is a, c, g, or t
  misc_feature (47)..(47): n is a, c, g, or t
gggggaagagaaggacctggctntggtgacccagagtgccgaagcgnccgctgaggaagaccttctggggcccaactgctactatgacaaatccaagttcgttcttcgacaacatctcttctgaactcaaaaccagctccaggcgggacgacgtgggccgaagagaggaagctcaacacagagacctttggggtgtcagggaggtttcttcgtggccgcagttctcggggcggattccgaggaggcaggggcaatgggaccacccgtcgcaaccccacttcccacagggccgggactggcagggtgtgagggtgcagccaaaggtgagtggatgaaccttctggacgctttggtgggagggtgtagggtcaggcacacctggagagcttaggaaggtggggagcaggctcggtttcccaggaagaagagaggcccagaggtgtcaaagccaaaccgagggcctcgaccctatgagtcacccgggaggctcttggccaacctcaacctgcatctgtgggggtaggacccaggccccagcatcctccaagtgagattgcaggtatgggaggtgaggtggtgcgcgagtcgcgtgggctgggggctcaccacccaggtgaagccagcaagtgagaccttgctccaaagccagtgtcttggcccaacccggccctaaatgaatcagaggcttcatttttaaccacgtcccgaaactgagaca

SEQ ID NO: 349817 - DNA, 671 bp, Homo Sapiens
agtatgctaaaaactatgctactctcatacaggggacccgtattttaaaatctccagacttgcttacatctagattatccagcacaatcataaagtgaatgacaaaccctttgaatgaaattgtggcacaaaatctgttcaggttggtgtaccgtgtaaagtggggatggggtaaaagtggttaacgtactgttggatcaacaaataaaggttacagttttgtaagagaagtgatttgaatacatttttctggaactattcataatatgaagttttcctagaaccactgagtttctagtttaatagtttgctatgcaaatgaccacctaaaacaatactttatattgttatttttagaaagactcaaaacacctgtatttaaaccttaatatgaaaatcatgcaattaatagttacacaagatgttttcattacaaaatatgtacctatatattgatggactctacatcctatattgtgacatgtaagtcctttaaaaggtgaaaagtatgatttcttaccacttaagtatgattgatatgatccaacaaatttgatcagaagctgtaggtaaatcctcttctgaagccaaatggtatattaaatataattattggtacttccatttctcttccttcttacttgcctttaagatcttataaaaaaagaact

SEQ ID NO: 349818 - DNA, 755 bp, Homo Sapiens
caccgacgagattgtgaaggatgtgaagcagacgtacttggcacgggtcttctcctacccggcagggaatgtggagagcaccggttctgctggggagcctctgtatgagaactccccagagttcacaccttacctggagacaaacctcggacagccaacaattcagagtttgaacaggtgggaacaaaagtgaatgtgaccgtagaagatgaacggactttagtcagaaggaacaacactttcctaagcctccgggatgtttttggcaaggacttaatttatacactttattattggaaatcttcaagttcaggaaagaaatattctacatcattggagctgtggtatttgtggtcatcatccttgtcatcatcctggctatatctctacacaagtgtagaaaggcaggagtggggcagagctggaaggagaactccccactgaatgtttcataaaggaagcactgttggagctactgcaaatgctatattgcactgtgaccgagaacttttaagaggatagaatacatggaaacgcaaatgagtatttcggagcatgaagaccctggagttcaaaaaactcttgatatgacctgttattaccattagcattctggttttgacatcagcattagtcactttgaaatgtaacgaatggtactacaaccaattccaagttttaatttttaacaccatggcaccttttgcacataacatgctttagataatatattccgcactcaaggagtaaccagg

SEQ ID NO: 349819 - DNA, 1293 bp, Homo Sapiens
tctaaaaaccatgtttatgggccaaaaaggtgcccatggtgttaaaaaattaaaaacttggacctggttgtagtaccattcgttacatttcaaagtgactaatgctgatgtcaaaaccagaatgctaatggtaataacaggtcatatcaagagttttttgaactccagggtcttcatgctccgaaatactcatttgcgtttccatgtattctatcctcttaaaagttctcggtcacagtgcaatatagcatttgcagtagctccaacagtgcttcctttatgaaacattcagtggggagttctccttccagctctgccccactcctgcctttctacacttgtgtagagatatagccaggatgatgacaaggatgatgaccacaaataccacagctccaatgatgtagaatatttctctgaattcccctttctcctggcccatacactctaccgggctgtctgtactcttccggttaactgttcgggagggaatcactgcttgaacactgaaacagtagttttctcctttatccacatcaatcaaaaactcattagtgtttgttttgcctgttttctttcctgaacttgaagatttccaataataaagtgtataaattaagtccttgccaaaaacatcccggaggcttaggaaaagtgttgttccttctgactaaagtccgttcatcttctacggtcacattcacttttgttcccacctgttcaaaactctgaattgttggctgtccgaggtttgtctccaggtaaggtgtgaactctggggagttctcatacagaggctccccagcagaaccggtgctctccacattccctgccgggtaggagaagacccgtgccaagtacgtctgcttcacatccttcacaatctcgtcggtgaggtcacactctgtgtctgttgtgtaaaagcatttgcttttccaatctcctgacttagtgcttatttgaacagtgtagacttgattgacgggtttgggttcccactccaaaattgtcttgaaattagttgatttccaagttaaattatatgctgccacagtatttgtagtgcctgaagcgccggccacctgggcgaagacccagccgagcaggagcgtccgagcgacggcggtctcggggcgcgggacccggggccaggcaggggtctccatgtctaccagttggcggcgagatcgagcgggttccgtggcgcccgtggggctggggaggttgggctgaaggcgcctgggccggccagagggagtgcgagggggtgcgcggagctcgcagtcttccgct

SEQ ID NO: 349820 - DNA, 1941 bp, Homo Sapiens
  misc_feature (83)..(83): n is a, c, g, or t
  misc_feature (86)..(86): n is a, c, g, or t
  misc_feature (1177)..(1197): n is a, c, g, or t
  misc_feature (1334)..(1334): n is a, c, g, or t
  misc_feature (1337)..(1337): n is a, c, g, or t
  misc_feature (1342)..(1342): n is a, c, g, or t
  misc_feature (1352)..(1352): n is a, c, g, or t
  misc_feature (1568)..(1568): n is a, c, g, or t
  misc_feature (1579)..(1579): n is a, c, g, or t
cttcgacgacggacaccacgagcagcagcctgcgctggaaatgtctgtaccgggcgaggaggggcagagaaaaggcatctggnggnggaggaagggaaagggggctggaacccaagacaaaaagcccgtcaaggttgtccagctcctggaggatccagaccagcgaaactgctcccaatgaatcaatcccaacgggggctaaatgaaatacgttaaacagagaccacgttaaggataccgaggcgccaccagactcgacctcggcgttccgacctctacacgttccacccaccgatgggcatggagccgctttcgacccgcggagcctccactgcccgcagcccctcagcaccaacaggcagggctcgccccttccccccgagcagacaccattcctccgccgccctcaagcctagcctccagccccctttcccctcccgggggtgggggcttgaatgtgtgtccctaaccccccagcttcctaagccctgccagcctttcagcgcgtctctgggaatccctggcacaaaatcaccgccgcgctccagccttctccgccctctatggagaagccggagtaacggcctcagaaccgcagtgccgcatcacaccccacccctcgccgcccgccagcgccgcccgccaatgccgggggccgccgtcaaagggagcgcgctgctccctccgcgccgatatccttccgccgactccccgcccctcccgtgcagctgcctctggattgtgggagaagaaaaccgctgcatgagcgcgctcccgagcgagcgcgcccccgggctagcctcgccgccgcccagatcctggcggcgggcgcgggctcgggcgtgggcgcgcgctcgctgcagctgctgcggagacaacccgctcctcgcttgcgcccaggacggttgcctggtgggcggggacagggaaggcagagcaaggggtctgtctgctcgctcgctcatgcctaattatggtttatttcctccccgagtgacttctttgatacgtgaaggaaggggaaagaaatccttctcttataaacatgagggatgcagacagcctttttcggacagtttgatgtgttctgtaaagcatgccttctccccagcaaaatggaataggaaaactcactgcagcaaatggcagagggacttgagccacaacttgggggggnnnnnnnnnnnnnnnnnnnnncttccaaatgcagtccactaacgcatgaatgttcttcaaagttgcaagtgacatacagtaagattttttaaaaaccagagctgtctgtcagcacgttggtattccctgactggagcaaacgtgactcagacattgtnttntggtnctgttttgtnttttactatttgggcatgggtcggggggaacccaagcaaaatcaagagctacaaagaagaaacatttagaagtcatccaagttgggtgacaaataaacagattacatatttgtcataaatctccatgccaccgtacgactgggaaccttgaaataattttaagttccctgccaaaatcaaaggctactcctcaattcaaaggaaaataaagacctntttcccggggnaaaatgggcatatagaacgcaatctttttttgataaaagataatattatagttttataatgtgtgctatgtttacattacataaatatttacacggagtatatattttaaattagcagtaaaaatgtttttgtcataacacaattaagaaagagcagaatttcttaattgggtagttgagaacctggactctgaagtcttcctgcctggttccaatatgcaccagctgtgtgagcctacgcacgttattgagtctctttgtgcttcgattccgtcacgtgtaaagcagggctaataatagggttaaatgaaatggcagcttatagttaagtgttctataaatgtcattaatgttgtttttac

SEQ ID NO: 349821 - DNA, 880 bp, Homo Sapiens
  misc_feature (136)..(137): n is a, c, g, or t
aaccaatatggggggtgttttctttacctttttaaccattttaaattccaaagcttaatttaccatttcaaaaaggaattttttctttacaccaagcttttaccaacaacttgaccaaaataaggcaccaaaattnnaaaattttattatccttaataaatttccaactttccactgaaaagttttaatttaaggtaaagcttacaggcctggcaaggctaaacacttgtagggaggtacaaagattcaaatattctgtttacatgcggtctgactggaatgttatattaaatccaaaattaagtttatgttcatccaaattctcattagatcaatttagtactctaagcatgctccatttaccagcatcatcctcacaaataaagccttcattaacaatgccaatcagccattgtttttaatcaattactccccaaaagtacatggtttccaaatcccttcctctcagttaactgaaaaggatatacaggtaataaagatttttagcttaggattgatggaagtttgaaaggctttataaatattactaatatcatcaattcatgtcagcaaccaaatcccatttccttgaaaaccattaaatgagacctttccactgcaaatttaattatcattaaaatcctgttcgtgtttttaaaaactttttgggaatccctactaatcatgctattattggtgaattgatttgtttgataacataggttgaacatacaggtaaagtgtatgtgtgacctcccttacatatttccatttctgaacctacaacagcaccactgagctcacctgatagcactgttccaaatgcccttatcgttggtacactgaaacttaaaatgactaatttcaacttctatcttta

SEQ ID NO: 349822 - DNA, 1079 bp, Homo Sapiens
ctcactgtgtgtgtgcaaagatctctcttttgttgtctccttcaactgtttgtccgagttaactagataaatatttctgaagtctcatgttttagcaggttgtctatttctttacttttatttaaccttaaattcatcatcttgttaaatcttataacctgtactttcattatcgagagaaggattgggatcagaaactggggcgcaatagaataaaacaatggcttattggcatgttaataaggcttattgggaggataatcctcgtaatgtagcagctagagtactaaattgatctatgagaatttggatgaacataaactaattttggattgaatataacattcccagtcagacgcatgtaaacagaatatttgaatcatctgtacctccatacaagtgttagcctgccaggctgtaagcttaccttaattaaactttcagtgaaagtggaattattaagatataaatttatatttgtgctttttgtcagtgtgtaagctgtgtagaaattctttgatgtattagttgtattaatgtaaagtagaaacccattgttgaaactcctgtagctattatgcttttaatattgttttaatgatcttccttagaaataggcccataaaaatggtctggaagccaaaccaaagtatggtataatgtagatattgtaaagcagtaaactgaaaacatgtcctggcatgtattcagccatgtttaagtgacttttctgtaattgtaaaataaaaacttcaaatgggacctaaaacagtgatgtaaaagaactggttttggaaatttagcctaatttatctataagatggctgctaaattgatttttcagttctttttatcatctagaatataatagatatagaaatgaataatatgaagaacagtagtttgctttgaaatactaataaacttttatttaaaatgcttcatttttacttcttaaaatgtgctttggattcttaaattttgtttcactgaatgttcaatgttttaaatggcgattaaaatactctgctgtatatagtagtttttgagtaaatatttgcaataaaaatctgcccccg

SEQ ID NO: 349823 - DNA, 1135 bp, Homo Sapiens
gcattagtagatctcataagggcatgttagaattgtttactgatgttttacttttagtagctgttagactaaataatagcaataaaattcaatgagtgaaccaatttatttctatcacctgggctgttggctcatgttcactttcttttcatgtttaatatggccatttcttttgtacttgccattgaggattccattgtggtaatgtccattgactgtgctatgcttatttctagaccacagacttttgatttttctgtagataaattttgtcacccaagacaagagaaagtataacaaggcagcaccaagcaaagcacaaaggcaatatccagtaaaaaatactgacaaaaggagatctgatggacagcggcacgtaggtgatgggctccattgtgacgaataatataatctatccaatagatagttcgattgacagggtgaccaggttgatccttgtgaatttccgaaagcttctgagccctctgacggtagctgggattattgataaccttcactagtgcttcatagagctctttttcagtaactgtcttccattctagcaatatccccatgccttttgcctgtactctggtcatagtatcataatggtctccaaagagtggaattcccactacaggcacaccatgatacatagtttcaaaaatactgttcaaaccaccatggctcaggaaggctttaatctttgaatgcccaagcaggtcattttgtggtaaccattctatgagtttagtgttgtttcctagattctttggtttgggtccagaaaacctccaaatcactttttgaggcaatctccccagagctcctgccagtttgttagcaatgtcttctgacagatacttgacaccagctccaaaagacaccaagacaaagccatgttcattagcaccatttacccatctttggagatcttctggtagtgggctggctggtttggttaggattcctcctacataaacaacattaggcagagtgggtcttgggaattccagtgctacgtcagtacacagcatccacaggctggacccatgaaccaaatcatacatggacttctccggcagcaggttgtacttctgcattatcctttcatatttgggaaagaaccagaact

SEQ ID NO: 349824 - DNA, 354 bp, Homo Sapiens
  misc_feature (79)..(87): n is a, c, g, or t
ccggcccatagaaggttttttgctggataatttgtaacttttctaattgggaaaaaattcctattaatcacttaaaaannnnnnnnngtattttgtgttattgattatatacaaaggagacttttttttgagataacactcaaatagtgttctcttcttttgaaaattttatttttatctgaaaataacagttgatctgaaataaaaaggggagacctattagaatgagagtagccaaggaaagagttactaggtaataagcttcactttttgtgttctaattgtttttgagatataaagaccctgaaaaagcccatttaagaacctgtttaataagagcaaatataggggaaa

SEQ ID NO: 349825 - DNA, 787 bp, Homo Sapiens
taaatgctaggttatgcaaaaataattttatttcaatttaattttaatgaatctcccccaactataatattaaaaacatcaaaagaacttaagttttaatggcaaaaagttcctattttcccccatctactaaaaaggttgttttcccttattaacatacaatgccctattgttaaggcacaactttttttagattaaaaatgaaaccatagattaggtttattttatacaacagttacaagacagaccttttgtaggcatataaatacatcttaaattcaatcaagatctaaaatgaaaaattattttttctttctaggatcaatcaacacatagccaataggtagttacagctagaataattccaacagttcctgttttaacctgtcagattgtctccaaaaggccatcttcaaagtgcgatctaagagaggaaagctgaatattttcctttctgcatcggcactccacctttctttacttatgctcagctatcagagatggctgtcaccttcaaaagcctaagtgagatccaatttttgaattcaacatgaaacaaggacagatatcctgatcctggggtgaccagggtagatgtctcctgtgcatcctccctgttacccttctcctgacctccctctagcttctttctgaccctcttcctagccaccacccctctccctctgacacagttcacaaaatattcaaagggagcacctaacaaacaagaggaatttgcacaactgttacttaaaacatacaaaccaaaatgtttttgttacttcat

SEQ ID NO: 349826 - DNA, 878 bp, Homo Sapiens
tattggttggacgaggataagagactgagccgctagcagcgcctggggaccagacagacgcatgtggcaaagctcaccatcttcactacaaacacgcctgagagtggcactggggaaacataactccatctacaccttggatttggactgattctccattttatcacctgaaggcttgggccagagctcaacagctactcaactggaggggtgagggggataaggtctgtagtatacagacaggaagatggtaggtttatgccttctgtggccagagtcttggactcatggaaatagaatgaatagaggggcattcacaaggcacaccagtgcaagcagatgacaaaaaggtgcagaaggcaatcttaaaacagaaaggtgcaggaggtaccttaactcacccctcagcaaatacctatgtcaacagtataagttaccatttactctataatctgcagtgatgcaataaccagcataataaaaaggcaatcacataaaaaagagtttagtcgtctaaacataagtaactttaaggtgaatgaaagatcttctttaggaataatagatgatggtaagttccactttggttattggaaggcaagtcattattactggtattagttaaaacacatatcaaatgcttgctcttcatcatatatatagttatgcatacatacaccacacacatacagtatattctttcctcaaaagggttaagatgtctaaaatagggacctagaagcttaacactatttaagtaaatacagtagaagctcacaaatagatttctttgcacaatgattttttgcaaaattttacagtaataataatcccaaggcaaatctctcctgaactgctttccattccataattgtagt

SEQ ID NO: 349827 - DNA, 1233 bp, Homo Sapiens
  misc_feature (1119)..(1119): n is a, c, g, or t
  misc_feature (1141)..(1141): n is a, c, g, or t
  misc_feature (1172)..(1172): n is a, c, g, or t
  misc_feature (1176)..(1176): n is a, c, g, or t
ctctctgctgggtctgtgcgctggggcgcccgatcccctccgcagctgggacgctccgaactcgaggcaggagtcggctctccggagcctcgtccctcccttccccttccctgcacccttcccccacccccgactcgggcttggcgcggcggccagaggaaccccgagcccgcatttgctgcatcgagcagttggtttagtatcagccaaacttgcagctgttcagaccgcgctccgccgagtcccggcccaggcccctgagctggagggatggaaaactcctctgcagcatcagcctcctcggaggcagggagcagccgctcccaggagatcgaggagctggagcgcttcatcgacagctacgtgctggagtaccaggtgcaggggctgctggctgacaagacggagggtgatggcgagagcgagaggacccagtcccacatctcccagtggacagcggactgcagcgaaccgctggacagcagctgttccttctcccgagggcgagcccccccacagcagaatggcagcaaagacaactctctggacatgctgggcacggacatctgggcggccaacaccttcgattccttcagtggtgccacctgggacctgcagccggaaaagctggacttcacccagttccaccgcaaagtccgacacacgcccaagcagcccctgccacacattcgaccgcgaagggtgtgggcaaagggaaacctggaagaatggggatgggcatcaacctgaatgacatcgagaagggccttccagcctggcagggctaccacccgatgccccatgaagtggagatcgcacacaccaagaagctgttccgcaggaggagaaatgatcgaaggcggcagcagagacctccggggggcaacaagccccaacagcatggtgaccaccagccaggcagtgccaaacacaacagggaccaccagaaatcctaccaggggggctcagcaccccacccctcagggaggcccactcaccatggctacagccagaaccggcgctggcaccatggcaacatgaagcacccaccaggcgacaagggggaggcaggcgcacaccgcaatgccaaagagaccatgaccatcgagaacccaaaantggaggacactgcaggggacancgggcacagcagcctcgaggccccccgcagncctnacaacctgggcccggtggcttctgagcggcttcccccacagcagtcagggggggcca

SEQ ID NO: 349828 - DNA, 510 bp, Homo Sapiens
  misc_feature (24)..(24): n is a, c, g, or t
ggcggaggttcccagagagcccangatcgcaccactgcactacagccctgggcgacagaacgagaccctgtctccaaaggaaaaacaaaaaagaagaataaaataatttggatgaaaatcatgtttatttaaatagtaatgtcatgagactattaaagatgtgccagagtttcaatgaaaatcattaaagtaggacagctaagaaattaatattaatatcaaaattattgataatcttaaattattgattattccttaacgcactccattctccttttacattttatcatgtttcttttgaatatatgaattggcaaaggacttgatgaaactgagtactaagatttggtacagagtatgtcaggaagacaactcagattgccattttaaataaagttgtacatgaacaataattggaatcatcaggtaatttttttaaacaaaggttcttcatttactgttatgattggaaaaaaattagaaaataaagtaagtgccataggctaatta

SEQ ID NO: 349829 - DNA, 959 bp, Homo Sapiens
ctgaggccgctggcttgtgcgctgtctccgccgcccccctctttcgcgccgccgccgccgccccgggtcatgtcgtccaactgcaccagcaccacggcggtggcggtggcgccgctcagcgccagcaagaccaagaccaagaagaagcatttcgtgtgccagaaagtgaagctattccgggccagcgagccgatcctcagcgtcctgatgtggggggtgaaccacacgatcaatgagctgagcaatgttcctggtcctggtcatgctaatgccagatgacttcaaagcctacagcaagatcaaggtggacaagtcaatctcttcaactaacggagaaccatgcccagtccgcctttaagctttaaggacgtacttggccgccaatgcgctggtatccggaaaacccgttcggcgcaagaaggggtttaggcaaattgggactgaattccacgggaacgtttaccccaggaaagtttccaagctgggaacggcggccagccgggccccaccaccaagtccagcccagggtggcaaccagttcacaagtgggtattcacgggattggatggaggcccaaccggccgggttttatgccccgatactaattcgaagcaccgttaaacggtaatcaccgggtgacagagcactctttggcctccaatttcccaacatcgtaaccccttgggctggctttccccaatgcccgctacggggcgaaaccgccttggggcccaggataaagcacacttgggcccaaccagaaaacgaagttcccttgtatagaactcgggtaaaatactagtgtttattctaccgatagcgaccgaacgcgtctttgtagttaactttacccggcatgggagggaaaggccgtttggctatctacgctgtgcggcacacactatgtccaactcccggtccccttgtcagattcggggacccccgaagcgcataacggg

SEQ ID NO: 349830 - DNA, 1022 bp, Homo Sapiens
  misc_feature (1011)..(1011): n is a, c, g, or t
agactttcgaggatcccccaggacaagcaagaccaggaagcaaatagcagctcaggaaatcccacggttgacttgccttgatggcaagcttggtggagagggctgaagctgttgctgggggccgattctgatcaagacacatggcttgaaaatggaagacacaaaactgagagatcattctgcactaagtttcgggaacttatccccgacagtgactgaactcactgactaataacttcatttatgaatcttctcacttgtccctttgtctgccaacctgtgtgccttttttgtaaaacattttcatgtctttaaaatgcctgttgaatacctggagtttagtatcaacttctacacagataagctttcaaagttgacaaacttttttgactctttctggaaaagggaaagaaaatagtcttccttctttcttgggcaatatccttcactttactacagttacttttgcaaacagacagaaaggatacacttctaaccacattttacttccttcccctgttgtccagtccaactccacagtcactcttaaaacttctctctgtttgcctgcctccaacagtacttttaactttttgctgtaaacagaataaaattgaacaaattagggggtagaaaggagcagtggtgtcgttcaccgtgagagtctgcatagaactcagcagtgtgccctgctgtgtcttggaccctgccccccacaggagttgtacagtccctggccctgttccctacctcctctcttcaccccgttaggctgttttcaatgtaatgctgccgtccttctcttgcactgccttctgcgctaacacctccattcctgtttataaccgtgtatttattacttaatgtatataatgtaatgttttgtaagttattaatttatatatctaacattgcctgccaatggtgggtgttaaatttgtgtaggaaaactctggcctaaggagtttacgactttttcttgtaatgttttggtattgtgtattatataancccaacgtcaa

SEQ ID NO: 349831 - DNA, 798 bp, Homo Sapiens
  misc_feature (101)..(101): n is a, c, g, or t
gcattttgtttgaaaacacaatcagctctgacagttagacatgcacacagacgccatagctggattggaaacattgatgttttaaaaatttattttttttnggaaatagttgcacaaatgctgcaatttagctttaaggttctatagatttttaactagtccaacacagtcagaaacattgttttgaatcctctgtaaaccaaggcattaatcttaataaaccaggatccatttaggtaccacttgatataaaaaggatatccataatgaatattttatactgcatcctttacattagccactaaatacgttattgcttgatgaagacctttcacagaatcctatggattgcagcatttcacttggctacttcatacccatgccttaaagaggggcagtttctcaaaagcagaaacatgccgccagttctcaagttttcctcctaactccatttgaatgtaagggcagctggcccccaatgtggggaggtccgaacattttctgaattcccattttcttgttcgcggctaaatgacagtttctgtcattacttagattccgatctttcccaaaggtgttgatttacaaagaggccagctaatagcagaaatcatgaccctgaaagagagatgaaattcaagctgtgagccaggcaggagctcagtatggcaaaggttcttgagaatcagccatttggtacaaaaaagatttttaaagcttttatgttataccatggagccatagaaaggctatggattgtttaagaactattttaaagtgttccagacccaaaaaggg

SEQ ID NO: 349832 - DNA, 1453 bp, Homo Sapiens
  misc_feature (978)..(978): n is a, c, g, or t
  misc_feature (980)..(980): n is a, c, g, or t
  misc_feature (982)..(984): n is a, c, g, or t
aggcctgggtggcgaattcggcacgaggtgatctctttcgaaactcagggatgctgtaaaagaagctgagacctgtgcttctgtggctcagctgcttctgagcaaaaagcagaaacacagacagagcccagatagtgggaggactcggaccaaactgacagtggaagaattgaaggcctttgtccaacaactttttagtcttccgtgtgtcatcagccaagctcggcaagtaaagaatctgctagatgatgtggaagagtttcatgaacgtgctcaggaggccatgatggatgaaaccccagattcttccaaactccagatgttgatagatatgggctctagtctctatgtggaactccctgaattaccacgactgaagcaagagctacaacaggctcggtggttggacgaagtaagactgaccttatcagatccgcaacaagtcactttggatgtcatgaagaagctgatagactctggggtagggttggcaccccaccatgctgtggagaaagcaatggctgaactacaggagctccttacagtctctgaacgatgggaagaaaaggctaaggtctgcctacaggcaagaccgaggcacagtgtggcaagtttagaaagcattgtgaatgaagccaagaacattccagcctttctacccaatgtgttgtccttgaaagaagccttacaaaaggctcgagaatggaccgctaaagtggaagctattcagagtggcagcaattacgcttatttggagcagcttgagagcttgtctgcgaaaggacgccctattcctgtgcgtcttgaagcactgccgcaagtggaatcacaggtagcagcagcacgggcatggagagaacggactgggcggacgtttcttaagaagaattctagccatacattgttacaggtgctgagcccccaggaccgacattggtgtatatgggagtggcgaaaaataggaggaaaaaaaacccncnannnaaaacaaacaccctggcggccccctcggccccccgaaaagctttcttaaaccattcgcttggcgcgcgggccccccagggaagtgaccacggccctacccgcttcctaggcaaatcctggtcctggactaaggcttggactctccccaactaaaaacccccggagggcaacgagccgttccggacgactcccgaagcgccttttctcacggtccctcctcgccaccccccccatcgacaccaccgcagccccctgaaatcacgcctacccgccgtaccgcgttccgctacatgttcgcaccgtgactaacaacgccctttcaccacgtcccccgaacttccaccctctccttactcttgcgcccctgtagtccccttgacatatcccctggcgcgcccaagaccaccgacaacagagtggcgcacccaaccgactattctcggagccatccgcccggcgagaatgaatc

SEQ ID NO: 349833 - DNA, 527 bp, Homo Sapiens
gacatttgaagaactggtatgctactcactggtgaaggacagtcaggtgaaggactgtaagcccacacaagctcttcttatctctactagaattaaaatgttaagtcaaaaacggctccttttttgcgcctcctagtgaaacttaaccagctagaccatttgagtaccagcatttagttacaaacgtcaaaggcttccggtgctgcttaccttccttttttgttaatgtgcttttatttattaaaaaaaattacaatgaagatgcctgttttgtctctactgtgtactctgatcggatctttcccaagtgcagactccttgtggaggttttcttaaattgttccctttaaaagaaaatgaccgtcccaccaatggatttgggtttttaaatttactggaaaaaaggttaataatggtaaaggggggaagaaaccgccttttaacttttacagaaatggattgggaaataaaaataatttggataattgaattttacccccccgggggactcttggaattattggtta

SEQ ID NO: 349834 - DNA, 1547 bp, Homo Sapiens
cgctggtacggtccggaacgtttgggatatcgtcgaccacgcgttcgggggctcctccctcggacaatcccccctgtgcctttgacttggacgacccatcctgtgataaaactccactttcaaccctggcaattgtggctctgggcacaggaatcaccttcatcatgtttggtgtttccagcttcctaattttccgaaagctgatgctggcagaaggagctggctagcatgttgtggcgtattcgctgggaagaactgcagtttggcaactcagagcgttatcacaaaggtgcaggcagtcgcctcacactgtcgctgcggggatccagttacggctcgctcatgacagcccatgggaaataccagatctttgccaacaccggtcacttcaagggaaatgttgtcgccatcaaacatgtgaataagaagcgcattgagctgacccggcaggttctgtttgaactcaaacatatgagagatgttcagttcaaccatctcactcgcttcattggcgcctgcatagaccctcccaacatttgcattgtcactgaatactgtcctcgtgggagtttacaggatattctagaaaatgacagcatcaacttggactggatgtttcgttattcactcattaatgaccttgttaagggcatggcctttctccacaacagcattatttcatcgcatgggagtctcaagtcctccaactgtgtgggtgggatagtcgttttgtgctccaaatcacagactatggcctggccagcttccgatgcaactgctgaacctgatgacagccatgccctctatggccaaggaagctgtgggactgccccaggaactggctcagtggggaaccccttggccaaccacaggcatgcagaaggctgacgtctatagctttgggatcatcctgcaggagatagcacttcgcagtggtcctttctacttggagggcctggacctcagccccaaagagattgtccagaaggtacgaaatggtcagcggccatatttccggccaagcattgaccggacccaactgaatgaagagctagttttgctgatggagcgatgttgggctcaggacccagctgagcggccagactttggacagattaagggcttcattcggcgctttaacaaggagggtggcaccagcatattggacaacctcctgctgcgcatggaacagtatgccaataacttggagaagctggtggaggaacgcacacaggcctatctggaggaaaaacgcaaggctgaagctctgctctaccaaatcctaccccattcagtggcagagcagttaaaacggggagagactgtacaggctgaggcctttgacagtgttaccatctacttcagtgacattgttggcttcacagcattgtcagcagagagcacccccatgcaggtagtgacacttcttaatgacctgtatacctgctttgatgccataattgacaactttgatgtctacaaggtgggagacgattgcggatgcttacatggtggtatctggcctcccaggccgaaattggtcaacg

SEQ ID NO: 349835 - DNA, 1094 bp, Homo Sapiens
  misc_feature (143)..(193): n is a, c, g, or t
  misc_feature (991)..(1020): n is a, c, g, or t
tctagatatatctctcactatccgttattcaaccttagctctgctttctattactttttaggctttagtatattatctaaagtttggcttttgatgtggatgatgtgagcttcatgtgtcttaaaatctactacaagcattannnnnnnnnnnnnnnnnnnnnnnnnnnnnnnnnnnnnnnnnnnnnnnnnnnttagttaaatgaaactgaacagtgtttggccatgtgtatatttatatcatgtttaccaaatctgtttagtgttccacatatatgtatatgtatatttttaatgactataatgtaataaagtttatatcatgtggggtgtatatcattatagaaatcattttctaaaggagtgaattctaagttttaggggaaaaaatgcaatttattttcagactcccaaagtaagaattaacatatcatgctaagaaaatagtgactattttgaagtatgctacttccctttcagaaatatagaatacacgtttctgttattaaagtatttgattagctaattcaaatcatgatggcaattatgaattctgtctaaaatgctatcatttgtaactgtatcccctgtattaaatctcattaaccacaggcagctgttacagaaagctgcattgtttcacattgagctgttacattagttcaggctaaatgttgggagctccaaccacatccaagaataaatctggaaacacactgctgggatactgctgttagagcccttcttggccttgtattcccagaaatgagctccctttccttagcttagaagaatgtgattatatccaggacatcatgttcagaaaacttagtttactttcagcatagaatgcattactgttggaataattggcctctagctcttaaatgtctctgataacttattaatatctatctttataaaatagagtgcaactacttttgtgtaaaaatgtttgcctttaaatttagtatttcatatcagcacatcgnnnnnnnnnnnnnnnnnnnnnnnnnnnnnntaaaagagtctgtaataaattatttttttcacgtgtctctatacagtttttatttcaataaaaatattaacatt

SEQ ID NO: 349836 - DNA, 1915 bp, Homo Sapiens
  misc_feature (19)..(19): n is a, c, g, or t
  misc_feature (24)..(24): n is a, c, g, or t
  misc_feature (26)..(26): n is a, c, g, or t
  misc_feature (28)..(28): n is a, c, g, or t
  misc_feature (41)..(41): n is a, c, g, or t
  misc_feature (46)..(46): n is a, c, g, or t
  misc_feature (100)..(100): n is a, c, g, or t
  misc_feature (107)..(108): n is a, c, g, or t
  misc_feature (154)..(154): n is a, c, g, or t
  misc_feature (208)..(208): n is a, c, g, or t
  misc_feature (211)..(234): n is a, c, g, or t
  misc_feature (236)..(236): n is a, c, g, or t
  misc_feature (239)..(239): n is a, c, g, or t
  misc_feature (255)..(256): n is a, c, g, or t
  misc_feature (264)..(264): n is a, c, g, or t
  misc_feature (266)..(267): n is a, c, g, or t
  misc_feature (270)..(270): n is a, c, g, or t
  misc_feature (280)..(280): n is a, c, g, or t
  misc_feature (284)..(284): n is a, c, g, or t
  misc_feature (287)..(287): n is a, c, g, or t
  misc_feature (330)..(330): n is a, c, g, or t
  misc_feature (378)..(378): n is a, c, g, or t
  misc_feature (382)..(382): n is a, c, g, or t
  misc_feature (392)..(392): n is a, c, g, or t
  misc_feature (504)..(504): n is a, c, g, or t
  misc_feature (512)..(512): n is a, c, g, or t
  misc_feature (565)..(565): n is a, c, g, or t
  misc_feature (571)..(572): n is a, c, g, or t
  misc_feature (576)..(576): n is a, c, g, or t
  misc_feature (590)..(590): n is a, c, g, or t
  misc_feature (601)..(601): n is a, c, g, or t
  misc_feature (638)..(638): n is a, c, g, or t
  misc_feature (640)..(641): n is a, c, g, or t
  misc_feature (645)..(645): n is a, c, g, or t
  misc_feature (653)..(653): n is a, c, g, or t
  misc_feature (660)..(660): n is a, c, g, or t
  misc_feature (687)..(687): n is a, c, g, or t
  misc_feature (689)..(689): n is a, c, g, or t
  misc_feature (735)..(735): n is a, c, g, or t
  misc_feature (742)..(742): n is a, c, g, or t
  misc_feature (752)..(752): n is a, c, g, or t
  misc_feature (757)..(757): n is a, c, g, or t
  misc_feature (759)..(759): n is a, c, g, or t
  misc_feature (924)..(924): n is a, c, g, or t
  misc_feature (1666)..(1666): n is a, c, g, or t
  misc_feature (1787)..(1787): n is a, c, g, or t
tggaacatttatacatatnttcgntntnctgctatgtaatnttatntttaattgcaaacatttttacacaaaagtagttgcactctattttattaagatngatattnntaagttatcagagacatttaagagctagaggccatttattccaacngtaatgcattctatgctgaaagtaaactaagttttctgaccatgatgtcctggntannnnnnnnnnnnnnnnnnnnnnnncnagnctgctcttttctgggnntaccgggncnngangggctcttcntgcngtntcccagcagtgtgtttccagatttattcttggatgtggttggngctcccaacatttagcctgaactaatgttacagctcaatgtgaaacantgcngctttctgtnacagctgcctgtggttaatgagatttaatacagggggtacagttacaaatgatagcattttagaagaattataattgccatatgatttagaattagtaatcaaatactttantaacaganacgtgtattctatatttctgggaggggagtggcatacttcaaaatagtcactnttttgnntgcntgatatgttaattntttctttgggngtgtgagaataaattgcgttttttcccctaccccttngnnttcnctcctttngaaatgntttctataatggtgttctccaacatgntnttagctttattacattattgtcattaaaatatacatatacatatangtggacnctaaacaganttggnanacatgatataaatatacacatggccaaacactgttcagtttcatttaactaaattcaacaaatatttattgggtgcctactaccttgcagatcaccatgttaggtaatgcttgaagtagattttaagacacatgaagctcacatcatccacatcaaaagccaacntttagataatatactaaagcctaaaaagtaatagaaagcagagctaaggttgaataacggatagtgagagatatatctagaagaaagtcttggggtaatggacaagggacaaaagaaaatctgtatccatagggaagaactgctcctgggcttggcacgtgttaggagaaaactggaacctagtctgtactcctcttcaccccataatccaagattcagtcatcatcctgctttgtttcctctgttcctgtattttttctggatagaaaccaaacttgcattggttcttttttgcccttcatggacactgggcctctgtgctccaagtggaattgtggatctgaattttctggagacataagacatctgtatgtatattcagacacatttatttttcccttttctcctgtggtttctgttcggcttgtgaggttgacagtattcccaaaaagacagtatcgaggcatccgctgtcctatgacacctgtaactacctctccagtgtgtatccctattgttatctgaacagattcaccatctacttgaacctggccagcaatttccatcatgtccaaggccaggtggcagatggatcgtgcatggtgaatgcatggctctggtaaaccactcactgtcatatacttgtcaccaacagtctccaccttataaacaaatgggtttttccgggaatcagtcagtgtgtcaaatctggtgtagaggtcgttgaggaggttgacgatcntcatggctccttctccagatgcatgcttgctacagaaagcattgaagcccacaatgccactaaagaggatggtcacattgtcatatcttttggcaggcactggacgcttgtgccgcagctnattggcaacagacggaggaaggacagaatacagcaatgtgtctgtctttttcttttcatcttccaaggctcttaacgtgagctgtagcctgtcagtgaggatttccagttcttgggtgagtttgtatt

SEQ ID NO: 349837 - DNA, 552 bp, Homo Sapiens
  misc_feature (463)..(483): n is a, c, g, or t
gcatggatttaattagtcatgatattgataattactagccgttatgcaaaaggaaaagcccactctggtaatatcatccaagaaaaatgagaattatttatactagataccgattaaattggctaaaaactggtcagtgcccaaaccagtgtctttaggaggcccctaagttatccctgaaaaattattaatgaatgactggttaagtccagtttaatagttattagttcataacatgctggatatgccccagccatgaagcataagctattcaattacatttaagtgctatcaaatctgtaactagtcaaagattctgggactgaaccaaaccaatcactaatatcatcatattttaacaaactcaaaagtatactgtaaaaatacactaattaagttcatgaagtttataatactattaaaagtgaaaatagggtagtatgaatacatggtgctaatgtcnnnnnnnnnnnnnnnnnnnnnagtaattcttatggtattgctgggtctctcaggaatatgtatcatttgattttgacatgtggggttgag

SEQ ID NO: 349838 - DNA, 957 bp, Homo Sapiens
  misc_feature (922)..(922): n is a, c, g, or t
ctcttctggatgccggcaaaacatcaaccagattttatatacctttggcacgtaccgcttcgaaaagtgcatctcttcacaatcattcagatgagttgccttggccttttgtggataataaaagtttcaagagctgctattgtctttcccatgatggtgttagccctggtatttgtaagaaagttgatggacttgttgttcacgaagcgggaactcagctggttggatgatttgatgcccgagagtaagaaaaagaaactggaagatgctgaaaaagaagaagaacaaagtatgctagctatggaagatgagggcacagtacaactcccattggaagggcactatagagatgatccatctgtgatcaatatatctgatgaaatgtcaaagactgccttgtggaggaaccttctgattactgccgataactcaaaagataaggagtcaagctttccttccaaaagcattgaaagccgaaaagagaagaaagctgactcagggaaaggtgttgacagggagacttgtctatgactcgatcttcaatttattttttacatatatatgagaagagtgtcacaattattaataaaactgctttgatcatgtattgtaaattctgtccctcaacccaaatccaccttcatactgtaagtagtgcaatacttgtttcatttctgtgtttaaacttctgagcagtgagacatccctgtgagcagatacaatagccaatgcaagaatctgtgtgttccttgctgtacgttagacatttgtaaactggattctgattgtcagttttatgagagcaatagcttccttaaagagataagtcatatttaccctagtttgtattttcctactttagtgacctgaagatgcctgataatttcattcagaagaatttttgaaaggtagtcttacttcntttttagtttttatagcttagcattagtgacttat

SEQ ID NO: 349839 - DNA, 700 bp, Homo Sapiens
gggcacagtacaactcccattggaagggcactatagagatgatccatctgtgatcaatatatctgatgaaatgtcaaagactgccttgtggaggaaccttctgattactgccgataactcaaaagataaggagtcaagctttccttccaaaagctccccttcctaatcactctagaagctgattccccaaagcattgaaagccgaaaagagaagaaagctgactcagggaaaggtgttgacagggagacttgtctatgactcgatcttcaatttatcttggacatatatatgagaagagtgtcacaattattaataaaactgctttgatcatgtattgtaaattctgtccctcaacccaaatccaccttcatactgtaagtagtgcaatacttgtttcatttctgtgtttaaacttctgagcagtgagacatccctgtgagcagatacaatagccaatgcaagaatctgtgtgttccttgctgtacgttagacatttgtaaactggattctgattgtcagttttattgagagcaataacttccttaaagagataagtcatatttacctagcttggatttcctactttagtgacctgaagatgcctgataatttcattcagaagaaattttggaaggtaagcttactttcttttagttttaatagctagcaatagtgacttatttcaaaggaccccaatca

SEQ ID NO: 349840 - DNA, 1412 bp, Homo Sapiens
cccacgcgtccgcccacgcgtccgcgccggcggttgcctcgcggggttgcggcgagcccggcccgcgaacgtcacgtccctgcgcgctccctgcactctcccgagctgcgctaggcgggcgccacggctgcccggcgaaggaaaccgaaaccgagtccgggcccgtccctccgcggccccatccgcccggtgcacccggggtcgcgctcgccaggccgcggagcccagagctgcgcgcacgaaccgtgcgccgggagggcgtgggcgtggcgccgaagggtcccgggtcttcgacgcctctgcggcggctcctccctccttgcagttggatccctggcgggtgcggcccggcccggcccgtgagcggcgcacagaatgggccgatgctgcttctacacggcggggacgttgtccctgctcctgctggtgaccagcgtcacgctgctggtggcccgggtcttccagaaggctgtagaccagagtatcgagaagaaaattgtgttaaggaatggtactgaggcatttgactcctgggagaagccccctctgcctgtgtatactcagttctatttcttcaatgtcaccaatccagaggagatcctcagaggggagacccctcgggtggaagaagtggggccatacacctacagggaactcagaaacaaagcaaatattcaatttggagataatggaacaacaatatctgctgttagcaacaaggcctatgtttttgaacgagaccaatctgttggagaccctaaaattgacttaattagaacattaaatattcctgtattgactgtcatagagtggtcccaggtgcacttcctcagggagatcatcgaggccatgttgaaagcctatcagcagaagctctttgtgactcacacagttgacgaattgctctggggctacaaagatgaaatcttgtcccttatccatgttttcaggcccgatatctctccctattttggcctattctatgagaaaaatgggactaatgatggagactatgtttttctaactggagaagacagttaccttaactttacaaaaattgtggaatggaactgcgaaaacgtcacttggactggtggataacagacaagtgcaatatgattaatggaacagatggagatgcttttcacgccactaataaccaaagatgaggtcctttatgtctccccatctgacttttgcaggtcagtgtatattactttcagtgactatgagagtgtacaaggactgcctgccttttcggataaagttcctgcagaaatattagcaatacgtcagacattggcggcttttggataccttgaggaaactggctgggctcaggaattctgaatgtcaccatcttgcaaaaatggggcccccatcattatggctttccacaacttttaccaagc

SEQ ID NO: 349841 - DNA, 505 bp, Homo Sapiens
gttaaaaacacacagcacagaacattagtcttacatctttcttagtcttaaaaaatataaatatagagggataatttgtacaggatgtataggtatgtacacctttaatatgcatatgagaaattcagaaccaagtttatgaaacttgaccttaaaggaagccttccttttgaagcttttgaagaaggctctgagccacaggcagctgtcccagttccagcagccccgattctagtccactccaggtcctcctgacctggtgcgcagtgctgggagcagtgctggccaggtcactgcttcctctccactggctgctggagacacagctcactccctgcagagacaatgggcaggctgctttctaggtggtggttgatgaggtggctgatactgtcaaagactctgtcctttgtccggatcgtgccttctggggtccacgagcagcaggtgcttgggcctggcattgtgcatgcccgtgaggacaaaggagcccgggttggtggtg

SEQ ID NO: 349842 - DNA, 3110 bp, Homo Sapiens
  misc_feature (2369)..(2378): n is a, c, g, or t
  misc_feature (2412)..(2423): n is a, c, g, or t
agctggtacggtccggaatttaaggatcgccggcgctgacaggggccgccagcccctccgccgcgcggagcccacgaaggggacagcgcagccggcccagagctcgggtctccggggaccgagccttatgatctcctcattgcgtccccctctgcccactggacttggacttcagatctgaccccagacctgccggctacctcgggagggcccacctccccgcccatccagcaagatgccaatcctcaagcaactggtgtccagctcggtgcactccaagcgccgttcccgagcggacctcacggccgagatgatcagcgccccgctgggcgacttccgccacaccatgcacgttggccgggccggagacgcctttggggacacctccttcctcaatagcaaggctggcgagcccgacggcgagtccttggacgaacagccctcttcttcatcttccaaacgcagtctcctgtccaggaagttccggggcagcaagcggtcacagtcggtgaccaggggggagcgggagcagcgtgacatgctgggctccctgcgggactcggccctgtttgtcaagaatgccatgtccctgccccagctcaatgagaaggaggccgcggagaagggcaccagtaagctgcccaagagcctgtcatccagccccgtgaagaaggccaatgacggggagggcggcgatgaggaggcgggcacggaggaggcagtgccccgtcggaatggggccgcgggtccacattcccctgaccccctcctcgatgagcaggcctttggggatctgacagatctgcctgtcgtgcccaaggccacgtacgggctgaagcatgcggagtccatcatgtccttccacatcgacctggggccctccatgctgggtgacgtcctcagcatcatggacaaggaggagtgggaccccgaggagggggagggtggttaccatggcgatgagggcgccgctggcaccatcacccaggctcccccgtacgccgtggcggcccctcccctggcaaggcaggaaggcaaggctggcccagacttgccctccctcccctcccatgctctggaggatgaggggtgggcagcagcggcccccagccccggctcagcccgcagcatgggcagccacaccacacgggacagcagctccctctccagctgcacctcaggcatcctggaggagcgcagccctgccttccgggggccggacagggcccgggctgctgtctcaagacagccagacaaggagttctccttcatggatgaggaggaggaggatgaaatccgtgtgtgaggcggacagtgggtggccaccgggagctcttggctgcatcttctccctgcccccaccccactatgacctttgaccctacggcgcaggggcagccaggacccttgattcagaccatggaccctggaccttgtagatgagggacactggcctggccctcgggtcttcggaggacgtagggggctggcatgggtgccgactggctgcctgacttcatcatgctccctgcacttaggctgcgtgggacaagggctgtgttgtcacagcaggaataggttttcctctgttggcctccctttcctccaccctggcctcaaatggatgccagatgccaaccccagttctggccacgtacagccagcgggtcagcccagaggcagcctcagctccagggctaaggactctcggctcccattttctctgctggcgtttctgctgtgcccagcagtggctgctggggaagcagctgcagcaggagggagacggtcttgcctctcagcccctccctgccccaccccagctcctgccctggaaatctggagccccttggagctgagctggacggggggccagctgcgagcatgtgcactaaacgcagccctttccagggaagagaacaggatggagaatggaaggaaagccccccaggcttcgtgaattgcaagaagggacccttccaggatgacactaggaacagggctagggcactcgctcagtccctaggggcttgtttgttctttattattgtgtttaaatccttatagagcaatatcaggatggtgttaataggtctgcctcagaatgagaatcaatccttttagaaaacctttatactaagcctcctcttcaaaattcacagtggcgattagcggactggagtctggtggcgattagcggactggagtctggggacatccgtggcaaagacaccagctcaactttagtgcttcccaactttatttagaatgacatggggtgggtgtctggtgtgtgtgttttccctacgcacctcccatagctattaacaactgaggaaggccagtgcagaatatttttggagaacgannnnnnnnnnaaataatatatcattcctatggggggaaagcccnnnnnnnnnnnngggctgagttattccctccctcccctcaataccctcagtactgactacttccctttcttttctcaggcctccccccaccgacttttgaggccagggttggccagatttagcaaaaccaaaacagagtgctgagttaaacgcaaatttcaggtaaacaaaagataattttctagcattaatatgccccacgcaatatttggaacacttatgtgaaaaatgatttgtttttctgaaatttacgtttctctctgagtcctgtaactgtccccgaggggattgagcagaagctcgggtatgagccctgaggttgactgccggttatttttctgtcctgggaacagcctgacccacctccctgtctccatgtagccagtggggggagggggagacacagaaccaaccacagccaggggcgtccccatggcgactgtggcccggcccctcctctcttgcctgactctcctctcttgcctgactctagacactaacttagttccaggttcggtgccctgttggtgctcctgtttccaatagcttaggtcccatggtgggggaggaacctcaggggctatgcagcccccgccagctgccctcaaatcccgtccaggccagttccagattctaaactgatttttttcatgatattgtcaaaacagtgaggaaacattaaaaaaaaagccctaaagc

SEQ ID NO: 349843 - DNA, 1094 bp, Homo Sapiens
  misc_feature (70)..(125): n is a, c, g, or t
agcgggcgagaggccgagcttgctgcattgcagccgccgcggcgccgctcggctcttcactcccaacaannnnnnnnnnnnnnnnnnnnnnnnnnnnnnnnnnnnnnnnnnnnnnnnnnnnnnnnacccccggccccgtagggtccccggcgccaggccacccggccgtcagcagcatgcagggtaaacgcaaagcactgaagttgaattttgcaaatccacctttcaaatctacagcaaggtttactctgaatcccaatcctacaggagttcaaaacccacacatagagagactgagaacacacagcattgagtcatcaggaaaactgaagatctcccctgaacaacactgggatttcactgcagaggacttgaaagaccttggagaaattggacgaggagcttatggttctgtcaacaaaatggtccacaaaccaagtgggcaaataatggcagttaaaagaattcggtcaacagtggatgaaaaagaacaaaaacaacttcttatggatttggatgtagtaatgcggagtagtgattgcccatacattgttcagttttatggtgcactcttcagagagggtgactgttggatctgtatggaactcatgtctacctcgtttgataagttttacaaatatgtatatagtgtattagatgatgttattccagaagaaattttaggcaaaatcactttagcaactgtgaaagcactaaaccacttaaaagaaaacttgaaaattattcacagagatatcaaaccttccaatattcttctggacagaagtggaaatattaagctctgtgacttcggcatcagtggacagcttgtggactctattgccaagacaagagatgctggctgtaggccatacatggcacctgaaagaatagacccaagcgcatcacgacaaggatatgatgtccgctctgatgtctgggagtttggggatcacattgtatgagttggccacaggcccgattccttatccaaagtggaatagtgtatttgatcaacctaacacaagtcgtgaaaaggaggatcctccgcagcttgagtaattcttgagaaaagggaattctcccccgagttt

SEQ ID NO: 349844 - DNA, 760 bp, Homo Sapiens
agcggggaattaacagagctgcattgcagaaggatgcataaagcagtattcatctagagatcgtaacagtacggacacagaagaacagttgcagtgatgtgcaggagagagactgagaacacacagcattgagtcatcaggaaaactgaagatctcccctgaacaacactgggatttcactgcagaggacttgaaagaccttggagaaattggacgaggagcttatggttctgtcaacaaaatggtccacaaaccaagtgggcaaataatggcagttaaacagaattcggtcaacagtggatgacaaaagaacaaaaacaacttcttatggatttggatgtagtaatgcggagtagtgattgcccatacattgttcagttttatggtgcactcttcagagagggtgactgttggatctgtatggaactcatgtctacctcgtttgataagttttacaaatatgtatatagtgtattagatgatgttattccagaagaaattttaggcaaaatcactttagcaactgtgaaagcactaaaccacttaaaagaaaacttgaaaacttattcacagagatatcaaagccttccaaatattcttctggacagaagtggacatattaagctctgtgacttcggcatcagtggacagcttgtggactctattgccaagacaagagatgctggctgtaggccatacatggcacctgaaaagaatagacccaagcgcatcacgacaaggatatgattgtccactctga

SEQ ID NO: 349845 - DNA, 490 bp, Homo Sapiens
  misc_feature (385)..(435): n is a, c, g, or t
  misc_feature (455)..(455): n is a, c, g, or t
  misc_feature (461)..(461): n is a, c, g, or t
  misc_feature (480)..(480): n is a, c, g, or t
aaaaaaagaaaagacgcgtgcctgcggtgaggaagctgggcgctgttttcgagttcaggtgaattagcctcaatcccccgtgttcacttggctcccatagccctcttgatggatcacgtaaaactgaaaggcagcggggagcagacaaagatgaggtctacactgtccttcatggggattaaagctatggttatattagcaccaaacttctacaaaccaagctcagggccccaaccctagaagggcccaaatgagagaatggtacttagggatggaaaacgggcctggctagagcttcgggtgtgtgtgtctgtctgtgtgtatgcatacatatgtgtgtatatatggttttgtcaggtgtgtaaatttgcaaattgtttccttnnnnnnnnnnnnnnnnnnnnnnnnnnnnnnnnnnnnnnnnnnnnnnnnnnnaagcttaattgtcccagaantcctgnttcctaggaaacccggacnatgaacatgt

SEQ ID NO: 349846 - DNA, 1177 bp, Homo Sapiens
  misc_feature (314)..(314): n is a, c, g, or t
gggggcaccatttcccgagaggacggaacctcggggcaagccgccaatccgggacaggctaccaggaaccgtggggggaccaagcgcctccaggaacagccccccactggccagtagcgcacggccgcgccgggtgtgcaatcaggcaaagagtccaggagtctcaggtcgcaaggaagaagtgctgagagcagcccgggaccttcagagccttccctggtgacgcccaggagatgcagaggtgcgcggggaccaccaagggaggacctgtgagctcctcactggccagggccttctggctgcgctcaccggcncctgagcagctccctccgagtcttcggggctccgggccaatcgcacagtggagacgccgtgaagcagcagctactccctgactctggcccaggccgcagcctctgtctgacaggggtagcatcgggctccagggacaaagctgggccgagctagcaagaggacagttgtgggggacacaacgatgacagtgactggcagaggcactgccaggacaaagacccaaattaacgtcacagagtcttggtcgtttcaacaagcctgaagtgcatatattttctagttgcagcgttactgcaaaccaaaccaacttttctgcctctttacacggcggggttctgcagcagcccggcctctcttctgggcacaaacacgccttccgcggggtggggcacatggggagactagcccagcagatcacacggcccgcgtctcggcttcgatcttctgctccccgtgcaggttctctgggcccagcggctgcgccacactctggcggatggcaatctcggggccacctccatacaggctgttcaggtaggtccaggtctcctccgaaatctgcccgtagtcagctccctgcttcagctggacatggccgcttcctttgacctgtgcaatcctgctgttgtcaatgggcccggggggctcgttgtccttccccttgacgaacgcctcccactcccggaaccactgcatgctgatgcagtagatgacgcccggcgactcctcggcctggaaggccttgttcaacttgatgaaggtgtcgatctcgatcctcctgcgcttggccagtgcctcgatctccacctggcagatggagcacacgtacaggtggttcacggcggggccacccccgaatctg

SEQ ID NO: 349847 - DNA, 876 bp, Homo Sapiens
ctgccccagaacgtctggtgagcacctgtacaacagattcgggggtggccccgccgtgaaccacctgtacgtgtgctccatctgccaggtggagatcgaggcactggccaagcgcaggaggatcgagatcgacaccttcatcaagttgaacaaggccttccaggccgaggagtcgccgggcgtcatctactgcatcagcatgcagtggttccgggagtgggaggcgttcgtcaaggggaaggacaacgagccccccgggcccattgacaacagcaggattgcacaggtcaaaggaagcggccatgtccagctgaagcagggagctgactacgggcagatttcggaggagacctggacctacctgaacagcctgtatggaggtggccccgagattgccatccgccagagtgtggcgcacgcttgggcccagagaacctgcacggggagcagaagatcgaagccgagacgcgggccgtgtgatctgctgggctagtctagcaggtccctgaaagcaccttcctggaggatgtgggagggccctggacatggcccggccccactgctgagtgcccgtgtccccacagccccatgtgccccaccccgcggaaggcgtgtttgtgcccagaagagaggccgggcttgctgcagaaccccgccgtgtaaagaggcagaacagttggtatggtttagcagtaacgctgcaactagaaaatattttgcacttcaggcttgttgaaacgaccaagactctgtgacgttcatatgggtctttgtcctggcacgtgcctctggccagtcactgtcatcgttgtgttccccagattgtcctcttgcttagtcgggcccagtttgtccctggagcccgatgatagccct

SEQ ID NO: 349848 - DNA, 1041 bp, Homo Sapiens
  misc_feature (708)..(708): n is a, c, g, or t
  misc_feature (904)..(952): n is a, c, g, or t
  misc_feature (962)..(963): n is a, c, g, or t
  misc_feature (968)..(968): n is a, c, g, or t
ctggtaccggtccggaattcccgggattgctgggcgggacgggcgggcgcggggcggcggctggagagctccgctgagcaccgggtcgcgcgcggccgagtcgcggaggcgcctccgctgcagtcgctgcgtctccaagcaacatggctgacaaggccaagcctgccaaagctgccaacaggacgccccccaagtccccgggggacccctcgaaggaccgggcagccaagaggctgtcgctggaatcggagggtgctggtgagggggcagccgcatcccctgagctcagtgccctggaggaggccttccggcgctttgccgtgcacggggacgccaaggccaccgggagggagatgcacggcaagaactggtcgaagctgtgcaaggactgccaggtgatcgacggcaggaacgtgaccgtcactgacgtggacatcgtcttcagcaagatcaaagggaagtcttgccggacaatcacctttgagcagttccaggaggcgctggaggagctcgccaagaagcgattcaaagacaagagcagcgaagaggccgttcgcgaggtgcacaaggctcatcgagggcaaggcgcccatcatctcagggggtgacgaaagccatctcgtcgcccacagtgtcgaggctcacggacaccaccaagttcacgggctcccacaaggagcgcttcgacccctctggcaaggggcaggncaaagctggcccgcgtggaatctggtgggacgagtccaggctatggtgtccggctatcaagcacgcaaggaactaacaaccaaaaaggggcaaggggggcaaagaaaccccccgctcagtgcttcccgggaatggcccgggggcccccaaagaaagggaaattctggtaacctcgcaatttacttaaatttcccgnnnnnnnnnnnnnnnnnnnnnnnnnnnnnnnnnnnnnnnnnnnnnnnnncgcttggtgnnctccnctcataccccccacacaaactacgtccaacggaccacctacacaccccgaggatcgcgcggcgcaacaccacc

SEQ ID NO: 349849 - DNA, 669 bp, Homo Sapiens
  misc_feature (345)..(358): n is a, c, g, or t
cggggtgtagggggagatagggagtagagggaggacgcgtgaacgatggggggcgttcgaggtgatggaggtggttgtggccagcgagagcccagtcgaatgggcccgctgtaccccagcgaaggaagccttgttgctcgggcgccggtggaatgccctcagcgctctaagcacgccctctactgtctactctccggctgcacaggcagtgacttgtacctcgtcgtatcacccttcccgggctgagaaagccaaggtaccagaaaaacatatgtttggcaaaaaggtccatgttgaggggctccgtggagaatgcttcatcatggccatgcaaaaagcttcatnnnnnnnnnnnnnngactcgtgaacaatgcattaaacggttttatcagaatctctttcaagagcccaatgtggatcctacagaaagaagcattccacttaagcagattctttaagttatttactttccttgtcaagaaccttttccatattgcacagagggcattttagattttatttcaaaaatgactgaaaaattaactcgaccctgatcacttagctatatggaggtatatgcaagaatgctttagagagagtgaagaagtacattcaattaactcctcttcctttgtaaaagcattttactaaaaataaaaacaatgtcat

SEQ ID NO: 349850 - DNA, 754 bp, Homo Sapiens
  misc_feature (92)..(92): n is a, c, g, or t
  misc_feature (141)..(141): n is a, c, g, or t
  misc_feature (435)..(435): n is a, c, g, or t
aagggccagcgcatcacctttaataaacctcttattaaagctgcttatttttcatagggcaggaccattaaagcgactcaatggcattcaanctgatggaagattttaatggcaagacgaacccacattcactagggcccnctgtacacagacaaagaaggcttgctgctcagcccgctgtgaatgacctcagcacttctagccacgccctctattgtcaactctccccctgcacagccagtgacttgtacctcttcttatcacccttcccgggctgagaaagccaaggtacaagaaaaacatatgtttggcaaaaaggtccatgtcacttacattctgcacatgataaaaggccaggggacttcctctgccattgtttttgaggggctccgtggagaatgcttcatcatggcgatgcaaaaagcttcataaaanaaataaaaagactcgtgaacaatgcattaacgggttttatcagaatctctttcaagagcccaatgtggatcctacagaaagaagcattccacttaagcagattctttaagttatttactttccttgtcaagaaccttttccatattgcacagagggcattttagattttatttcaaaaatgactgaaaaattaactgaccctgatcacttagctatatggaggtatatgcaagaatgctttagagagagtgaagaagtacattcaattaactcctcttcctttgtaaaagctttttactaaaaataaaaacaatgtcat

SEQ ID NO: 349851 - DNA, 718 bp, Homo Sapiens
tatcggatgccacaatgattcagtgatctccactgcaatattctgcgcatgataaaaggccggggacttcctctgccattgtttttgaggggctccgtggagaatgcttcatcatggcgatgcaaaaagttgaactgacagaagatatctgcatactctgggaggattccactggcctgcaacactgttactcggaaagtgaaggcactgcccagtttcaggtggttgccaatctcttcagaaaacccttccattaccatcttaccatccagcaaagtgcttgacttcaaatccaagtcattaattcgactgatttcttctggaggagtgatgacctcagaactctgaccctgtccttccacaatcctcaactcctccaaggacagaccagaacgagtcattgcaacagacgaaaagtcactctgattaaagtattcattatcaaaagatattttagctgttcctgactgtcgaattccagagccataatcaggagcttcttcatccgctgcgatggcctgtacagccacacgcagaaatccccgcacttcacctttctcactgacgatggccaccctgtggatcaggggcacgggatacagcagattgctcaggtaaacaaatgcccttcccactaaaatgaaccaaggggatcggtcgtaaaacgggtcatgcccgtcactgaagagatctgatccctcctccgtccctgctcgtg

SEQ ID NO: 349852 - DNA, 602 bp, Homo Sapiens
tggtcaaccacagctgggatatactctcctgtaggctccagttcactgatctcaaaccaaaccaggaggtcatacttgctcatgctctggccaaggctggttttgctcatcgtgtttaacttggtggctggaactggcttggacagtggcatgggtggagggaagaatcggcggcacggctgaggcggactgttaagctcctgtccttgcagatgaagtgggtgctgctgataatgcccaaagacttcaaatacaataggcttggttttgatgtaatccacaaatgattcagtgatctccactgcaatattctgcacatgataaaaggccaggggacttcctctgccatctagtttttgaggggctccgtggagaatgcttcatcatggcgatgcaagaagccaagtcattaattcgactgatttcttctggaggagtgatgacctcagaactctgatcctgtccttccacaatcctcaactcctccaaggacagaccagaacgagtcattgcaacagactgaaagtcactcatgactgtaacagtacttcattatcaaagatattttagctctacctcacccgtggggtactctagagtct

SEQ ID NO: 349853 - DNA, 1153 bp, Homo Sapiens
ttatgtaccattatgttagtggatccttccatgattgccttttccaagatagtaggcctaaatattagggtcctacagtttataaatgaggaggacagactccccagaggttaagcagccttaacctaaagtcacatagcatcagtacagttaagaatatggagtttaaatctggccggttccagccaccaagttaaacacgatgagcaaaaccagccttggccagagcatgagcaagtatgacctcctggttggtttgagatcagtgaactggagcctacaggagagtatatcccagctgtggttgaccacacagcaggcttgccttgccaggggacatttttgcttcatcagggcatccagcgaaggatcacagtgaccattatccatgagaaggggagcgagctccattggaaagatgttcgtgaactggtggtaggtcgtattcggaataagcctgaggtggatgaagctgcagttgatgccatcctctccctaaatattatttctgccaagtacctgaagtcttcccacaactctagcaggaccttctaccgctttgaggctgtgtgggatagctctctgcataactcccttcttctgaaccgagtgacaccctatggagaaaagatctacatgaccttgtcggcctacctagagctggatcattgcatccagccggctgtcatcaccaaggatgtgtgcatggtcttctactcccgagatgccaagatctcaccaccacgctctctgcgttagcctctttggcagcggctactcaaagtcaccagattcgaatcgagtcactggcatttacgaactcagcttatgcaaaatgtcagacacaggtagtccaggtatgcagagaaggagaagaaaaatcttagatacgtcagtggcatatgtgcggggagaagagaacttagcaggctggcggccccgtggagacagcctcatccttgagcaccagtggaagctgaagaagctggacctcctacatgaggtggaaaaaacccgccactttttgctgctgcgtgagagacttggtgacagtcatccccaagatccctgagtcgactcgtttatcccccatgcctcagcatgtgggaccctcatgcacctccaccagatatctccatctcagcatctcaac

SEQ ID NO: 349854 - DNA, 1197 bp, Homo Sapiens
  misc_feature (1071)..(1071): n is a, c, g, or t
  misc_feature (1106)..(1106): n is a, c, g, or t
  misc_feature (1178)..(1178): n is a, c, g, or t
agcggagcgctcgggtccgcctctgactgcagcgcggcggggcgatgtgtgattaccatggcgaggagtctctgtccgggggcctggctaaggaaaccctattacctccaggctcgcttctcatatgtgcggatgaaatatcttttcttttcctggttagtggtttttgttggaagctggattatatatgtgcagtattctacctatacagaattatgcagaggaaaggactgtaagaaaataatatgtgacaagtacaagactggagttattgatgggcctgcatgtaacagcctttgtgttacagaaactctttactttggaaaatgtttatccaccaagcccaacaatcagatgtatttagggatttgggataatctaccaggtgttgtgaaatgtcaaatggaacaagcgcttcatcttgattttggaactgaattggaaccaagaaaagaaatagtgctatttgataagccaactagaggaactactgtacaaaaatttaaagaaatggtctatagtctctttaaggcaaaattgggtgaccaaggaaacctctctgaactggttaatctcatcttgacggtggctgatggagacaaagatggccaggtttccttgggagaagcaaagtcggcatgggcacttcttcaactgaatgaatttcttctcatggtgatacttcaagataaagaacatacccccaaattaatggggattctgtggtgacctctatgtgatggaaagtgttgaatatacctctctttatggaataagccttccttgggtcattgaactttttattccatctgggttcagaagaagcatggatcagctgttcacaccatcatggccaagaaaggccaaaatagccataggacttctagaatttgtggaagatgttttccatggcccctacggaaatttcctcatgtgcgatactagtgccaaaaacctaggatataatgataagtatgatttgaaaatgggtgggatatgaggaaaaattgtgccagagacaaacctggaaaggaacttatttaaggatcgtcactgtggagtctggatttnggactgtgtctatggggcacagatttagggactangctgttgatccagagtacatggaggtgtacttccggaggttgattaccaccccaactttgggccaaagcttnttccggtttcctccaaggg

SEQ ID NO: 349855 - DNA, 1833 bp, Homo Sapiens
  misc_feature (673)..(681): n is a, c, g, or t
tgatggaaagtgttgaatatacctctctttatggaataagccttccttgggtcattgaactttttattccatctgggttcagaagaagcatggatcagctgttcacacccatcatggccaagaaaggccaaaatagccataggacttctagaatttgtggaagatgttttccatggcccctacggaaatttcctcatgtgcgatactagtgccaaaaacctaggatataatgataagtatgatttgaaaatggtggatatgagaaaaattgtgccagagacaaacctgaaagaacttattaaggatcgtcactgtgagtctgatttggactgtgtctatggcacagattgtagaactagctgtgatcagagtacaatgaagtgtacttcagaagtgatacaaccaaacttggcaaaagcttgtcagttactcaaagactacctactgcgtggtgctccaagtgaaattcgtgaagaattagaaaagcagctttattcttgtattgctctcaaagtcacagcaaatcaaatggaaatggaacattctttgatactaaataacctaaaaacattattgtggaagaaaatttcctacactaatgactcttagttcatttggacataattaccattttaagaaacctgccacttttaaagaacaattttgagcattnnnnnnnnntggcttcaaattcctgccagttacacaaaactccttccccccaggcctgagaagccatcagtatgtgattactgaagtaatggcaggtgtaggatcaacaggtccccaagatgtcattcctgcccttttagaagccctgttacatctccgaagtacattcattgtgtaactattttgactgactttaaaaaccaatgctgtgaaaagcttcattccataaacatcaacagtgagtgatttgtagatttaccttagccaaaataccaatgctggaagcattgtgtttgcattgaagctgctgttcaacaagaaaatttataaatttactaatgtcttagcatggtaaagtttgcacattaacagaaattaagaacgcaaagcaggttaaacttgcttctttataaaacagatgttgggttaatagcatggttcactgtattaaagacttatacacccatttttaacctcattcagacatcaagttatgtgtagcttcacaatggttcaagtggcttacttcaagaaatcttatacttgacagtacaccaattttattgactaaaaatggatgaactttcctaaagattcaaagggcccatcttagtatcacgcagctgactgagcccttcaaaactgacatcttaaggcccaatcaagatccacatatcctgattttgaactatgtgaaagtgggactgttaagtgcaagactaaaataaattatagcagactttttagtaataactttccattttcaaacagtatatcctgtgggccaaagggctatttcttaaagaggcatgtaaatgtatttatttatctaatgtttttttccccatgtaaacttgatatacaaggtttagtatttgctcctctttcatattattttcacacgtatactcagatttggcatgtacctttcaacatctccataaaattaaacaccttttggagaaaagatccactattttctgctcaaaggtttcgcctacctaaagtggaacatgttaaaaatctatgtgaccatcactggacagctttctctcaaaactttccttcaacgccatggattagcaccagttttgtttactttaaggtacttttcccattcatcatctggttataataaatggatggaagaaataaaaaaaa

SEQ ID NO: 349856 - DNA, 1026 bp, Homo Sapiens
gctggtaccggtccggattcttccgatgggacgggagctgcggcgctgtccacgagagtgacccagtcagcgttggttcccgtcttggccatggcctcgttcgtgacagaagttttggcacactccgggaggctggaaaaggaggatctggggacccggatcagccgcctgacccggcgggtggaggagatcaagggtgaggtgtgcaatatgattagcaagaagtacagtgaattcctgcctagcatgcagagcgcgcagggcctgattacccaggtggataagctatctgaagacattgacctgctgaaatccaggatagagagtgaggtccgccgggatcttcacgtatcaaccggtgaatttacagacttaaagcagcagttggaaagagactcagttgtcctaagtttgcttaaacagttgcaggagttttccactgctattgaagaatataattgtgcattaacagagaagaagtatgtcactggtgctcagcgtctggaagaggcacagaaatgcttgaagttattaaaatccagaaaatgctttgatttaaaaatattgaaatctctcagcatggagctcacaatacagaaacagaacatactttatcaccttggagaagagtggcagaagctgattgtatggaagttcccaccatcaaaagataccagcagtttggaatcttacctacaaactgaacttcatttatacactgaacaatcgcacaaagaagagaagacccctatgccacccatcagttctgtcctcctgggcattttctgttcttggagaactacacagcaagcttaaatcatttggtcagatgctgctgaagtatatccttaggccgctgggcatcttgcccatccccttcatgctggtgatagaaagcccagcctaacctaggtttattatttcgtttttggaacctataatggacttaaccttgggaatattccattcacccctctggaaagttttttaccaaaagattccagacctgggttccttagaaaggtc

SEQ ID NO: 349857 - DNA, 594 bp, Homo Sapiens
  misc_feature (400)..(400): n is a, c, g, or t
  misc_feature (461)..(461): n is a, c, g, or t
  misc_feature (469)..(469): n is a, c, g, or t
  misc_feature (496)..(496): n is a, c, g, or t
  misc_feature (512)..(512): n is a, c, g, or t
  misc_feature (584)..(584): n is a, c, g, or t
attcggcaggaaaaaaacacaatagttacagacattatttaaactttttttcagaaaaataagaattaatcaaaaccccaaatcaaagtagatctgcacacctgaggtcagttcttacagtgcatgctttattgtcctcgttaccatattcttcagagctaactttgtaccacattccaatgccatctatcaataagaagcaacagatggctgacaaaccagcggcctgaagtgatggcggctcttagggtagaactttccttgttttactgtgtcagtaactttctggatactgaggaatagaacagaattccaaaacagggtttttgtccccatctgtatatcttcaaagtaggaaaaattactcattgtttttgtaggatggttgggcatttagggngaatataattttgtaataaataactacatactgcccaaaggacacttcagaaaagatgggntggaaaantacagtcagggccctgaggcttaactnggaactcccaagagtngcaaacacttgggcagcgttcccggggttttaccctggggttttttattaaaaaaaggcagaagccccaggntttaacaatt

SEQ ID NO: 349858 - DNA, 1559 bp, Homo Sapiens
  misc_feature (334)..(334): n is a, c, g, or t
cctctcccccccctccctctaacacacgttgtaaaagaggtggtaccggtcggaatttcgaatgggcttttacgatgaggtttccaggcttggaggttaaatgacttgccagaagttggaatttttttcctctttgaacataacctctcccttctccctaaaggtaaccactattctgagtccaatcatcaaggttttgcttttctttttagctaagtatgcattcctcaatagtagacagtacaacatgtttataacaagccaattacattatgttctttgcatgttctaaagttgtgtatgtgtgtgcacatctgagcacgtgcacatgtancacctgagccaaaaacacgagaacccactgatctcaccactggggcaagctaggtcagagcttagtgattcacactgaaattggcaaattggatttaacccaattaatagtgtgtgtgtggcaggagtcatgtccctcacatcctttgtacaaatgaaaattactcttaattccttcagatttataataactctgtactttggtttcagggtgacatttgggaaggattttgtttagaattaatggagtggcacattttgcagcctttttgcttgattgcatgtaatggaaatgccctatattttcctgcaaaataagtactaaattcattatcgttaagcaaatgtacaatatgctcaggcaccgcagagagctgggcacgggcccatgtgagcatcactttggaagtagggctcttcaacagggacccttgaactttaaagaaaggaacttctttttgccttctaattgatcatttagactattctggctaagtctgcccacatgtaattaccggctaattcaagcgaggaaaaatgtaagtcatttagaccaaagccaagcagtttctttgcgtgggttactcaagggcttgtggttacttgtatctcctctatgtgaacttgactttgaaagacagagctctagtgtgccagcctgctaagtcctgtaagaatagggaagggcggaggggggtgggcagtgactaggggacgagaagcatggggaaaatatttgcactctaaacatacagagatagaggtggggcttgtggtacttaacacttgtagccatcaactgactgagaccttgggctaaataatcaattgtgctgatattacatctcgttatggaatgttcctaaatatgccaggtagacaccagcccaagtaccctcctccagaagtctgtgactaccttgtcactactttaggcccattccacaaagcccatctctggtttgagaattcattttgatctgtatctacaccacccaaagttaggcctcctataatgtccaaaacattcctttcagcctttttatttcttactgtactgtctcttactgtactgtctatctgcagtaattgaggacccataaaatttagataactacatgtatttgctcttagaattgtaaatcagcataatgagcatttaacatacaaaggcaatgtaatgttttgtgttgatctatgtaaaagaatacaattcttttttacat

SEQ ID NO: 349859 - DNA, 791 bp, Homo Sapiens
  misc_feature (42)..(42): n is a, c, g, or t
  misc_feature (64)..(64): n is a, c, g, or t
aacggaacggaaaaccctgggggctaaaaaaaatcaaatggngccggaaaaattaacatcctcngttaagggaaaggtcccctaaaataaggcccaggtagaacacccagcccccaagtacccctccctcccagaaagtcctgtgacctaccttgtcacctactttaggccccattcccacaaagccccatctctggtttgagaattcattttgatctgtatctacaccaacccaaagttaggcctccctataatgtcccaaaacattcctttcagcctttttatttcttactgtactgtctcttactgtactgtctatctgcagtaattgaggacccataaaatttagataactacatgtctttgctcttagaattgtcactcagcataatgagcatttaacatacaaaggcaatgtactgttttgtgttgatctatgtaaaagaatacaattcttttttacataattagtgaaattttattttttattaggaaacactaaatagtgtaatatttcttttgcttttaaaaaaattcctggtagcaaatcaagataaataattgcttcattttcttgagcaatactgaagcaggatgaagtaagaggaatgcattcatttaaacatgctttgctttatgaattttgtctcttttttggtctctttttcttatattcaagttacaaatgtacaagtatccttactaagagtgctccttttgtattttacatatatacagtatgaaaatacattggaacactaggaaagtttcctaaataacagttctaattt

SEQ ID NO: 349860 - DNA, 488 bp, Homo Sapiens
  misc_feature (16)..(16): n is a, c, g, or t
  misc_feature (33)..(33): n is a, c, g, or t
gaagcctccacaaggncccgtgccccagctccnctgcggtgccctgagcaaaatggtacatttgccttaacgaataatgaaatttagtacttattttgccaggaaaatatagggcatttcccattacatgcaatcaagcaaaaaggctgcaaaatgtgcccactcccattaattcctaaacaaaatccttccccaaatgtcaccctgaaaccaaagtacagagttattataaatctgaaggaattaagagtaattttcatttgtacaaaggatgtgagggacatgactcctgccacacacacactattaattgggttaaatccaatttgccaatttcagtgtgaatcactaagctctgacctagcttgccccagtggtgagatcagtgggttctcgtgtttttggctcaggtgtacatgtgcacgtgctcagatgtgcacacacatacacaactttagaacatgcaaagaacataatgtaattggctt

SEQ ID NO: 349861 - DNA, 753 bp, Homo Sapiens
  misc_feature (50)..(50): n is a, c, g, or t
  misc_feature (513)..(565): n is a, c, g, or t
  misc_feature (578)..(628): n is a, c, g, or t
tagtatatagaaccacatttaatgagcagaaactagttgctgagtgcttntacgtagacagaagtagagaaacgagcagattcatgagaggagaaaaaagaaacaaatatatagtgcatgtggacaggaactacacagaggatttctaaaagctgcctccaagaccaattcaggtcctagagggaaaaatgtacaacattgagttctgagaaggctgggcagatacatcacagacaatgcatggtttggaggcatgaaactaaacaaatgccttcccaatactctacatccacagggatacaaatgcagtgtcatctgtgggcagtcttcctgttaacttgacacaagatcagccctccatctgcaggtgtcaaagctccattaataattagttcctgagtcaaatataatactgacaaaaacattgtagatctttcatcttttgggggaatttttagtcataaatttaggattccactgtttctttaaagcaaagccactagtagctgaggnnnnnnnnnnnnnnnnnnnnnnnnnnnnnnnnnnnnnnnnnnnnnnnnnnnnntgcttaagcccannnnnnnnnnnnnnnnnnnnnnnnnnnnnnnnnnnnnnnnnnnnnnnnnnnatgacacggcgagaccacatctcttaaagagaaaaactttttaaaaagcaaaaagcaaagccactaaaatatgttagcctaaagaggcatgcctgcttcattacagacggtatgacacatcttga

SEQ ID NO: 349862 - DNA, 895 bp, Homo Sapiens
atatttactttcgctaggtcagtgatgttggtgttctcaattgtgggagagtttatatggatttggaagggggggagaagatatcttaccagggtgggaattgtgggaatgggggagttttgttagttgggggtgagccaaagggggtcatttaaaaatggtgcggggacgccaaacttttacaaaggacagaatgtagagttagtccaaatgaatatacaacttttgtattgggtccatgagggaaaaaacataccaacagctttcagggctacaaaggcaacaaaaagcctcttgaaaacaactgaaaaggtatgtaacactatttctaaaactcactttaattcaagcgcttaactctaagatacattagccctacttaatcctgcaaaatgaagcagccgtgatcttcaaaataaacagaccaatttatggtaatagctgactgtggctgatcatagagttaaaaatttgttaaatattaaaagaaatctagattgaagtcacttcaagtaagtaaagcatcctggtttaaacaaacgtatttcttcctaagccttcgtatgattccacatgtcaccccaaaaggtaaaaatgatagtagggatttgtcctacagggatttatcctgagagacagagataaacttcagccagatgacatctgatgggataggctgcctgactggtattgtgctttcagagactagcactgctgctgacctaccatcaaaacacattttctgacaaaatccctgctcaaatgaaatgccaaaattcctcccccaggatgatttttgaaaaaatcagtggttcctttaaaaagctatcttcaaaatgttcttaccactgttatagctgccacagacaaagcatacaaaccaaatacttttggg

SEQ ID NO: 349863 - DNA, 547 bp, Homo Sapiens
tccactttctgcatttcagaaaaccaagccaggcaacttaattttaaaagcatggtgatggagtcttagatccaattgacccatgtggtttctctggttctcagtagcttgggttgctcctgaaaagtcactgccagtggcttggccgacagtgtggttctgggcccaggatgccacttactgtaaaataaaacatttctgtttcctgctggttggctctcctcttggcaatgttgatcttgctcatgtaggtctcagaggcagccgacttgacggactctgtcgatcgactgcgttggaaggcatcggagacatcaaagtcctccacagtcagcatgtcctgtaatgtctgcatggtggcatccagggttttcctaacctggggaaacacagcagattgacaaaaatcctgtattctcatactgccgttgacacctaaagtccctttcccagctgtcactttacttcttccatatgaagtccctaggatataggcagaacaaaaataatccttctcactgtattaatgtggaaaacacaaattagt

SEQ ID NO: 349864 - DNA, 326 bp, Homo Sapiens
acccatacaccattctcagccaaattccaaaaaaccatcagttgtttacagtaatagatttaaaagatgccttctgggcatgccccttggctgaagacagctgagacatatttgcttttgagtggtaggatccccattcagggcgaaaacaacattattgatggacagttttacctcaagggtttacagactctccaaacctttttggtcaaattttagaacaagtgttagaaaaagttgtcatcccaaagcaaatatgcctgctccagtacatggatgatattctcgtatctgttgaagatgtagagaaagtagctggcttctct

SEQ ID NO: 349865 - DNA, 415 bp, Homo Sapiens
catagtaaaatgaagtaaaatggaaagtttggagtaggagaaaagagagattagatcttaaggcacttgatggcctccaaaaatcctgactttggaacatcaaatgcatatgtgcacttttatctttgttctgagtcactgcagtccccaaagtcatatgccaatgttcacactgaaatactgtattgtacaccaaactggaaggcaattttcctatgaaaatcaaagccggtatattcattggtatgctctatacagatatcttaataaaaattttatagtgtgaacagtgcacagagttaaggcataaaaatgtatcattctttataaaaatctactgaaaatgtgtaatcattgaagacagttcttttaagcatgattttaaaatagcaactgaaattcaatcattttaaac

SEQ ID NO: 349866 - DNA, 2092 bp, Homo Sapiens
  misc_feature (1897)..(1897): n is a, c, g, or t
tgaggtacttaaggatccgtgtcatccccttcgtcatgatacctaagctcagctgtctcgccgcctgcccgggacgtggccgcacccttgctgtggctgtgtttttgaggctgctgtcccagcacccagcacctctggaagaacaaggtctctgggtccccgagggccagcgcgccaggatcaccgtggctgctctggatgcctccaatctcttgggcagcgttccatcacccccagcgctcagagcatgatgtgctcttccaggtcacacagttccccagccggggccagctgttggtgtccgaggagcccctcccatgctgggcagccccacttactgcagtcccagctggctgcagggcagctagtgtattcccacggcggtgggggcacccagcaggatggcttccactttcgtgcccacctccaggcgccagcaggggcctccgtggcttggaccccaaacctcagaggcctttgccatcacggtgagggatgtaaatgagcggccccctcagccacaggcctctgtcccactccggctcacccgaggctctcgtgcccccatctcccgggcccagctgagtgtggtggacccagactcagctcctggggagattgagtacgaggtccagcgggcaccccacaacggcttcctcagcctggtgggtggtggcctggggcccgtgacccgcttcacgcaagccgatgtggattcagggcggctggccttcgtggccaacgggagcagcgtggcaggcatcttccagctgagcatgtctgatggggccagcccacccctgcccatgtccctggctgtggacatcctaccatccgccatcgaggtgcagctgcgggcacccctggaggtgccccaagctttggggcgctcctcactgagccagcagcagctccgggtggtctcagatcgggaggagccagaggcagcataccgcctcatccagggaccccagtatgggcatctcctgcgtggcgcgggcggaccacctcggccttcagccaattccacgatagaccagggcgaggtggtctttgccttcaccaacttctcctcctctcatgaccacttcagagtcctggcactggctaggggtgtcaatgcatcagccgtagtgaacgtcactgtgagggctctgctgcatgtgtgggcaggtgggccatggccccagggtgccaccctgcgcctggaccccaccgtcctagatgctggcgagctggccaaccgcacaggcagtgtgccgcgcttccgcctcctggagggaccccggcatggccgcgtggtccgcgtgccccgagccaggacggagcccgggggcagccagctggtggagcagttcactcagcaggaccttgaggacgggaggctggggctggaggtgggcaggccagaggggagggcccccggccccgcaggtgacagtctcactctggagctgtgggcacagggcgtcccgcctgctgtggcctccctggactttgccactgagccttacaatgctgcccggccctacagcgtggccctgctcagtgtccccgaggccgcccggacggaagcagggaagccagagagcagcacccccacaggcgagccaggccccatggcatccagccctgagcccgctgtggccaagggaggcttcctgagcttccttgaggccaacatgttcagcgtcatcatccccatgtgcctggtacttctgctcctggcgctcatcctgcccctgctcttctacctccgaaaacgcaacaagacgggcaagcatgacgtccaggtcctgactgccaagccccgcaacggcctggctggtgacaccgagacctttcgcaaggtgggagccaggccaggccatcccgctcacagctgtgccttggccanggggcccccctccaggaaggccagccctgacccagaagcctgctgcaagttctgcccggaacacccaaacccctgccccttaaagaatgggcaggtaactggggtgttgagggcctgggccttgtggcccaaaaatggctggattcggggcccaggggacaaagggcttggccccattggttcccgggggcccct

SEQ ID NO: 349867 - DNA, 481 bp, Homo Sapiens
  misc_feature (60)..(60): n is a, c, g, or t
tctgggttcaagctggcctcccctggaagggggcccctgacccaggcaacaactgtgaancgggaatgccctggccctggctcccaccttgcgaaaaggtctcggtgtcaccaacccaggccgttgcggggcttggcaagtcaggacctggacgtcatgcttgcccgtcttgttgcgttttcggaggtagaagagcaggggcaggatgagcgccaggagcagaagtaccaggcacatggggatgatgacgctgaacatgttggcctcaaggaagctcaggaagcctcccttggccacagcgggctcagggctggatgccatggggcctggctcgcctgtgggggtgctgctctctggcttccctgcttccgtccgggcggcctcggggacactgagcagggccacgctgtagggccgggcagcattgtaaggctcagtggcaaagtccagggaggccaccagtcaggggacgccctgtgcc

SEQ ID NO: 349868 - DNA, 1955 bp, Homo Sapiens
  misc_feature (180)..(188): n is a, c, g, or t
  misc_feature (538)..(538): n is a, c, g, or t
  misc_feature (933)..(965): n is a, c, g, or t
ttttttaaatgtgcagtcgttgaatcatttcttcatagtgctcccccgagttgggactagggcttcaatttcacttcttaaaaaaaatcatcatatatttgatatgcccagactgcatacgattttaagcggagtacaactactattgtaaagctaatgtgaagatattattaaaaaggnnnnnnnnnccagaaatttggtgtcttcaaattataccttcaccttgacatttgaatatccagccattttgtttcttaatggtataaaattccattttcaataacttattggtgctgaaattgttcactagctgtggtctgacctagttaatttacaaatacagattgaataggacctactagagcagcatttatagagtttgatggcaaatagattaggcagaacttcatctaaaatattcttagtaaatagtgttgacacgttttccataccttgtcagtttcattcaacaatttttaaatttttaacaaagctcttaggatttacacatttatatttaaacattgatatatagagntattgattgattgctcataagttaaattggtaaagttagagacaactattctaacacctcaccattgaaatttatatgccaccttgtctttcataaaagctgaaaattgttacctaaaatgaaaatcaacttcatgttttgaagatagttataaatattgttctttgttacaatttcgggcaccgcatattaaaacgtaactttattgttccaatatgtaacatggagggccaggtcataaataatgacattataatgggcttttgcactgttattatttttcctttggaatgtgaaggtctgaatgagggttttgattttgaatgtttcaatgtttttgaggaagccttgcttacattttatgggtgtagtcattggaaatggaaaaatggcannnnnnnnnnnnnnnnnnnnnnnnnnnnnnnnncatactctccttactttatttcagttaccatccccatagaatttgacaagaattgctatgactgaaaggttttcgagtcctaattaaaactttatttatggcagtattcataattagcctgaaatgcattctgtaggtaatctctgagtttctggaatattttcttagactttttggatgtgcagcagcttacatgtctgaagttacttgaaggcatcacttttaagaaagcttacagttgggccctgtaccatcccaagtcctttgtagctcctcttgaacatgtttgccatacttttaaaagggtagttgaataaatagcatcaccattctttgctgtggcacaggttataaacttaagtggagtttaccggcagcatcaaatgtttcagctttaaaaaataaaagtagggtacaagtttaatgtttagttctagaaattttgtgcaatatgttcataacgatggctgtggttgccacaaagtgcctcgtttacctttaaatactgttaatgtgtcatgcatgcagatggaaggggtggaactgtgcactaaagtgggggctttaactgtagtatttggcagagttgccttctacctgccagttcaaaagttcaacctgttttcatatagaatatatatactaaaaaatttcagtctgttaaacagccttactctgattcagcctcttcagatactcttgtgctgtgcagcagtggctctgtgtgtaaatgctatgcactgaggatacacaaaaataccaatatgatgtgtacaggataatgcctcatcccaatcagatgtccatttgttattgtgtttgttaacaaccctttatctcttagtgttataaactccacttaaaactgattaaagtctcattcttgtcattgtgtgggtgttttattaaatgagagtttataattcaaattgcttaagtccattgaagttttaattaatgggcagccaaatgtgaatacaaagttttcag

SEQ ID NO: 349869 - DNA, 447 bp, Homo Sapiens
ggggcatgagccactgcgttctgccccaaaaatggatatacatactttacatatgcctgcttaagcagtgcatatattatacaaaatactttcattagcctctgtgtcccaaaagtaccattttacaaattattttctagctacattttaatttcaaattcaaaaggaagaacatttgatgaaataactgctgttaagtgcatggtaggttggaacagataaaccccttctcttgttaaaaccttgttctcaaaacaagcaaaatccttgtttctttaaaatattttatttcatactcccctgagatttaagacttgcttgttttcctagattttacagtcaagaactttgtctttaacgaggcacctctggaatatctcggaatgtgctgtgattctgggggctgcccagttcacaaattgttcattgctcaattaaaactctttt

SEQ ID NO: 349870 - DNA, 1938 bp, Homo Sapiens
  misc_feature (1316)..(1389): n is a, c, g, or t
tttttttttttactttttcctagtcttatggaaagcaaatatacaatgattttcagtaggcttctggaatagaaacagtggtttgaagaccccactgccacctttatggactggcccctttgagtctgaatccccggcctctgtcacctgagacccaacccctagctgggccaactccagtgaattcacccatttttcttcttcagaaggcctttcctgtgtgagacccacatattttaaccttttgctcctatcccatttttaaagaattagagaataaaccaggcctgtttcttttcccctgaaatccctgcctctggcttcctaaacccatcatctaaggtgacagagcagtgctggaatagcatctcctttcactttcccaaaactgccacagatagctgccactggcatgctctttgattcctggaagcaaacgtgggactgtcggaggaaagggattgttctggtcttactcataactgggtggtttgagggtgactgaagtcgtgcttttcctgtgtgtgctgccagcacagggctgtaaatgcagatattgcgcctgtgtgcgtgtgtataagtcaagctccaagaggctcctgaatgtgactggcgtgctgagaatgtgtttacgctgtttaatgtctgccaggtgagggttacactgaagatgcacaatccctaaaataaagatcaccacttccccaaagaagcagccctcgggtccatgtgttgttcagacatgtgaagagaagcaagacagagggtctcagatggacgagggctctccaagggaatgcctggggattcacccagtggtccccagaggtgctccatggaggcaacaagtcattccatgaagccccagaggtagaagggacctcaagcaccacgccctccagggcagccgtgcagacgaccttggttcacttttcaggggtcgtcccaactctgtatctccagccactccaactgtggaggctgtaaatccagattttcactgttccagtctcctttgcagcttaggatggctatgtgatcaggtgtggccaatgaaattgaagaggaagtctacctgggcttctgggaaagcttttccaataaaagacacaggcatggctaacacctccctgggcctcttcttcctaccttgattgagggtgtgatgcctggagccacagcagccactttgctaccatgacaaaaaggccaagagaatcacagagtcattgaccctatcattatttcaccaagccaataccagccgccatccttctccagaattcttgtaaataaaataaatccctctttgtttnnnnnnnnnnnnnnnnnnnnnnnnnnnnnnnnnnnnnnnnnnnnnnnnnnnnnnnnnnnnnnnnnnnnnnnnnngaggggggcggcggcgcaaaaaagtagtatcaccaggggggcgaccacacgacagacgcgaccgcagccacgttttcgctagcagaaagggcggcgcccacatgtgtggaggcgacacactaattagcaccgagaagcacatggcgcggccgtcatttttaacagagcgagcgtgggatgagggttggaaacaacgttgctgaccggggcgaaacttctatggtggaggaggaggaacacccttctatagtgcgctgagggcgcacacaacctaattgtggggaaaaaacctactccatcagagagagtaataatatagaggactccctggtagggcggcgaaagacctaaacaacaagcccaccaacggatgaggtctaacgtgcggtgttaaccacaacacgaggagcgaagaataatctgattgcatgggcgtgagcgtaaaaaaatgcatctttgtcgccgccaccaggaaggagtaagtaatgatgaagggaccacatttttttctaccaacggcggacagggagcagtaaataaagggggggg

SEQ ID NO: 349871 - DNA, 757 bp, Homo Sapiens
  misc_feature (28)..(28): n is a, c, g, or t
  misc_feature (152)..(152): n is a, c, g, or t
cgcaaggtggatttctgtcagagtttantgggtaaaattgttgaaatagccttctaaggtgtaaagaagattggacaggtgaaatctgaattaaggcctccacagttgaagtggttgaagatacaaagttggaatgatccctaaagagtgancaaggttggtttgcacggttgccctgcagggcgtggtgcttgaggtcccttctacctatggggctcaatggaatgacttgttgcctccatgaagcacctatggggaccactgggtgaatcccaaggcattcccttgaagagccctcgtccatctgagaccctctgtcttgcttctcttcacatgtctgagggattgtgcatcttcagtgtaaccctcacctggcagacattaaacagcgtaaacacattctcagcacgccagtcacattcaggagcctcttggagcttgacttatacacacgcacacaggcgcaatatctgcatttacagccctgtgctggcagcacacacaggaaaagcacgacttcagtcaccctcaaaccacccagttatgagtaagaccagaacaatccctttcctccgacagtcccacgtttgcttccaggaatcaaagagcatgccagtggcagctatctgtggcagttttgggaaagtgaaaggagatgctattccagcactgctctgtcaccttagatgatgggtttaggaagccagaggcagggatttcaggggaaaagaaacaggcctggtttattctctaattc

SEQ ID NO: 349872 - DNA, 736 bp, Homo Sapiens
ggaatactcgatatataagtatagattttaaagatatgggactttattttcacataagtcaatagatgtttctctagaacaaaatatttagtaaagctttataaattatattaaaaggaagcggggaacatgtattttttaacatagaacagaagtgacttcattctttttagacatcagaaatgttaaagttgattcccaatatttgttgtacttttttgtagcaaatgttaaaaatcacgagttaccatgtatagaatgtggactgtcatgttgatatcattgtacagtgataagccatttttatctgtatacatttcaccaatttattaacaggttgaatatttgtttctttttagaacattttatttatactgtgaagactttgttataccttatttgctacaacatagatcatatcattgctactttgacttagcatttgcatcataaacataattatgatgtttttttcatgctcccttccaggggctcagtcacttgaagaaactgttgctaaccaagctcttgactctgtttcccttaatgatacaagtctctgtaccagcgctttatgttaattaccaaaactctcctgcatcagagcatgatatctataataggagatactgcaataaaatgattaggctgtaaaatttggagacacaatttttcattacaatgcaatttgcatgtgcacatgtgcgcacataactttatatggtagttctttttt

SEQ ID NO: 349873 - DNA, 798 bp, Homo Sapiens
  misc_feature (346)..(402): n is a, c, g, or t
gttattatggatgacagttttaattagtttaaatatttattgagttaatgtattttgcagcaacttctttatagaattctatggggtttctctaggtatgaaatgaccttgttaaataaaatttaatttaccacataattcttttaatgaatttaaaaaaactgtcttgccttgattctgaaatgtactatacacattttgatagtgaatttgatatttttgaaatgccgtttatctcttatggcctgtacctaaaacgttttaatcataaatacatttattttaattctttataaacctaaaatactttcgttcttgaaataaagtttctaaatctggaacatcnnnnnnnnnnnnnnnnnnnnnnnnnnnnnnnnnnnnnnnnnnnnnnnnnnnnnnnnnatatttaacttaagtaggctattttaaacaaaaaaaagattacaagaaaatccttatgccacttgatgtctttctgcaagtttttattgattgtaatacattcacttgtatttctcttcacttattgttgctcaaaggtctaggagtagtcataggaataactgtacaagtttagcctcatcagttgaaaatgtataaatgatccaaaagttaaaggaaaagtgcccaaagattgtttgtagtgtagctgagcagtagctagacttggtagggtttcgaccagagaagaaatgacatgctggtagctatgatcaaagagtaaatacttaggagctattgatataaaaacatttttcttccattctattttaaaataaccaatttgcccttttcacc

SEQ ID NO: 349874 - DNA, 1158 bp, Homo Sapiens
actgtgttgacctggctgcagaaatcgccaaacattgtgggttcaagtacaagttgacaattgttggtgatggcaagtatggggccagggatgcagacacgaaaatttggaatgggatggttggagaacttgtatatggggaaagctgatattgcaattgctccattaactattacccttgtgagagaagaggtgattgacttctcaaagcccttcatgagcctcgggatatctatcatgatcaagaagcctcagaagtccaaaccaggagtgttttcctttcttgatcctttagcctatgagatctggatgtgcattgtttttgcctacattggggtcagtgtagttttattcctggtcagcagatttagcccctacgagtggcacactgaggagtttgaagatggaagagaaacacaaagtagtgaatcaactaatgaatttgggatttttaatagtctctggttttccttgggtgcctttatgcggcaaggatgcgatatttcgccaagatccctctctgggcgcattgttggaggtgtgtggtggttctttaccctgatcataatctcctcctacacggctaacttagctgccttcctgactgtagagaggatggtgtctcccatcgaaagtgctgaggatctttctaagcaaacagaaattgcttatggaacattagactctggctccactaaagagtttttcaggagatctaaaattgcagtgtttgataaaatgtggacctacatgcggagtgcggagccctctgtgtttgtgaggactacggccgaaggggtggctagagtgcggaagtccaaagggaaatatgcctacttgttggagtccacgatgaacgagtacattgagcaaaggaagccttgcgacaccatgaaagttggtggaaacctggattccaaaggctatggcatcgcaacacctaaaggatcctcattaagaaccccagtaaatcttgcagtattgaaactcagtgagcaaggcgtcttagacaagctgaaaaacaaatggtggtacgatggtgaatgtggagccaaggactctggaagtaagggaccagtgccctcagtctgagcaacgttgctggagtattctacatccttgtcgggggccttggtttggctgctggtggctttgttg

SEQ ID NO: 349875 - DNA, 379 bp, Homo Sapiens
agtgatgatgtagggaaggaaagccgttttagggtagaaaataaacagtgggtcaaaatgtgattgctaatcagtacaaaaagaccttcagcgactgaccttactcccggagtccttggctccacattcccccttatcgtaccaccatttgtttttcagcttgtctaagatgccttgttcactgagtttcaatactgcaaggtttacaggcgttcttcacgtgggaaataacataaataacattatattatgttattttatgttattcaagcttcaaactacttaaaaactatagaaagcgataaagcagggggccctggccacagagtaattttagacactgcaggcaacctgagcattacctaataaaaagtacaga

SEQ ID NO: 349876 - DNA, 955 bp, Homo Sapiens
  misc_feature (505)..(646): n is a, c, g, or t
cgtggcaaagcaagaccccatcgccaaattataataaagaaattctggtgtgcctctgagtcacaccagctgggaacatgctttggcagtaaccaggtgagctgacttgccacgtgggattatttactggaatgcagtcaggcacgcgggaacagctgcagtagcttaactctggttttggaacagctgaccagtgaatggcctgggttttctggcagaaacaggtatctcagttgttttgttttgtttttcagttgtctattaaggttgcttccagtagacgagaatgaaaccccgtcggctgctcttggtagctccttgctactcaaaatgtggtaggaggatgagcagcctcggccccacctgggatcttgctggcctctcagctccacccacacctgctgagtcagactctacacttcaaaaagatctctgggccatttgttgcagtcaagtttgagacccactggaccagactagtgcctcagagtctcctggagggctnnnnnnnnnnnnnnnnnnnnnnnnnnnnnnnnnnnnnnnnnnnnnnnnnnnnnnnnnnnnnnnnnnnnnnnnnnnnnnnnnnnnnnnnnnnnnnnnnnnnnnnnnnnnnnnnnnnnnnnnnnnnnnnnnnnnnnnnnnnnnnatccagactgcagagggctggctggcaaatcagctgcatgttgggagtcacctgaggaatgttttaaatgctgatgcctgagtttggacctgaggttcaaatgtaagtgatctggaatgtggcctgggatcaggatttttgtaaagcaccttgggtgagtccatgtgcagtagattttgagagctgtattctagtggatctcgccctgttgctaacccaccagaaggaaccagagcagaacgcggacgcgtgggtcgacgatatcccgagattccggccgtaccgccgcttttacccaggttcatatcc

SEQ ID NO: 349877 - DNA, 733 bp, Homo Sapiens
  misc_feature (69)..(127): n is a, c, g, or t
  misc_feature (715)..(715): n is a, c, g, or t
cagttgtctattaaggttgcttccagtagacgagaatgaaaccccgtcggctgctcttggtagctcctnnnnnnnnnnnnnnnnnnnnnnnnnnnnnnnnnnnnnnnnnnnnnnnnnnnnnnnnnnncctctcagctccacccacacctgctgagtcagactctacacttcaaaaagatctctgggccacttgttgcagtcaagtgtgagacccactggaccagactagtgcctcaagaatctcctggagggcttgttgaaacaaagtgctggccccacccccagagtttctgattcagtagatctggggtggggtctgagacgctgcctttcccacaagttcccagttcttagcaaagcagccgctggttcagggacctcatgttgagaacctttgatccagactgcagagggctggctggcaaatcagctgcatgttgggagtcacctgaggaatgttttaaatgctgatgcctgagtttggacctgaggttcaaatgtaagtgatctggaatgtggcctgggatcaggatttttgtaaagcactttgggtgagtccatgtgcagtagattttgagagctgtattctagtggatctgccctgtggctaacccaccagaaggaaccagagcagaacgtgcccttttggaaataactgggaccatgaagagactgtcagtgttacagctcttttagaatttgttaggctgggcgntcatctgacgcctataat

SEQ ID NO: 349878 - DNA, 742 bp, Homo Sapiens
  misc_feature (69)..(69): n is a, c, g, or t
  misc_feature (391)..(533): n is a, c, g, or t
actcccaacctcaggtgatctgcccaccttgggatttgcctcccaaagtgttgggattataggcgtgcngtcacgcccagcctaacaaattctaaaagagctgtaacactgacagtctcttcatggtcccagttatttccaaaagggcacgttctgctctggttccttctggtgggttagcaacagggcagatccactagaatacagctctcaaaatctactgcacatggactcacccaaagtgctttacaaaaatcctgatcccaggccacattccagatcacttacatttgaacctcaggtccaaactcaggcatcagcatttaaaacattcctcaggtgactcccaacatgcagctgatttgccagccagccctctgcagtctggatnnnnnnnnnnnnnnnnnnnnnnnnnnnnnnnnnnnnnnnnnnnnnnnnnnnnnnnnnnnnnnnnnnnnnnnnnnnnnnnnnnnnnnnnnnnnnnnnnnnnnnnnnnnnnnnnnnnnnnnnnnnnnnnnnnnnnnnnnnnnnnnagccctccaggagactctgaggcactagtctggtccagtgggtctcaaacttgactgcaacaaatggcccagagatcttcttgaagtgtagagtctgacctcagcagtgtgggtgggagctgagaagccagccagatcccaggtgggggcgacactgctcatcctcctaccacattttgagtagcaagaagctaccaagagcagcccga

SEQ ID NO: 349879 - DNA, 1364 bp, Homo Sapiens
atggagggtgcccccccggggcttgccagggggtgaatcccccaattcttttctgtggtgaacatccccccaataaaatttcagaacccttgggggttggtgggcaggttagaaacttggacttccttcttgtttcttcttcctgcctccttcttgatgtttatctttcactggctcggagagggctgaggatgtccacctcctcctcattctcgggttaaacttttatggaactgttgcaggtcctccagtttgcggcagaggttgtcagaagaggagaatgatgatgggcactcgggctcgctgtcgatctgggtcagcacgtcctcgatggagtccccgtcattcctcaggctctcagggtccggtggggtgtagccatgacagcggcaccagtgagcgatgtgcttggttttgaggggagtcaggtggtgaaatctcggattcttctccaggatttcttgtaagacttttcgcattgtcattgctctttgccactcagcggctctcctttttccaatgttccagccatagtactgctccacagactttgcagaaaagcagctggcatcttcactttttgcagtgattaatggaatcttctttactactgcagttaggagttgctggatagtttctaaatggtctatcttaatgacatagtttcccagctcagaactttcttctgttttcactgctgtctgaccctcctgagagaggcaactcggtccaggtgtttctggttcagtcttcacttttgcaacagctgctggagcagagctggggacaactggagttggggcagctacaggcagaatggcaggtggcttgctggtagaaaatgactgaaccactttattcacaggcatcaggatcgtctgcacccctccagatgtgtttacgctgagtggtttgagctggctgggaatcgtcaggacggcctgctgcggactggactgactggagtgaatctttaacagtccggatactgtggctttcccacagatggggtttggtgtaagcaccaaggacgtggcgctgaccacggtgggggtggcaaccctgcaagttcccacggtggcctggctcacacacacctgctgctgcccagaagttttcggttacagacctgaccgtagatgaagacacgggagccattccttcagactgttgtgcaggaccgtttgctgagagggccacggcaggggaagtggcagttgtgataacccctcctgctactctcagcattgtggttccaggcttcgagagctgtgaggtggctggcacagtcttcaaggtgctatcggatattttcattagagatgcctgtcctccatgggctgcctgtgtaaacaatgtggttt

SEQ ID NO: 349880 - DNA, 867 bp, Homo Sapiens
  misc_feature (607)..(627): n is a, c, g, or t
aatcactgtagtatttctctctagtcgcagacgtacacaaacctatttatttaggtgaccttgtaataccagtcatttattttcatgaacaaaggaaataatcagaaagcagaaaataggtacaaactcagttacaatgcaatagtattttaatgcacatgcaccagagttataagcaagatgaatttgccttaagtattgcaactgactgaatgtttgtgttctcccaaaattttctatgttgaaattctaaccccctatgtgatgacatgtgatgatattaggaggtggggtctttgggaggagccatgtgaagatgtaatgggattcatgctcttatcaaacagactccagagagttctcttgtcctcttttggccatgtgaggatacaagaagatggcagtctgcaaccaagacggctctcaccagaacccaaccatgctggtaatctgatctcagacttccagctccagagctgtaagaaataaatttctgtcgtttataagccacccagtctatggtactttgttatagcaacctgaaatgaataagacaagtattatcaagagtaactgcacatatttatggaaatcacaacatgatatnnnnnnnnnnnnnnnnnnnnntatcttaaggagacaatttgtaactttttcgcagagagcttagaaataaaaaacaaacatataaaacccagctcttttgtgatttataaagcacaggctgaatagggccatatacaaatatttaaatatttaacatacaagaggataagtttcaaacatttttacaaggtgttatattcaaatacagagcttaatgaattaaactctgtaacacactgatgtctagacatgaaagaaaac

SEQ ID NO: 349881 - DNA, 1594 bp, Homo Sapiens
gctgggtttcccttttgttccccaccttgggcaagcctaaaattcccttttctaataggattttattccacaggataaggaaagggaggtttgttttttgggataaccaaataaggcatttggtgctattaaaacaaaccaaaagggtaataagggttactgtcttttccctcaaaatagaatcctgccctaaagcaacgcaagtagagcatacttctgtgcaaagccagtgatagagaagcagcctttccagagtcactgaggatgaattaaaggcttataaaagaaaacttgaccttaacagagactacatttgatcatggaaataatacatttctccactgatatacaataccatgtaatgcactggaaaagttggaccttggagtaatagcacaatttgtaacattacagatcacctcttcccactctttgttccactctgagactctttccttttcctcgtgtatccagatacactgacatacggatgattttaaaagtgtcacaagccacagtggagccatatacatgcagttcagcctgattttacccttattttcttctaatacagactccattacaattttggaccatctgcagagagtacagatacacaaaaccaaaacaagtatctatgataataaaatcttcagaaacttttcagacgtacctttcatggagccccctccctcccccgagtagaaccctaacagggacctcgtttgttcctgtgagtcctgccaggacttgtttaatgggtgcttggggttttggttttcctccttattcttcctcctcctcctcctcttcatcatcatcttcatcatggcagtgtgtaatttcctggggggccagtgggaagaggttgggaggtttaatctcactaattgaccgtgtcagctggtgccgcttgtagtcagtgtctttgaaatccactgatgtgcggttccgggtggcaagaggagactccatctcattgatatctacgtgtgtgtgctccaccgttgattcatgaggcatcaagacatgggcagccctgaagaggtagcgtgaaagggtaatacagcaggttgatgaaagatgctgcatagaggtcagcataacgcatcacttgactggcaaaaagggtctgccgggagccactgcgaaacaggcttcccatcatcccatagcacatgtccatgtcatgagttactttcttaatacgtctctggatggaactgatgtctggacgctcattgctactgctgtcaagatgcttgtagagttcagccaagaaaatatccaagctctgaagttcttcgaaaagtgaactcttgtcagtccagacatgtagctcctgtgcgagttcaggaatcaccaaaaaagttcgccacccttgccgtttctttgattttaaaatgtccccaaaaatgtgatctccaatatacaaaatgtcttttcccttggctcccaacaggtcacagatcgtatcagaagaacctcctgagtagacgataccatgctgtaggggccctgtgtaggtaccaattttcagcttgccagttttagtatccacctgacgcagaacgcgctaatggtacgagctcag

SEQ ID NO: 349882 - DNA, 2302 bp, Homo Sapiens
  misc_feature (2288)..(2288): n is a, c, g, or t
tcggtgtagcagacatttaattcttatttgccaactcctgagctaggacctgggaacacaaagttaaataggacacgattctagtcctctaggcaccaacggtcttggaaaggaagggcgttaacatctgccacctacttccaggtgccaagcactgttatcaacattattccactttattccctggtgattatgaaaggcaggtattgatattcacacttaacagacgaggaaacagcctcagggagataagcttacttgacccagtctctctcctagtccatatcagaaccaagattcaaacaggttttgtttagaaaatctaggatttttcagccataccaaaataaagtagcctcagggaatcaaaacattcacgaaagaaggtgacttctgaactgagtcttgcaagaattctggaaattaacctggcagttgtatcaggggtggtaaggggacggaacagcttgagcaagagtgagagttccttggggtttggggagggaggaggaaaaatgattttttacttaagaacaaatagcaaggaaggtttgtgagctatgattgggggctggaggggaaagcctgaattctatccagtaatccttgaagggttttcatccaagtggcctgatgggatttgcattttactctggaagatgacttggggattggcaggaagtaaggacactttttttcaagagaatatagccctaaactaaggtagtagcagtggggatataagtggataagttctagatatacttgggaaatataattggaaggacttgtggactgataaagatatatttaagatgtgcagtcagtaggacttgttgattgaggacttgttgattgaaggtggggtgaaaagatgacacaggtttctggcttggttggaaaaagcatagcatcatttaccaagaagaaacgagatggaattgtttggggttgggaaggtggacgatgaaatgttgagtatcacgcatcttacatttgaggtatcaatcattattggatagaaagtcttatttagtgagatggtaatggttgtagatgtcagtgatttgttccaggggacaatgagtaaactgagaagagcaaaaatctacaaatggagcaatgaaggtcagcattccatgaagaagcagaaattgatgagagaggaagacaagagtagtcagagaagttaagacctggaagctaagtaaggagagggagtgggcaactatgatggaaaggccataaagcaaagattgagaagtatgcactggaggccattgtttctggatgtcagggtaggaaagagtaaacggtgacagtagaggtctccttgcagtgaattggggaatgaatatcaagtgaaatagtgcacagagtctgtatacaaccctttggaaaagcctgattgaaaagagaaagatgagatgcggagggagaggcattcaaaaaatgctagttacagcatcttattgaggaatctaaggcaggagtagggagacctgagtatgatggagcatggtagggttgggagtcaagtcaagctcacagcatttcagggttagggagataagctgtctgcagcagtcaatagttgagggttcagcagggcttccaacagggcagaataagggactgaactgccagcttcagggcaggggacaagccatctctcctgataggaaagggtcaggggttgagtagagtcttcagcaaagctgggaagttgggtgttccccagcctgttacaggatcccagccaggaccagagcagaaaccctggccctctacctcttcatccagacaggactcatggcagccacgggttacatcaaagagtcctgccccatgctgctggtagagccttgggttgagaaagccaagaggggggcggccactaaggatcctgtgctcattgatcaaggataggatccccccaaacactggagtagaggccgaggttccggacacccatggaatgggcactctgttgctgaccacccagtagccatcagaaagtgcagccacatctgggtaggcacggccactggcattgaagtaactggatggtggcaggtgggggctagagctcaggaacttcgttacagcttcctcctggtatgaaggccgtgggaacacattgctgaagccaccaccactgatatagtcaacaatttcatttgtgatgaggaaaggttcctggaaggatgtgcctcccactgtggtgacatccaaagaattccggacttgtatcgtgattgtggtttcaacacgtaatgctgagtagngggttcttttattc

SEQ ID NO: 349883 - DNA, 1111 bp, Homo Sapiens
  misc_feature (510)..(622): n is a, c, g, or t
atttccagaattcttgcaagactcagttcagaagtcaccttctttcgtgaatgttttgattccctgaggctactttattttggtatggctgaaaaatcctagattttctaaacaaaacctgtttgaatcttggttctgatatggactaggagagagactgggtcaagtaagcttatctccctgaggctgtttcctcgtctgttaagtgtgaatatcaatacctgcctttcataatcaccagggaataaagtggaataatgttgataacagtgcttggcacctggaagtaggtggcagatgttaacgcccttcctcccttgcattgcgccccctgtgcctacctctagcattgtaacgaccacatagtattgaaatggccagtttacttgtctgccttcctttccaagaccgttggtgcctagaggactagaatcgtgtcctatttaactttgtgttcccaggtcctagctcaggagttggcaaataagaattaaatgtctgctacaccgnnnnnnnnnnnnnnnnnnnnnnnnnnnnnnnnnnnnnnnnnnnnnnnnnnnnnnnnnnnnnnnnnnnnnnnnnnnnnnnnnnnnnnnnnnnnnnnnnnnnnnnnnnnnnnnnngaggaggacgcaataagaaggggagggcgcggagtcttataaagaacattggcacttagacagagccggattataccacacggctccgcagacgtgcggaagaaacgagcaagccgtcgggcactcttgtagcggaagagacaccatatactccggcgggcgtgctgcccccatataatttgaggaaaccaacaactcatcccccctaaacgagagagcaattttgcacaaagccctcccttaagggggttacacattatgtgacaaagaattgctagccaacaatgcctgtctgtcttaagcgtgggtgtgtcaccaacacctaaagtgcccgggagcgaataacggccaccttgacccgcggacccttggaaaaagagcttctgggcgctacagcgaggagcatactatggcaattactgtggaagacacattattctagaccccagcgaggggagcccaccgccgcaaacaacctgcgccaggcgt

SEQ ID NO: 349884 - DNA, 433 bp, Homo Sapiens
acactggcagagacgtaacaggatggtggcaggtgggggctagagctcaggaacttcgttacagcttcctcctggtatgaaggccgtgggaacacattgctgaagccaccaccactgatatagtcaacaatttcatttgtgatgaggaaaggttcctggcaaggatgtgcctcccactgtggtgacataggggctggaggcagggaaggtagggcggaactggtgtcttccagagacagaccaacacccggccccactgtcacctgaggcgaagagcagggtgagaccccgagcggcagccttcatgagctcagtgttgacccgctggatgtaggcgctgctgagggagtcctcatcatctccatagctcacagtatgcacatgtggcagggctgactcattactgagcagcatgagccactgcaggaagggc

SEQ ID NO: 349885 - DNA, 1591 bp, Homo Sapiens
tcccgggatctgcagcaccagccgtctgcagctccggccgccacttgcgcctctccagcctccgcagcccaaccgccgccagcaccatggccagcaccatttccgcctacaaggagaagatgaaggagctgtcggtgctgtcgctcatctgctcctgcttctacacacagccgcaccccaataccgtctaccagtacggggacatggaggtgaagcagctggacaagcgggcctcaggccagagcttcgaggtcatcctcaagtccccttctgacctgtccccagagagccctatgctctcctccccacccaagaagaaggacacctccctggaggagctgcaaaagcggctggaggcagccgaggagcggaggaagacgcaggaggcgcaggtgctgaagcagctggcggacggcgcgagcacgagcgcgaggtgctgcacaaggcgctggaggagaataacaacttcagccgccaggggaggagaagctcaactacaagatggagctcagcaaggagatccgcgaggcacacctggccgcactgcgcgagcggctgcgcgagaaggagctgcacgcggccgaggtgcgcaggaacaaggagcagcgagaagagatgtcgggctaagggcccgggacggcgggcgcccatcctgcgacggaacacgttcgggttttggttttgtttcgttcacctctgtctagatgcaacttttgttcctcctttccccccaccccggcccccagcttcatgcttctcttccgcactcagccgccctgccctgtcctcgtggtgagtcgctgaccacggcttcccctgcaggagccgccgggcgtgagacgcggtccctcggtgcagacaccaggccgggcgcggctgggtcccccgggggccctgtgagagaggtggtggtgaccgtggtaaacccagggcggtggcgtgggatcacgggtccttacgctgggctgtctggtcagcacgtgcaggtcagggcaggtcctctgagccggcgcccctggccagcaggcgaggctacagtacctgctgtctttccagggggaaggggctccccatgagggaggggcgacgggggaggggggtgatggtgcctgggagcctgcgtgtgcagccggtgcttgttgaactggcaggcgggtgggtgggggctgcagctttccttaatgtggttgcacaggggtcctctgagaccacctggcgtgaggtggacaccctgggccttcctggaagcctgcagttgggggcctgccctgagtctgctggggagtgggcattctctgccagggacccatgagcaggctgcatggtctagaggttgtgggcagcatggacagtcccccactcagaagtgcaagagttccaaagagcctctggcccaggcccctccgtgggacagccccgccgcccctccccaccagggctttgcagatgtccttgaaagacccaccctagaagccctttggagtgctgggccccttctggtgcccctctgcccctggtgggaagcgggcagccacaaattccttcctcaggggaggcccccaaggggggaattttttgtgggaaccgccta

SEQ ID NO: 349886 - DNA, 1450 bp, Homo Sapiens
tgccctgtcctcgtggtgagtcgctgaccacggcttcccctgcaggagcgcccgggcgtgagacgcggtccctcggtgcagacaccaggccgggcgcggctgggtcccccgggggccctgtgagagaggtggtggtgaccgtggtaaacccagggcggtggcgtgggatcacgggtccttacgctgggctgtctggtcagcacgtgcaggtcagggcaggtcctctgagccggcgcccctggccagcaggcgaggctacagtacctgctgtctttccaggggaaaggggctccccataagggaggggcgacgggggaggggggtgatggtgcctgggagcctgcgtgtgcagccggtgcttgttgaactggcaggcgggtgggtgggggctgcagctttccttaatgtggttgcacaggggtcctctgagaccacctggcgtgaggtggacaccctgggccttcctggaagcctgcagttgggggcctgccctgagtctgctggggagtgggcattctctgccagggacccatgagcaggctgcatggtctagaggttgtgggcagcatggacagtcccccactcagaagtgcaagagttccaaagagcctctggcccaggcccctccccaccagggctttgcagatgtccttgaaagacccaccctagagccctttggagtgctggcccctcctgtgccctctgccctggtggaagcggcagccacaagtcctcctcagggagccccaagggggattttgtgggaccgctgcccacagatccaggtgttggaagggcagcgggtaaggttcccaagccagccccaacacccttcccacttggcacccagagggggctgtgggtggaggcctgactccaggcctctcctgcccacaccctctgggctgagttccttctttcccttggacgcccagtgctggccttggaggacggtcagctggaggatggcggtgggggaggctgtctttgtaccactgcagcatcccccacttctccacggaagccccatcccaaagctgctgcctggccccttgctgtaaagtgtgaagggggcggctgagttctcttaggacccagagccagggccctcaacttccatcctgcgggaggccttggccgggcactgccagtgtcttccagagccacacccagggaccacgggaggatcctgacccctgcagggctcaggggtcagcagggacccactgccccatctccctctccccaccaagacagccccagaaggagcagccagctgggatgggaacccaaggctgtccacatctggcttttgtgggactcagaaagggaagcagaactgagggctgggatattcctcatggtggcagcgctcatagcgaaagcctactgtaatatgcacccatctcatccacgtagtaaagtgaacttaaaaattcaatcaaatgaa

SEQ ID NO: 349887 - DNA, 1000 bp, Homo Sapiens
  misc_feature (15)..(15): n is a, c, g, or t
  misc_feature (31)..(31): n is a, c, g, or t
cgctgttgccagggngcggctcagagacctncctgacctgcacgtgtgaccagacagcccagcgtaagacccgtatcccacgccaccgccctggtttaccacggtcaccaccacctctctcacagggcccccggggacccagccgcgcccggcctggtgtctgcaccgagggaccgcgtctcacgcccggcggctcctgcaggggaagccgtggtcagcgactcaccacgaggacagggcagggcggctgagtgcggaagagaagcatgaagctgggggcgggggtgggggaggaggaacaaaagttgcatctagacagaggtgaacgaaacaaaaccaaaacccgaacgtgttccgtcgcaggatgggcgcccgccgtcccgggcccttagcccgacatctcttctcgctgctccttgttcctgcgcacctcggccgcgtgcagctccttctcgcgcagccgctcgcgcagtgcggccaggtgtgcctcgcggatctccttgctgagctccatcttgtagttgagcttctccttccgcctggcggctgaagttgttattctcctccagcgccttgtgcagcacctcgcgctcgtgctcgcgccgctccgccagctgcttcagcacctgcgcctcctgcgtcttcctccgctcctcggctgcctccagccgcttttgcagctcctccagggaggtgtccttcttcttgggtggggaggagagcatagggctctctggggacaggtcagaaggggacttgaggatgacctcgaagctctggcctgaggcccgcttgtccagctgcttcacctccatgtccccgtactggtagacggtattggggtgcggctgtgtgtagaagcaggagcagatgagcgacagcaccgacagctccttcatcttctccttgtaggcggaaatggtgctggccatggtgctggcggcggttgggctgcggaggctggagaggcgcaagtggcggccggagctgcagacggctg

SEQ ID NO: 349888 - DNA, 1677 bp, Homo Sapiens
  misc_feature (1205)..(1205): n is a, c, g, or t
gggaaagggtgggcggttggacactacctctgccttccacactggattggccacggttcctcaaacctcctggggccctaaggggatctgggttacgctcccccaggcaaagggcacggacgggccagccctcaaaggctctaggggggtcttccaagtactctgccaagacctggtggggagggccctgggccacaggctctttgaacttatgcacttctagtgggggactgtccatgctgcccccaacctctagaccaagcagcctgctcatgggtcctgccaagagaatgcccactccccagcagactcagggcaggccccaaactgcaggcttccagaaaggcccagggtgtccacctcacgccaggtggtctcagaggaccccggtgcaaccacataaaggaaagctgcagcccccacccacccgcctgccagttcaacaagcaccggctgcacacgcaggctcccaggcaccatcacccccctcccccgtcgcccctccctcatggggagccccttccccctggaaagacagcaggtactgtagcctcgcctgctggccaggggcgccggctcagaggacctgccctgacctgcacgtgctgaccagacagcccagcgtaaggacccgtgatcccacgccaccgccctgggtttaccacggtcaccaccacctctctcacagggcccccgggggacccagccgcgcccggcctggtgtctgcaccgagggaccgcgtctcacgcccggcggctcctgcaggggaagccgtggtcagcgactcaccacgaggacagggcagggcggctgagtgcggaagagaagcatgaagctgggggcgggggtgggggaggaggaacaaaagttgcatctagacagaggtgaacgaaacaaaaccaaaacccgaacgtgttccgtcgcaggatgggcgccgcccgtcccgggcccttagcccgacatctcttctcgctgctccttgttcctgcgcacctcggccgcgtgcagctccttctcgcgcagccgctcgcgcagtgcggccaggtgtgcctcgcggatctccttgctgagctccatcttgtagttgagcttctctctcgcgctggcggctgaagttgttattctcctccagcgccttgtgcagcacctcgcgctcgtgctcgcgccctccgccagctgcttcagcacctgcgcctcctgcgtnaagcctgtccgggagcaccctgcttcttgcaggccctgtccccgtgggccgccaccgttgaaactcctggggggtggggaatggaggactccttgccttcctccgctcctcggctgcctccagccgcttttgcagctcctccagggaggtgtccttcttcttgggtggggaggagagcatagggctctctggggacaggtcagaaggggacttgaggatgacctcgaagctctggcctgaggcccgcttgtccagctgcttcacctccatgtccccgtactggtagacggtattggggtgcggctgtgtgtagaagcaggagcagatgagcgacagcaccgacagctccttcatcttctccttgtaggcggaaatggtgctggccatggtgctggcggcggttgggcctgcggaggctggagaggcgcaagtggcggccggagctgcagacggctggtgctgcaatcccggg

SEQ ID NO: 349889 - DNA, 1290 bp, Homo Sapiens
  misc_feature (1010)..(1010): n is a, c, g, or t
acgtgtaccggcccggaagtttgggatatcgtcgacccacgcgctcgctcgctccctccactcctctcccctcccctccccggcactgcagcaccagccgtctgcagctccggccgccacttgcgcctctccagcctccgcaggcccaaccgccgccagcaccatggccagcaccatttccgcctacaaggagaagatgaaggagctgtcggtgctgtcgctcatctgctcctgcttctacacacagccgcaccccaataccgtctaccagtacggggacatggaggtgaagcagctggacaagcgggcctcaggccagagcttcgaggtcatcctcaagtccccttctgacctgtccccagagagccctatgctctcctccccacccaagaagaaggacacctccctggaggagctgcaaaagcggctggaggcagccgaggagcggaggaagacgcaggaggcgcaggtgctgaagcagctggcggagcggcgcgagcacgagcgcgaggtgctgcacaaggcgctggaggagaataacaacttcagccgccaggcggaggagaagctcaactacaagatggagctcagcaaggagatccgcgaggcacacctggccgcactgcgcgagcggctgcgcgagaaggagctgcacgcggccgaggtgcgcaggaacaaggagcagcgagaagagatgtcgggctaagggcccgggacgggcggcgcccatcctgcgacggaacacgttcgggttttggttttgtttcgttcacctctgtctagatgcaacttttgttcctcctcccccaccccagcccccagcttcatgcttctcttccgcactcagccgccctgccctgtcctcgtggtgagtcgctgaccacggcttcccctgcaggagccgccgggcgtgagacccggtccctcggtgcagacaccaggccgggcgcggctgggtcccccggggggccctgtggaaagaggtgggtggtgaccgtggttaaacccanggccggtgggcttggggatcccggggtcctttaccctggggctggtctgggtacccccgggcaggttaagggagggcttttcttgaacccgcggccccttggcccaaagggtggggtcttaggtacttgggggttttttttcaggggggaggggcggcctctcttggacggggggccgttgcccgcgaacacgcggagttagtcccgcaccactccatactctggctccataaattccgcttcctccagcctcgcctaggcccggcaagccccgcaccct

SEQ ID NO: 349890 - DNA, 2652 bp, Homo Sapiens
  misc_feature (401)..(402): n is a, c, g, or t
  misc_feature (427)..(427): n is a, c, g, or t
  misc_feature (2160)..(2254): n is a, c, g, or t
ggctagggcggactcggaggggcgcagagcggggccggggactccgaggcgctgagctggtggtgggggtcgggggctcctcccgtgtttactgggcgtccccagcagcgcacgaggcaggtccagagtctggtcctggcgggacagtaactagccgcagtaatagatggctaaattcattatattgaaagtgccctgaaggaagctcggctccggtacgagctagaagcggggcccagccagctcccaggaaacccgtccttggtccctggccttgctctgcgcctccccggtgctcccgccccctcaactcagtcagggtcctgcctgaaggccagcccggatgaggccgggcgggtgccagggcgccacggcctgcgcgcctgggggttcccggagtnnccccaagccacccccgccctcaggncctcccgccccctgtcctgcaggagctgcacgcggccgaggtgcgcaggaacaaggagcagcgagaagagatgtcgggctaagggcccgggacgggcggcgccatcctgcgacagaacacgttcgggttttggttttgtttcgttcacctctgtctagatgcaacttttgttcctcctcccccaccccagcccccagcttcatgcttctcttccgcactcagccgccctgccctgtcctcgtggtgagtcgctgaccacggcttcccctgcaggagccgccgggcgtgagacgcggtccctcggtgcagacaccaggccgggcgcggctggggtcccccgggggccctgtgagagaggtggcggtgaccgtggtaaacccagggcggtggcgtgggatcacgggtccttacgctgggctgtctggtcagcacgtgcaggtcagggcaggtcctctgagccggcgcccctggccagcaggcgaggctacagtacctgctgtctttccagggggaaggggctccccatgagggaggggcgacgggggaggggggtgatggtgcctgggagcctgcgtgtgcagccggtgcttgttgaactggcaggcgggtgggtgggggctgcagctttccttaatgtggttgcacaggggtcctctgagaccacctggcgtgaggtggacaccctgggccttcctggaagcctgcagttgggggcctgccctgagtctgctggggagtgggcattctctgccagggacccatgagcaggctgcatggtctagaggttgtgggcagcatggacagtcccccactcagaagtgcaagagttccaaagagcctctggcccaggcccctccgtgggacagccccgccgcccctccccaccagggctttgcagatgtccttgaaagacccaccctagagccctttggagtgctggcccctcctgtgccctctgccctggtggaagcggcagccacaagtcctcctcagggagccccaagggggattttgtgggaccgctgcccacagatccaggtgttggaagggcagcgggtaaggttcccaagccagccccaacacccttcccacttggcacccagagggggctgtgggtggaggcctgactccaggcctctcctgcccacaccctctgggctgagttccttctttcccttggacgcccagtgctggccttggaggacggtcagctggaggatggcggtgggggaggctgtctttgtaccactgcagcatcccccacttctccacggaagccccatcccaaagctgctgcctggccccttgctgtaaagtgtgaagggggcggctgagttctcttaggacccagagccagggccctcaacttccatcctgcgggaggccttggccgggcactgccagtgtcttccagagccacacccagggaccacgggaggatcctgacccctgcagggctcaggggtcagcagggacccactgccccatctccctctccccaccaagacagccccagaaggagcagccagctgggatgggaacccaaggctgtccacatctggcttttgtgggactcagaaagggaagcagaactgagggctgggatattcctcatggtggcagcgctcatagcgaaagcctactgtaatatgcacccatctcatccacgtagtaaagtgaacttaaaaattcaatcaaatgaacaattaaataaacacctgtgtgtttaaggnnnnnnnnnnnnnnnnnnnnnnnnnnnnnnnnnnnnnnnnnnnnnnnnnnnnnnnnnnnnnnnnnnnnnnnnnnnnnnnnnnnnnnnnnnnnnnngagaagaggagggcggcgcggcgcggcctcttatatgttccccccgcgcgcggcgggccacaccaatcagcgcgcgagagcgcgccccgcgcgctagtctgcgctaacaaaagagagggggccgcccatacagagggcggcggcgcgactctataatagaacaagacgagcacaggggtggtggggctgatcttagaaaaagaaaaacttgaggtgggggagaaacaccggcggcacgccctggcggcccctgctgggaggcgggcgccaacccccacccgccggggacggcgaggcgccccacgagggggggacagccaccaccccacaagacagaggaaaacgcgatgcgacggggggggcgacacaaaaaacaaacaagcagcgcgggagtcagc

SEQ ID NO: 349891 - DNA, 1031 bp, Homo Sapiens
  misc_feature (14)..(14): n is a, c, g, or t
  misc_feature (66)..(66): n is a, c, g, or t
  misc_feature (101)..(101): n is a, c, g, or t
  misc_feature (108)..(108): n is a, c, g, or t
  misc_feature (117)..(117): n is a, c, g, or t
  misc_feature (121)..(121): n is a, c, g, or t
  misc_feature (127)..(127): n is a, c, g, or t
  misc_feature (136)..(136): n is a, c, g, or t
  misc_feature (145)..(145): n is a, c, g, or t
  misc_feature (206)..(206): n is a, c, g, or t
  misc_feature (214)..(215): n is a, c, g, or t
  misc_feature (218)..(220): n is a, c, g, or t
  misc_feature (222)..(224): n is a, c, g, or t
  misc_feature (231)..(231): n is a, c, g, or t
  misc_feature (241)..(241): n is a, c, g, or t
  misc_feature (307)..(307): n is a, c, g, or t
  misc_feature (591)..(591): n is a, c, g, or t
  misc_feature (812)..(812): n is a, c, g, or t
  misc_feature (889)..(889): n is a, c, g, or t
  misc_feature (921)..(922): n is a, c, g, or t
  misc_feature (928)..(928): n is a, c, g, or t
  misc_feature (942)..(942): n is a, c, g, or t
  misc_feature (946)..(946): n is a, c, g, or t
  misc_feature (962)..(962): n is a, c, g, or t
  misc_feature (972)..(972): n is a, c, g, or t
  misc_feature (982)..(982): n is a, c, g, or t
  misc_feature (992)..(992): n is a, c, g, or t
  misc_feature (1003)..(1004): n is a, c, g, or t
  misc_feature (1010)..(1010): n is a, c, g, or t
  misc_feature (1020)..(1020): n is a, c, g, or t
atttgattgaattntaaatcactttactacgtggatgaaatgggtgcatattacagtaggctttcnctatgagcgcggccaccatgagggatatcccagcnctcagtnctgcttccntttntgagtnccacaaaanccagatgtngacagccttgggttcccatcccagctggctgctccttctggggctgtcttggtggggaganggagacgnngcnnncnnnccctgcngacccctganccctgcaggggtcaggatcctcccgtggtccctgggtgtggctctggaaagacactggcaatgccnccgccaaggcctcccgcaaggatggaagttgagggccctggctctgggtcctaagagaactcagccgcccccttaacactttacagcaaggggcccaggcagcagctttgggatggggcttccgtggagaagtgggggatgctgcagtggtacaaagacagcctcccccaccgccatcctccagctgaccgtcctccaaggccagcactgggcgtccaagggaaagaaggaactcagcccagagggtgtgggcaggagaggcctggagtcaggcctccacccancagcccctctgggtgccaagtgggaagggtgttggggctggcttgggaaccttacccgctgcccttccaacacctggatctgtgggcagcggtcccacaaaatcccccttggggctccctgaggaggacttgtggctgccgcttccaccagggcagagggcacaggaggggccagcactccaaagggctctagggtgggtctttcaaggacatctgcaaancctggtggggaggggcctgggccagaagctctttggaactcttgcacttctgagtgggggactgtcatgctgcccanaactctagaccatgcagctgctcatgggtccnngcaganatgccactccccanagantcagggcagcccccantgcaggttcnaggaaggccnaggggtcacncacgcaggtgnntaaagnccctgtgcanaaaataaggaa

SEQ ID NO: 349892 - DNA, 1066 bp, Homo Sapiens
  misc_feature (415)..(415): n is a, c, g, or t
  misc_feature (433)..(433): n is a, c, g, or t
  misc_feature (792)..(800): n is a, c, g, or t
gggtccggaattcccgggatcagccgtctgcagctccggccgccacttgcgcctctccagcctccgcaggcccaaccgccgccagcaccatggccagcaccatttccgcctacaaggagaagatgaaggagctgtcggtgctgtcgctcatctgctcctgcttctacacacagccgcaccccaataccgtctaccagtacggggacatggaggtgaagcagctggacaagcgggcctcaggccagagcttcgaggtcatcctcaagtccccttctgacctgtccccagagagccctatgctctcctccccacccaagaagaaggacacctccctggaggagctgcaaaagcggctggaggcagccgaggagcggaggaagacgcaggaggcgcaggtgctgaagcagctggcggnagcggcgcgagcacaagncgcgaggtgctgcacaaggcgctggaggagaaaaacaacttcagccgccaggcggaggagaagctcaactacaagatggagctcagcaaggagatccgcgaggcacacctggccgcactgcgcgagcggctgcgcgagaaggccctcccgccccctgtcctgcaggagctgcacgcggccgaggtgcgcaggaacaaggagcagcgagaaaagatgtcgggctaacggcccgggacggagcgcccccatcctgccaaggcacccttagggctacgaaacgttataaccaaagctcgctgaatccaaaatctatcaaggggagccaacgatgaccccaaccaactagtatcaccaactgnnnnnnnnntccgaccctttcctactcaagaaccccctgaaacccatacttatccatgcctccacttttgtatatcgcacccttcagtccctctcctaaagcacccccctacctctcagtgccacatcctccttaaggccaacttaccaaagaaaacgtctcatatctcatgctacatacgccaccgaaataccaacatgcccacctacggcatccacaacgtcgactacacacccacccgaacaacacacaagatgtgcaccacacagaaccac

SEQ ID NO: 349893 - DNA, 711 bp, Homo Sapiens
aacttcggctaggtgcgaggcctggtggttgaattcggcacgaggcctgcgtgtgcagccggtgcttgttgaactggcaggcgggtgggtgggggctgcagctttccttaatgtggttgcacaggggtcctctgagaccacctggcgtgaggtggacaccctgggccttcctggaagcctgcagttgggggcctgccctgagtctgctggggagtgggcattctctgccagggacccatgagcaggctgcatggtctagaggttgtgggcagcatggacagtcccccactcagaagtgcaagagttccaaagagcctctggcccaggcccctccgtgggacagccccgccgaccctccccaccagggctttgcagatgtccttgaaagacccaccctagagccctttggagtgctggcccctcctgtgccctctgcccacagatccaggtgttggaagggcagcgggtaaggttcccaagccagccccaacacccttcccacttggcacccagagggggctgtgggtggaggcctgactccaggcctctcctgcccacaccctctgggctgagttccttctttcccttggacgcccagtgctggccttggaggacggtcagctggaggatggcggtgggggacggctgtctttgtaccactgcagatcccccacttctccagggagccccatccaaagctgtgctggccct

SEQ ID NO: 349894 - DNA, 823 bp, Homo Sapiens
acagtacatttagaaacattgcattctgaaaaagtctcctggggtttatgtgggagtgttacaatttccagaatgactggtctagataatcaacatgtgtgtccggattttaactttaagaagttagatgggaagataaagccaatatatgaagcaatccgggaataagttacataataacctgcacataacaggtagtaagttcaaccataactttataaaaatgttgtatggaaatataatctcaaattctaggagttaaatgatctccaataaaatattcatgtccataaatatgaaaaaaggaaaagctccattgaaatatttttccattttaaatgactttcagtaggcacttacaaagactagaaatttcagtgtaacagctacagcctaccaattccacttggctgtagaagtcaaatttgaaaataatttaaataaaaatacttgccaatgttttgtgataattcccactgaagcccacacttacttgagtgttcctttctctctttaaatattttcacattcagaaccaatgcacattttctggaacaagtggatacatgtaaagaagctatactaaacttttataaaaaggacattatatccttgtatccttcctatatcctactcaattagttctatagattagtaaattttctaaagttattaaaagcagaagttttgaagatggattcaaaggattgatgagactgaaattctttgttaattcccccaaatctgctatggaatcaatttagggaaaggtctctgttcccaaagctatcttaactttttccgtaaaatttactttaccacc

SEQ ID NO: 349895 - DNA, 1810 bp, Homo Sapiens
gacagaaaaagtgtggctggaagtggagcccgtgggaatgctgaaggaaggggaccgcgtggaaatcaggtgtttggctgatggcaaccctccaccacacttcagcatcagcaagcagaaccccagcaccagggaggcagaggaagagacaaccaacgacaacggggtcctggtgctggagcctgcccggaaggaacacagtgggcgctatgaatgtcagggcctggacttggacaccatgatatcgctgctgagtgaaccacaggaactactggtgaactatgtgtctgacgtccgagtgagtcccgcagcccctgagagacaggaaggcagcagcctcaccctgacctgtgaggcagagagtagccaggacctcgagttccagtggctgagagaagagacaggccaggtgctggaaagggggcctgtgcttcagttgcatgacctgaaacgggaggcaggaggcggctatcgctgcgtggcgtctgtgcccagcatacccggcctgaaccgcacacagctggtcaacgtggccatttttggccccccttggatggcattcaaggagaggaaggtgtgggtgaaagagaatatggtgttgaatctgtcttgtgaagcgtcagggcacccccggcccaccatctcctggaacgtcaacggcacggcaagtgaacaagaccaagatccacagcgagtcctgagcaccctgaatgtcctcgtgaccccggagctgttggagacaggtgttgaatgcacggcctccaacgacctgggcaaaaacaccagcatcctcttcctggagctggtcaatttaaccaccctcacaccagactccaacacaaccactggcctcagcacttccactgccagtcctcataccagagccaacagcacctccacagagagaaagctgccggagccggagagccggggcgtggtcatcgtggctgtgattgtgtgcatcctggtcctggcggtgctgggcgctgtcctctatttcctctataagaagggcaagctgccgtgcaggcgctcagggaagcaggagatcacgctacccccgtctcgtaagagcgaacttgtagttgaagttaagtcagataagctcccagaagagatgggcctcctgcagggcagcagcggtgacaagagggctccgggagaccagggagagaaatacatcgatctgaggcattagccccgaatcacttcagctcccttccctgcctggaccattcccagctccctgctcactcttctctcagccaaagcctccaaagggactagagagaagcctcctgctcccctcgcctgcacaccccctttcagagggccactgggttaggacctgaggacctcacttggccctgcaaggcccgcttttcagggaccagtccaccaccatctccacgttgagtgaagctcatcccaagcaaggagccccagtctcccgagcgggtaggagagtttcttgcagaacgtgttttttctttacacacattatggctgtaaatacctggctcctgccagcagctgagctgggtagcctctctgagctggtttcctgccccaaaggctggcttccaccatccaggtgcaccactgaagtgaggacacaccggagccaggcgcctgctcatgttgaagtgcgctgttcacacccgctccggagagcaccccagcagcatccagaagcagctgcagtgttgctgccaccaccctcctgtctgcctcttcaaagtctcctgtgacattttttctttggtcagaagccaggaactggtgtcattccttaaaagatacgtgccgg

SEQ ID NO: 349896 - DNA, 580 bp, Homo Sapiens
acggatcacgatgtcgtgctttccttactcaagagtccctgcaactggagaatttttcaagtgccaagagagccaaaatccttaacaagtacggagatatgaggagacagattggctttgaaatcagagacatgtggtacaaccttggtcaacacaagataaagttcattccagaaatggtgggcccaatattagaaatgacattaattcccgagacggagctgcgcaaagccaccatccccatcttctttgatatgatgcagtgtgaattccattcaacccgaagcttccaaatgtttgaaaatgagatcatcaccaagctggatcatgaagtcgaaggaggcagaggagacgaacagtacaaagtgttatttgataaaatccttctggaacactgcaggaagcacaaatacctcgccaaaacaggagaaacttttgtaaaactcgttgtgcgcttaatggaaaggcttttggattatagaaccatcatgcacgacgagaacaaaggaaaccgcatgagctgcaccgtcaatgtgctgaatttctacaaagaaattgaaagaggagaaatgtatataag

SEQ ID NO: 349897 - DNA, 379 bp, Homo Sapiens
gtgacccccaattgtcccacttgtctcccagcaagatcgaacccatgtaagtgccatttctgacaagttgggtgaacgttggtttcaaatcatcagctctgcattcaagtgccctgctacaattctggctcactctgtgggaataactgcctgcctgggcacgttgctgttgctgcctcccaaacggcagtttctggggtcccaggtcatccaggctggatgtggcttgggagagacctgtggcaccaggttggagggaggtctcacctctcctttctgagctgtggactgcagcttcaggaccctatggatgaggccgaatgtcatgaagataatggaatttggagtctcaacaaagccaagccacatgccagagatt

SEQ ID NO: 349898 - DNA, 570 bp, Homo Sapiens
  misc_feature (65)..(65): n is a, c, g, or t
  misc_feature (484)..(484): n is a, c, g, or t
  misc_feature (515)..(515): n is a, c, g, or t
  misc_feature (560)..(560): n is a, c, g, or t
agaattacacctctctcatgccgaagaccgtggtgttccccctaatgacataaacgcagcctttnttgctgtctgagaccaaatgtctagttggtagacaggtggatgtttggcctcctaagggcacacttctgatcctgggccccaggtggtgaatctctggcatgtggcttggctttgttgagactccaaattccattatcttcatgacattcggcctcatccatagggtcctgaagctgcagtccacagctcagaaaggagaggtgagacctccctccaacctggtgccacaggtctctcccaagccacatccagcctggatgacctgggaccccagaaactgccgtttgggaggcagcaacagcaacgtgcccaggcaggcagttatttcccacagagttgaggccagaatttttaagcagggcattttgaatgcagagttgattgattttgaaaccaactttcacccaatttgttcagnaattggcatttacatggtttcgattttgctnggagacaatgggacatttgggggtcattgggcagagacggttttncccaaatttt

SEQ ID NO: 349899 - DNA, 791 bp, Homo Sapiens
gggtaggaaggtgggacgttggaggggtggccgcatggagtgagtactgtctctggccaccgagcagagccagtgacagcagcgtcctggtaggcaggcaggcgtatcaggtttcagaggatgcggctgggaacgggagtagaggtgaggggtcgttgcatctgtcgcggtgtgtatcttttgggggttcagcgccaccagcgacttgggcctcattcatcgcgcttacatttctccacctcatttgaagaacgagcttcgtagcccacggagctgaggtatatgagctccctgaagcacaaagcagttatttccatcttcagatcattcagagattatgaaggcacaaaccctgccttcaatttgcttatagtcaagtggagcagacacaagtcaatgattgcagtatagccactgaagtaatctaaaagaggtggggaggccacagcttatgtgaatgactttctcaggagttataaagtgatacagacttatcagcaggttgcaggtgaacatggccttgaggtaaatctgtcccttgctgaatacagtttcagtagattgtttatagtagtttcaggaattgagattttttacaaaaatacaaaagttttgcttgggttctgtcatagatgttttcttctaaataaatgagaaagatgtttcaacaaaggctctttatgctgaataattgtgatgcttgaagttgctaatctgctttaagtggattttaaatgtcaggcaattctagacagttttttaaaggtcacctaaaaatttaattaaaactt

SEQ ID NO: 349900 - DNA, 1008 bp, Homo Sapiens
ggggcctggcggccgttgaaaaatggcgactgtggcagagttgaaggctgttttaaaggacaccttggaaaaaaagggggtattagggcatttaaaagcaaggatccgagctgaagttttcaatgccctagatgatgaccgtgaaccccgaccatcattgtctcatgaaaaccttctaattaatgaattaattcgagagtatttagaattcaacaaatataagtatacagcatctgtcctcatagcagaatctggtcaacctgtagttccgttggacagacagtttctcatccatgaactaaatgcatttgaagaatcaaaggataatacaatacctcttttatatgggattttagcccatttcttgcgtggaactaaggatggcatccagaatgcatttctgaaagggccttcacttcagccttcagacccaagtcttggcagacaacctagtagaagaaagccaatggatgaccacctaagaaaggaggaacagaaaagtactaacattgaagatcttcatgtttctcaggcagtcaacagataatgctttgtttggggtatcttttgtcttaaaattgtattattaattaaataacttatttattgtcccaatgttaccaaaatgcaccactaatgttgtagaaattggagtttctacaaaacacccctcatgtttaactacatttgtgaataaaagctaactcttgtcatctagcttatgggatttgacttgacaacaaaaaaaggtatggttcaacgaaagaattgggggttgaaaatggaggtctcgtctgttaccaaacggacttgcaggggcacgaaatcggggtcaagggcaattcgggatcccggatcaagtgaacacagggataagctcgccagtcactggggacacgggctgggcacacacagaaagagcgggtatgagagacacaggcgtacacaagtcgacagatagctgaaacggaccaaggacggggaccaagccgcaggcgggatacaagg

SEQ ID NO: 349901 - DNA, 1428 bp, Homo Sapiens
  misc_feature (225)..(312): n is a, c, g, or t
  misc_feature (663)..(671): n is a, c, g, or t
  misc_feature (691)..(704): n is a, c, g, or t
  misc_feature (713)..(964): n is a, c, g, or t
agcgggttgaaaaatggcgactgtggcagagttgaaggctgttttaaaggacaccttggaaaaaaagggggtattagggcatttaaaagcaaggatccgagctgaagttttcaatgccctagatgatgaccgtgaaccccgaccatcattgtctcatgaaaaccttctaattaatgaattaattcgagagtatttagaattcaacaaatataagtatacagcatnnnnnnnnnnnnnnnnnnnnnnnnnnnnnnnnnnnnnnnnnnnnnnnnnnnnnnnnnnnnnnnnnnnnnnnnnnnnnnnnnnnnnnnnatctggtcaacctgtagttccgttggacagacagtttctcatccatgaactaatgcatttgaagaatcaaaggataatacaatatgaccacctaagaaaggaggaacagaaaagtactaacattgaagatcttcatgtttctcaggcagtcaacagataatgctttgtttggggtatcttttgtcttaaaattgtattattaattaaataacttatttattgtcccaatgttaccaaaatgcaccactaatgtttgtagaaattggagtttctacaaaacaccactcatgtttaactacatttgtgaataaaagctaactcttgtcatctagcttattggatttgacttgnnnnnnnnngtattgtttttacgaagtannnnnnnnnnnnnngagatggannnnnnnnnnnnnnnnnnnnnnnnnnnnnnnnnnnnnnnnnnnnnnnnnnnnnnnnnnnnnnnnnnnnnnnnnnnnnnnnnnnnnnnnnnnnnnnnnnnnnnnnnnnnnnnnnnnnnnnnnnnnnnnnnnnnnnnnnnnnnnnnnnnnnnnnnnnnnnnnnnnnnnnnnnnnnnnnnnnnnnnnnnnnnnnnnnnnnnnnnnnnnnnnnnnnnnnnnnnnnnnnnnnnnnnnnnnnnnnnnnnnnnnnnnnngtgtgagccactgagcccagccatttaggaagtattataaaggcccttaaagtttgtaaggaaatgaaagggctttgtattaccttttcaataggcaacaatgtactttttctttccttagactttggcttactggaagatttaattaaaaggtagaggagaagtaaatttgctgtaataattttcctgtaaataaaacaaagagtttattttattagataaagaatgtgaagtaagcatgaagagacaggctttgggagaaataccagaaagggatttttcaaagatggcattgtttaatctccgtgtggccctcggttgttgcatcacagatgagccagaaagagggccagcccccctacttgttttgggctccgaaaactctttaccaaacatcaatttttaattcttggggataagaaaaaataagtatggtgcctatctcctaaatacggcctaccttt

SEQ ID NO: 349902 - DNA, 482 bp, Homo Sapiens
ttacagattagccaagaatttttatctaaatgcagaaacttattaatgaaatccatttaaactatacttacacaacattttgggaggccctgctggtaaaattatatatggatgcagaagtattgcaagagtccattttccatttttaaatctgcaatatctgattacattgatgaattccgttgtattgtatgtgtgaatataaatatctgaattctcccgggggacttggttttcgtccaaggatgttggcagtggacacttagtttacctcaggaattgcaatcatgtaagactatattcggaaaaaatgctggagtatataattttggatactgatataaaatcatcaagatggaagttaagcagaattgtcacgtgtagtccatagcgcttttatatgcattattctgtaatttgtttgtactgcggcaactttttatactttcaatgtatcatttaataaaaaaaataagcaagtc

SEQ ID NO: 349903 - DNA, 773 bp, Homo Sapiens
ccttaaggaatgaataagaaagtctcaggcaacctgtcgcacctccagctcttcggaagaggatctcttgtgcctcaagtgtcctcttcaggaaaatcagaactgcagtaatgacgtttccatcatgcatgcttactgcctcttcttaggacttgtagtttgttcctgtaaggacggaatctctctagtgagcaaaccttgcccttccggagacgtcgcactgtatcactggggctccagtcattgctgtaatccctatactcccctttgggtctccccagctctggagcatagcttttggcaggtgtgtctgacagagcatcagaaagggactggaaacttccaggtctagttctacctctaaaaaagctgctcagggagtaggtagaagtaggcttgggtagttgtgcataggaggagaagctgtttcggctctttagctgttcacgcccctcgtgggttgagccgctattaccagcagtctctctgatggaccatgagatacttcccacaggttccccactccagctgactcgctccaggtcatcatcgtcatcatcatccacgaagtctcggaggctgttcaccgcccgcttggactcctttaactgtgaaagctcatcgtcttcatcgtcaaaggtaaaagccttgaacttggagctgttccaatactcctcctcatcaccctttgtccgattcatctcttccgcacagagccctccctctcaggacagcgccagcctccgccgccgctgcctcgtgccgaattcgcc

SEQ ID NO: 349904 - DNA, 1518 bp, Homo Sapiens
  misc_feature (15)..(15): n is a, c, g, or t
  misc_feature (61)..(61): n is a, c, g, or t
gaggcaaatgatcgncatctagaatcagcaggacagactgagatcttccgaaagcaccccngcaaagcctccatcctcaacatgccactagtgacaacacttttctactcctgctgcgtatcactacacagaggctgaggggacattcagcagtcccgtcaacctgaagaagacatttaagatcccagataaacagtatgtgctgacagccctggctgctcgtgccaagcttcgagcctggaatgatgtagatgccctattcaccacaaagaactggctgggctataccaagaagagagcacccattggcttccatcgggttgtcgaaattttgcacaagaacaatgcccctgtgcagatattacaggagtatgtcaatctggtggaagatgtggacacgaagttgaacttagccactaagttcaagtgccatgatgtcgtcattgatacctaccgggacctgaaggatcgtcaacagttgctagcatacaggagtaaggtagataaaggatcagcagaggaggagaagattgatgctcttctcagcagctcgcaaattcgatggaagaattaagtggcattgactaccttgaagcctgcctcatttcctcctctcctgcctgtgaaagcagagagagcccttctttgggagagctgcggcatcacatcgcttgggcccattacccatgggcagtgccagctactcttgacacagataacttcagactgatcttctgtccaaggaacatcatctgaggatcgagatctaaagctttgagtcatgagaatgattctctccacctggtgctcatatgaaggtgggagtgatttctagattgggcccctactgggtaagatctcacttggtctgagaaaagtgactgctccagaaaggaagaggtatgggagtcatagggtggctactgcattccactcagctaattatgatccaggacttggcgctggacattggcagttctgctctgaatgaagtcagaacagaaccaaaatggcctcaggaaggaatgccagtgtttcccaagacctcctggagatgcactcacaccagactgcacagacccctccacattatgccacacacggcctagacgttgtgtttcctcagccattttccctctgctgccccagtttactctgtccaaaaccctaaggttcttctctcacttgaacacagacgaccttgcttgggtgatgagacatcccctttatctcttcctctactgctggccaagacccgtcactttataagaagctcagatgcagcagtgctggagagctctctctttatgcaaaaatctcatttcaccaggagctttcagaagtttcacctgggctaaattcagcagcatttctgttaggatatttagatggaggttttattttcacacttggattcttgctctgtaccaatatttgcctccttttctgtgactgaactgggtttttctgacatgcctagactcctaataaaggtatttcttccttggtgccttcaaa

SEQ ID NO: 349905 - DNA, 788 bp, Homo Sapiens
agcgacctcaagttcgccaaccgcctcccagacagtgccctcgctggcctagcctattcaaacctggtgtatgactgggtgaaggcggccgtcctctttggtgttgtcaacactgtggcatgcctcgaccacctggacccaccccagcctcccaagtgcatcaccgcactctacgtctttgcggaaacgcactttgaccgtggcatcaacgactggctttgcaaatatgtgtataaccacattggtggggagcattccgctgtgatcccagagctggcagccacagtggccacatttgccatcaccacactgtggcttgggccttgtgacattgtctacctgtggtcattccttaactgctttggcctcaactttgagctctggatgcaaaaactggcagagtgggggcccctagcacgaattgaggcctctctgtcagtgcagatgtcccgtagggtccgggccctgtttggagccatgaacttctgggccatcatcatgtacaaccttgtgagcctgaacagcctcaaattcacagagctggttgcccggcgcctgctactcacagggttcccccagaccacgctgtccatcctgtttgtcacctactgtggcgtccagctggtaaaggagcgtgagcgaaccttggcactggaggaggagcagaagcaggacaaagagaagccggagtaggagggagcgggtagagggatgggctctgctcagctattcttgggccagatggggcctgaccgatagaataaaagacttttctacaacaaaaaaaa

SEQ ID NO: 349906 - DNA, 1006 bp, Homo Sapiens
accagctctgtgaattgagctgttcaggctcacaaggttgtacatgatgatgccccagaagttcatggctccaaacagggcccagaacctacgggacatctgcactgacagagaggcctcaattcgtgctaggggcccccactctgccagtttttgcacccagagctcaaagttgaggccaaagcagttaaggaatgaccacaggtagacaatgtcacaagacccaagccacagtgtggtgatggcaaatgtggccactgtggctgccagctctgggatcacggcggaatgctccccaccaatgtggttatacacatatctgcaggaaagatgggagaagggccactgggagtgtgggaaagggcagggatgagatgggagaggacacacaacagggcgtcctcctcaacactgtcaccctgggtgcattcaacattcctgacctcacgtagcagctcctcctccaaccaacttcaaattgtggcaggctcagcctgggacattatagcttctctatctctgttcgtttacttcccaaatgatctcatccagacccaagatttcaagtactagctctatgacgatgacccctaaatctgtgtctttagcccagtctctcctgatttgtatatgcaattgctactagccatgtcacttgattgacagattcccctatccctgctcaaacccagctccgtcctcatctcagtgaatggcaccaccatccattcagttgctcagggtataagccttggtgccattcttggattctcagttggcctcatcacccacatccaagcaagccagcaaattctgtgggctcctctcagtcctgaccaccaatccacctctctctaacaccaacaccctagtcaagatgatcactcttctcacataaattattgcaagagcctcttaagtggtctccttgtgtctgcttttgcccccatggttcattctccacacagcagccagaggcatcttttaagagtgtagctcaggtcac

SEQ ID NO: 349907 - DNA, 906 bp, Homo Sapiens
ccgcggtccccacccgcctcgccgtcacctatacatcttttgaagcctggcaagggtccggaattccttggatctcccggagatgccccgcggcagccgcgctcggggctctaagagaaaaaggagttggaatacagaatgcccatcctttccaggagaaagaccactgcaggtcagaagagcaggtctcaggacagcaggggcagctgcctctctctctgaagcatggctcaggtgtggagaagggtttcagaacacttctgggaatccgtcattaacagctgaagagaagacgattacagaaaagcaccttgaattatgccctagacccaagcaagaaaccaccacatctaaaagcaccagtgggcttacagacataacatggagctccagtggaagtgatttgtcggatgaagataagacactttctcagttacagagagatgaattacagtttatcgactgggagattgacagtgacagggcagaggctagtgactgtgatgaatttgaagatgacgagggtgctgtggaaatctcagactgtgcttcttgtgcaagtaatcagtctttgacaagtgatgagaagctgtcggagcttcccaagccaagttctatagaaattttagagtattcatcagatagtgaaaaagaagatgatttggaaaatgtcctactcattgattcagaatcccctcacaaataccacgtgcagtttgcatcggatgcaagacagattatggagagactgatagatccaaggacaaaatcaacagagaccattttgcatacacctcagaaacccacagctaagcttcccaggactccagaaaattcagcaaacgaagaagctttaagaggtggactagccagaaagactaaatggactgcagactcgagagagat

SEQ ID NO: 349908 - DNA, 999 bp, Homo Sapiens
ggtaccgggtccggaattcccgggatcgcggcagccgcgctcggggctctaagagaaaaaggagttggaatacagaatgcccatcctttccaggagaaagaccactgcaggtcagaagagcaggtctcaggacagcaggggcagctgcctctctctctgaagcatggctcaggtgtggagaagggtttcagaacacttctgggaatccgtcattaacagctgaagagaagacgattacagaaaagcaccttgaattatgccctagacccaagcaagaaaccaccacatctaaaagcaccagtgggcttacagacataacatggagctccagtggaagtgatttgtcggatgaagataagacactttctcagttacagagagaggtggactagcagaaagactaaatggactgcagaatcgagagagatctgctatttctttgtggagacatcaatgtatttcttaccaaaagacactttcaggtagaaaatctggtgtattaactgtgaaaattttagagctgcatgaggaatgtgccatgcaagttgccatgtgtgagcagttattggggtcaccagccaccagctcctcccaaagtgtggctcccaggcctggagctggcctgaaagttctcttcaccaaggagactgcaggctacctcaggggccgtccccaggacactgtccggatcttccctccctggcaaaaactgattattccaagtggaaagtgccctgttattctgaatacttacttttgtgagaaagttgttgccaaagaagattcagaaaaaacttgtgaagtgtactggccggacatacccccttccaagaagaagcatctctttggcccagatgtttgtaattaagggtctaacaataattcacctggaatccaggttgtggtgtaagggtgtaacccctacagggacagccttggaccctggggcaccaagaaccaaaacagcggaatccaaccagcattcccctgagggattct

SEQ ID NO: 349909 - DNA, 1068 bp, Homo Sapiens
  misc_feature (984)..(998): n is a, c, g, or t
ggtccggaattcccgggatcgctcccggagatgccccgcggcagccgcgctcggggctctaagagaaaaaggagttggaatacagaatgcccatcctttccaggagaaagaccactgcaggtcagaagagcaggtctcaggacagcaggggcagctgcctctctctctgaagcatggctcaggtgtggagaagggtttcagaacacttctgggaatccgtcattaacagctgaagagaagacgattacagaaaagcaccttgaattatgccctagacccaagcaagaaaccaccacatctaaaagcaccagtgggcttacagacataacatggagctccagtggaagtgatttgtcggatgaagataagacactttctcagttacagagagatgaattacagtttatcgactgggagattgacagtgacagggcagaggctagtgactgtgatgaatttgaagatgacgagggtgctgtggaaatctcagactgtgcttcttgtgcaagtaatcagtctttgacaagtgatgagaagctgtcggagcttcccaaggtagaaaatctggtgtattaactgtgaaaattttagagctgcatgaggaatgtgccatgcaagttgccatgtgtgagcagttattggggtcaccagccaccagctcctcccaaagtgtggctcccaggcctggagctggcctgaaagttctcttcaccaaggagactgcaggctacctcaggggccgtccccaggacactgtccggatcttccctccctggcaaaaactgattattccaagtggaagttgccctgttattctgaatacttacttttgtgagaaagttgttgccaaagaagattcagaaaaaacctggtggagtgtactgtcccggacatacccctttccaagaagaaaacatctcttttggcccaaatgttttgtatttaagggtctaaacaaataattcacctgaaaatcacggtttnnnnnnnnnnnnnnntaaccccctacggggacaggccgggaacccatggggccccagaagcaaaaacagggccttcccacccaga

SEQ ID NO: 349910 - DNA, 1080 bp, Homo Sapiens
agcggggcgcgctgaggaggcggtgcgctcaggcggcgctcccggagatgccccgcggcagccgcgctcggggctctaagtacaaaaaggagttggaatacatgaatgcccatccttgccaggatgaaagaccactgcaggtcagaagagcacggtctcaggacagcaggggcagctgcctctctctctgaagcatggctcaggtgtggagaaggtgtttcagaacacttctgggaatccgtcattacacagctgaagagaagacgattcacagagacaatgctaccttgaattatgccctaggaccgcaagcaagaaaccaccacatctaaaagcaccagtgggcttacagacataacatgtgagctccagtggaagtgactttgtcgtgatgaacgataagacacctttctcagtttacagagagccaagttctactagaacacttttagagtattcagtcagcatagtgaaaaagaagatgatacggaaaatgtcctactcattgattcagaagtcccctcacaatataccacgtgcagttttgcactcggatgcaagacagattatggacgagacctgatagatccaacggacagaaatcatacagagaccagttttgtcatacatcctcagaaacccagcagactagaggtttcccaggactcccagaaaattcagcaaagaagaagcttttaagaggtggactagcagaaagactaaatggactgcagaatcgagagagattctgctatttcctttgtggacaccatccatggtattttcttaccaaaagacactttcccggttgaaaactctggtgtttttaacctggtgcaaaaaaatctttacaagcctgtctgtcaggcaaaggttgcccctgtgccaaggttgtgcacctgtgtgtgtagacgagttcatcgggggggtcacccgagcgccccgagatcactccccagaagtgtgtggtcccccaggcccgtgaagccgtggcacgaaagagttcctgtcacccaagggaagaatggggcatacatctgtggccgcccccacggacacggctcggcagatgttcccccg

SEQ ID NO: 349911 - DNA, 1908 bp, Homo Sapiens
  misc_feature (601)..(619): n is a, c, g, or t
tagtctgtgatctttgctctccgtgcacattacccagcctaattaaaacaggtgtgtgtggtggagccagctatccccaccaccattcagcagagacacgatcacaccagttcagagagctacactttatgggtaacagtttcacctgtgatacagttccctagaacattttcccaaaagtagtgaactgcaaagtgcttaggtttgacatttattgtagcagaacagtaatatcacagtatgggacaaaggtttacactttgcagggtattctttgggggaatgttaaatactgtaataaaaacatgttcaatcatggtaaaatgttcaacttgttaaaattacaaatgaacaaaaaaaatttttttctcatatattgcctaaataccaaatgaagagcttaaacttaagattcaatgtgaaaacgagtaaatatgttcctaaatttgcagaaaataaaagataaactgtagaaaaaggtattttgatttacagttcacaaaactgtatctgaacatttccccagaaaaatctaagtttcatttcaagatcgtaaactacgttcactgtgtccatagttaacaaataactaccccaaatnnnnnnnnnnnnnnnnnnncttgcagccacattgcaaagttcacagatcctgcggcaaccgctagtgttctgcagaggcccctcctgcactcagaagctcgatttcctccaatccaatgcagctggtcgggtgggcggttacggactggacaaaacaatttaacaaccccacttcctttccgaggacactcttcacttcgtagctcccatcttcaccggcggcaaacctcagcagggaggaaatgctgcgctgcaacagcttgaccttcactctgcactgcggtcttgagcggcagtccaggaagacctgcaggtgcctcttgagaacaggagatgtgaccacccgggagcagtccccacaggaaaaggcgcctctgtcttccggcctctgttccaatctcccgttgccacacatgtcacacacaggccatgagaaagcagtgctctcgtccacgccaaccacagtgccttgaacactgcagatggagttgacaggtgttgcagagtccaggctgtcgagcatcaccgggccaggcagctcacaggaacttgcaccagagaccacactcaaaaggggcttctgaagcaagaggacagttcgttcagcacaaacaatccgaccctggtcacggagagcgtccttgaagaagaggctgtgaggggcagccccagcgagtgcctccaggacttcagagcccagcacacacaagggggccacatagaccagcagggttttggggagcctggggtctctctcctccttcgtttgcagagtgacatcggtcactagcagccagatctccctttgctccagaagcagcagactcttcagctgtggtttttggtaaatcaccgtggcatagaaactgcaacgggtaccaagatcattcatctggagaatgtctcttaagcagcgggtaactggaggctggtaaagcttataaatggggtcttcgtcaattatatcaatttcgtcccagatttggatgagctgtgaggatgtaacacaaggctggaggaggcagatgagtttttatctcttcacagggctggtcgcggccaggtgttttcagaggtatcgctgggggccacagggtgtcaatcaaactgaaaatccccgctgtccaggtccctagtctggcaggctctgcagcagtcagcagctcacccagcagctcccacaagactgccagagagcatggggggagctcaagtcagctacccatcagtgaagggagagccacgtttcccgtcacactcagtcacagttcatctgacctctaaaaatcagctgtatttgaagccgct

SEQ ID NO: 349912 - DNA, 505 bp, Homo Sapiens
gtaactggaggctggtaaagcttataaatggggtcttcgtcaattatatcaatttgtcccagatttggatgagctgtgaggatgtaacacaaggctggaggagccagatggagtttttatctcttcacagggctggtcgcggccaggtgttttcagaggtatcgctgggggccacagggtgtcaatcaaactgaaaatccccgctgtccttcctctggtgactttctgtagaaccttcattcccaccaggctgcaagacttcccttccaactgtcttgccttcgacatggtgaactccaagtgcacttcaccgaacattccacaggcatcttgtaccagaaggcaggctcgagttccagctgggtctgtgtgtcctgagctggccccctgctgacccctggtgctgtctctgctgggaagagaatacactctttgcaccaccactcggactccagctccctggccacgaggcagctcccctggctttccaccacatcccaggaga

SEQ ID NO: 349913 - DNA, 943 bp, Homo Sapiens
  misc_feature (122)..(251): n is a, c, g, or t
  misc_feature (489)..(604): n is a, c, g, or t
cctcgccttgtctcccaggctgaggtgcagtggatgatcagggttcactgcagtccctacctcctgggctcaagtgatcatcccacctcagccccatgaatagctgggactataggtgtttnnnnnnnnnnnnnnnnnnnnnnnnnnnnnnnnnnnnnnnnnnnnnnnnnnnnnnnnnnnnnnnnnnnnnnnnnnnnnnnnnnnnnnnnnnnnnnnnnnnnnnnnnnnnnnnnnnnnnnnnnnnnnnnnnntgagccaccatgtccagccaaggatatattttagtagtaatgaacttatggtgacagaatatgtgggataacgtcacctactgtcacaagctggcttctctggaaacagttactgagactgactttggggttcaagatatttgttacagatcaagtcttgtgaagggaagggggagaaaacagtgttaggcagaggaagaagttgcatacgttataggcccaactaaacctcagtcannnnnnnnnnnnnnnnnnnnnnnnnnnnnnnnnnnnnnnnnnnnnnnnnnnnnnnnnnnnnnnnnnnnnnnnnnnnnnnnnnnnnnnnnnnnnnnnnnnnnnnnnnnnnnnnnnnnaatcaatcaataaacttcagtcaaccctgccaggagctatggaacaattattgtttgttggagtgttctgtgttgggctaaatgtgaagcctctttatacttctaccttactcagtcaccatatgggggctgccccagagaggtcatgacctcaagtgaggaagtactcagcagctgagccaggccctactgatagctggaggatgctgctgcccatgctgcccactgtgaggcagcaagcccttgcttgaagggggatctggatagtatgtttctgtgtctaccacccctagaaatggtgcctagagtgagtcatcacaaaaagaatcaggatagctt

SEQ ID NO: 349914 - DNA, 635 bp, Homo Sapiens
gccagatggtgcaggcagtgaggagagactcaggactgcaacctttcggctccttattcctgctcatcactcagaaaagggcagtactaacccctttcctaaccaagacatggcactccctaagagctcttgtctatagagtttggtccttagaggaaagcagataccttcagcgtgagaagggcttggttgacagttttggggtattatgggaagagtaggttggggtaaagcttgagtctaactcttgatccttacatggacctatgaggccctgccattcagtcaggcactgtccttgggtcctcaaattaactgctgagaacactccccactttccgaggacgctgatgggaaatgggctctgtccatgcagctggaaggatcctagtgctcgtgccactgtcagtggcaccatccttgccttgaatgatctttcttgcaggctcctgcagctgagtgtttcttgtaagatttttcagggggattgggcaagaagaagaggtgcaaattctgttcccttcccaccttgaagccttcccagaccaccacggtctctgcacaagggaggctcccattactgttctgttggcttctagacccaccatcccctctctttctgtggactctgcccc

SEQ ID NO: 349915 - DNA, 659 bp, Homo Sapiens
  misc_feature (497)..(509): n is a, c, g, or t
attaaatgccacaccgcatgccttcttgtaaataggaaacttcttctttgacactatcaaactttgaaatgatcccttttctcctaagaaacaaacctaatccccaaatataaattaatatagaaattttctatgtcttgcttagagggggaatgaaaggtagtaagccaaacgtactccatataaatcttttttgatagcactaaaactttctgtaataaaacttaagaaaaacaaattttcaagacataatggagaatattttccatttatttgcattaacaggccattatccttgcttagacaaaaatgaatacagtttccttccttcctttttcatgttccgaagaagaaaaaatttaacgacccaccaaaacaaagcatgtgttctttccttctatatggagtactaaaccaaggcaaataaatgaacattaaattatatgagggtaagggtatggaaggtgtgagttatgtaatatttacaggtggactgnnnnnnnnnnnnngttggcttcctgattcctggtcatttattttagaacatgagaacccaatgaaaaacccaaactaaaatcttttatctacttccttatatcataaccaagaaaagaacgatcactgtcagtagacagtatctggaacaaactgggaataag

SEQ ID NO: 349916 - DNA, 1356 bp, Homo Sapiens
  misc_feature (1)..(1): n is a, c, g, or t
  misc_feature (3)..(4): n is a, c, g, or t
  misc_feature (527)..(581): n is a, c, g, or t
  misc_feature (1057)..(1057): n is a, c, g, or t
ngnncccgccgccagataaggatgacattcggctgctgccgtcagcattgggtgtgaagaagagaaaacgaggacccaagaagcagaaggagaacaagccaggaaaaccccgaaaacgcaagaagcgtgacagtgaggaggaatttggttctgagcgagatgagtaccgggagaagtcagagagtgggggcagtgaatatggaaccggaccgggtcggaaacgaagaaggaagcaccgagaaaaaaaggagaagaagacaaagcggcggaaaaagggggagggagatggggggcaaaagcaagtggaacagaagtcatcagcaactctgcttctgacctggggcctggaggatgtggagcatgtgttctctgaggaggattaccacacgctcaccaactacaaagccttcagccagttcatgaggcccctaattgctaagaagaatcctaagatcccaatgtctaagatgatgaccatccttggggccaaatggagagagttcagtgccaacaaccccttcaggggnnnnnnnnnnnnnnnnnnnnnnnnnnnnnnnnnnnnnnnnnnnnnnnnnnnnnnnaggtgtcagctgctgtctcgtcggccacccccatagcaccctccggaccccccgcccttccaccaccccctgctgctgatatccagcccccacccatccgaagagccaaaaccaaagagggcaaaggtccaggccataagaggcggagtaagagcccccgagtgcctgatggacgcaagaagcttcggggaaagaaaatggcaccactcaaaataaaactagggcttctgggtggcaagaggaagaaaggaggctcgagcgacgaaggtcctgaaccagaggctgaggaatcagacctggacagtggcagtgtccacagtgcctcaggccggcctgatggccctgtccgcaccaagaaactaaagagaggccggccaggaaggaagaagaagaaggtcctgggctgtcctgcagtggccggggaggaggaggttgatggctacgagacggatcaccaggattactgtgaggtgtgnccagcagggtggggaaattattctgtgtgacacctgccctcgtgcctaccacctcgtctgccttgatcctgagcttgaccgggcttcagagggcaaatggagctgccctcactgtgtgagtacctaatgccagcatctgatggccctgaggaacccacccatctctttcccccttgggttaacttaccctcttcctgcccccagaagggtggacttcttagtaacagaaggcccgagttcttaggatcctaatgtattcctttttcccacaacaaacattttggaacctggagtgtcct

SEQ ID NO: 349917 - DNA, 978 bp, Homo Sapiens
caaaaaaagaaagatcaagatagatatgatgaagccggggagcttgcttacgacaggggagaataaatacttacagtacactctctccatttaagagacacatggagcacatgggggagggagacctgtctaagaactggatcatattaaggagaaaaaagcaactggaatctcaggcttcagttgttgcattatgctgctgaagcatagaggagatggtcctttgtgatcagagcgtctcaactcgtttctggcaagctaagatgaactttggggttgtggatagaaagataaactgatctgcaaaagaaatgcacagaagtattgaaggctagaagttggcagacaagaaatgaaaagcatttagagaatgggaggcctgtgaaggtagccacaacccaggacttaaggagaacacaggctggagaggaactctccaaagcagagaatgggtggtgggttttccaggcaatggtgcctagtggccagttttaagttgttgcttgtactgtgctcagctacactcccttcatgttgccccaagccctctctaaagtctgataaatgatccaccactctgcagcagtggtctttgggacaatgaagacacctcggtggtgggtcacttagggaaatacaatctggaaggggccaacagtcccagagacaagtggggtagcagaaatatgcagaaccaagagttcagagtgatggtcactagaagaaatgtggcctctaaggatgctcagacaagtggatatgtatagtaggaccctagctttaccatcctggcatatcattcccatcatagctatttcattttttctcaattagttgctgaaatgtctacatgttcttatcgagttgaaagatcagtgtctccctgtctcattaaatttccagaacttcagagggctaaatcaatccaaaaaggggctgggccctgcttttcaaacaccaaagtgaaagagaactacc

SEQ ID NO: 349918 - DNA, 745 bp, Homo Sapiens
aataattataattttaacatatcttcactgtagtcaacatgtagagtctgcttccctcattattgcattgctaaggcctttttaaaaagcttatgcttacataatacactcttttttatggacacgttatatgtttccaaatctgtgtattgtgatttttacatactaatgaatataaacaggtgattttaaaatattactgtgcttctttggttgaatgagctggtattgatgtaaaatactctgtcattgatggaccactacctgcagctaagcagtgagcagaatctccgggaaatgacttagtctggccacatgcatagcccatcttcataatgtcgcagcagaaggttctttgtggttaaaagttttaaagcctatttctttataggtaaccctctcaggtatatttacctggtagaaaaacatgtagattgtttctattacttaaatgttttaattggactgtagtttagaaattacaggaccagcttgttacagattatacactattctgttacttttatttctgaaacttaaaaacaataaattctttttctgtgtttctaggttagaacttttttattttattgcacactgaacagatactgttgcttattgaatattgtgtaaacccttctttggctttccttgcccattgcaatttgatttaagcctactagagccattgtatgtgacagctatattgtattacaaagtaaaaatatatgagtgtattgaaaaa

SEQ ID NO: 349919 - DNA, 1111 bp, Homo Sapiens
  misc_feature (744)..(744): n is a, c, g, or t
atgccatcatcgtggccaacttctgccgcagctggacgttctacctgctgctcatctcccagcccgcctacttcgaagaagtgttcggcttcgagatcagcaaggtaggcctggtgtccgcgctgccccacctggtcatgaccatcatcgtgcccatcggcggccagatcgcggacttcctgcggagccgccgcatcatgtccaccaccaacgtgcgcaagttgatgaactgcggaggcttcggcatggaagccacgctgctgttggtggtcggctactcgcactccaagggcgtggccatctccttcctggtcctagccgtgggcttcagcggcttcgccatctctgggttcaacgtgaaccacctggacatagccccgcgctacgccagcatcctcatgggcatctccaacggcgtgggcacactgtcgggcatggtgtgccccatcatcgtgggggccatgactaagcacaagactcgggaggagtggcagtacgtgttcctaattgcctccctggtgcactatggaggtgtcatcttctacggggtctttgcttctggagagaagcagccgtgggcagagcctgaggagatgagcgaggagaagtgtggcttcgttggccatgaccagctggctggcagtgacgacagcgaaatggaggatgaggctgagcccccgggggcaccccctgcacccccgccctcctatggggccacacacagcacatttcagccccccaggnccccaccccctgtccgggactactgaccatgtgcctcccactgaatggcagtttccaggacctccattccactcatctctggcctgagtgacagtgtcaaggaaccctgctcctctctgtcctgcctcaggcctaagaagcactctcccttgttcccagtgctgtcaaatcctctttccttcccaattgcctctcaggggtagtgaagctgcagactgacagtttcaaggatacccaaattcccctaaaggttccctctccacccgttctgcctcagtggtttcaaatctctccttttcagggctttatttgaatggacagttcgacctcaaaaccacaagagagagtaagagatcccgggaatccc

SEQ ID NO: 349920 - DNA, 1393 bp, Homo Sapiens
  misc_feature (1202)..(1202): n is a, c, g, or t
  misc_feature (1205)..(1206): n is a, c, g, or t
  misc_feature (1213)..(1216): n is a, c, g, or t
  misc_feature (1225)..(1226): n is a, c, g, or t
  misc_feature (1228)..(1228): n is a, c, g, or t
tcggtcggtaccgacgctctctctgtggggcacacacagcacatttcagccccaggcccccaccccctgttccgggactactgaccatgtgcctcccactgaatggcagtttccaggacctccattccactcatctctggcctgagtgacagtgtcaaggaaccctgctcctctctgtcctgcctcaggcctaagaagcactctcccttgttcccagtgctgtcaaatcctctttccttcccaattgcctctcaggggtagtgaagctgcagactgacagtttcaaggatacccaaattcccctaaaggttccctctccacccgttctgcctcagtggtttcaaatctctcctttcagggctttatttgaatggacagttcgacctcttactctctcttgtggttttgaggcacccacaccccccgctttcctttatctccagggactctcaggctaacctttgagatcactcagctcccatctcctttcagaaaaattcaaggtcctcctctagaagtttcaaatctctcccaactctgttctgcatcttccagattggtttaaccaattactcgtccccgccattccagggattgattctcaccagcgtttctgatggaaaatggcggtttcaagtccccgattccgtgcccacttcacatctcccctaccagcagattctgcgaaagcaccaaatttctcaagaccctcttctccctagcttagcataatgtctggggaaacaaccaaaatcgcaattttaacaatatgcctctctacccccgtgcactttttctgacatggttttcaggtctaaatagtggctgctccagtccatgaactcaaaggtttgaagctaccaccattgaactcccccatggtggtttcatgatgccccctccccaattcctcgcactttattctcctgggtggtttcgaactaccctgtttctcagtggccatttgttgtgtccctcaggggcttaatgactcaaaatctgggatccttcccctctcagacacccctctttcagcttagaatttggggaacctatagagaagtcacagaatcccatgaaagggaatggggcaggagacaggggtgttttttcccagtgcagggttgtgtctttgtgtctctgtctctgtgactgtaaatcctgccctgccccactcccaataaaagctttggtgtataggnaanncccctgnnnnaactgctgnncntcaaggggggccgctctagagtattccctcgaggggccccaggcttaagggtacccagcttttttgtacaaagagggcccctaatagggagtcgtattataagcctagggactgggccgtcctttttacaacggcctgaattgggaaaacggcttaacctgggga

SEQ ID NO: 349921 - DNA, 435 bp, Homo Sapiens
tccattcaaataaagccctgaaaggagagatttgaaaccactgaggcagaacgggtggagagggaacctttaggggaatttgggtatccttgaaactgtcagtctgcagcttcactacccctgagaggcaattgggaaggaaagaggatttgacagcactgggaacaagggagagtgcttcttaggcctgaggcaggacagagaggagcagggttccttgacactgtcactcaggccagagatgagtggaatggaggtcctggaaactgccattcagtgggaggcacatggtcagtggttcctcacctccttccctctctgttcccagcttttctgcacttcctctgctctccagctccaacttcttctctcctcctttcctctctaccactcggtgacatctccgcttcatcccttcctgcaagggatcctcta

SEQ ID NO: 349922 - DNA, 433 bp, Homo Sapiens
  misc_feature (54)..(54): n is a, c, g, or t
  misc_feature (410)..(410): n is a, c, g, or t
cggctactcgcactccaagggcgtggcatgctccttcctggtcctagccgtggnttcagcggcttcgcatctctgggttcaacgtgaaccacctggacatagccccgcgctacgccagcatcctcatgggcatctccaacggcgtgggcacactgtcgggcatggtgtgcccatcatcgtgggggccatgactaagcacaagactcgggaggagtggcagtacgtgttcctaattgcctccctggtgcactatggaggtgtcatcttctacggggtctttgcttctggagagaagcagccgtgggcagagcttgaggagatgagcgaggagaagtgtggcttcgttggccatgaccagctggctggcagttgacgacagcgaaatgggaggattgaggctgaagcccccngggccaaccccttgcaacccccg

SEQ ID NO: 349923 - DNA, 796 bp, Homo Sapiens
  misc_feature (168)..(196): n is a, c, g, or t
  misc_feature (222)..(344): n is a, c, g, or t
ggatgagagaattttccatgtaactccttttccttaagaaaaagaagcaaaaatccctcatgcagtgccatctgactttatggtgtttcacattatatagttactttttttaataaacgcataagattaactcttcctgcaacccaaggtggatacttggatgtttgnnnnnnnnnnnnnnnnnnnnnnnnnnnnnggggcagtctctctctgttgcccagnnnnnnnnnnnnnnnnnnnnnnnnnnnnnnnnnnnnnnnnnnnnnnnnnnnnnnnnnnnnnnnnnnnnnnnnnnnnnnnnnnnnnnnnnnnnnnnnnnnnnnnnnnnnnnnnnnnnnnnnnnnctaggctgaaaaggctgggactcaggtactttccccagttgggactgaactttctcatcagagaatgggcctcagaagcaatgttcccaaacttgtggttgggtcatcgtggaaaagaaacctcaaataagaaaaataattacaataagaaatggattttcttttttcccacaacagttatacattataaagaacagactgtcgtagaaaactgtctttgcttccaaatcagcagaggaccattgtatgtattgtcaggtctttatataagagtgaaacctttatttatgcttcttgtgagtagagaataaattttaaaactaattagatgaaattaagaaccagagtattggaacatctctgtgttttccggaatgtttactcaggtccatgaatgctgtgatgctgggaacttagggaagattcaccaaaatttgagagtgataaatggc

SEQ ID NO: 349924 - DNA, 1411 bp, Homo Sapiens
  misc_feature (133)..(362): n is a, c, g, or t
  misc_feature (1329)..(1365): n is a, c, g, or t
ttttcttatttgagtttctttccacgatgaccctaccacagtttgggaacattgcttctgaggcccattctctgatgagaaagttcagtcccaactggggaaagtacctgagtcccagccttttcagcctagnnnnnnnnnnnnnnnnnnnnnnnnnnnnnnnnnnnnnnnnnnnnnnnnnnnnnnnnnnnnnnnnnnnnnnnnnnnnnnnnnnnnnnnnnnnnnnnnnnnnnnnnnnnnnnnnnnnnnnnnnnnnnnnnnnnnnnnnnnnnnnnnnnnnnnnnnnnnnnnnnnnnnnnnnnnnnnnnnnnnnnnnnnnnnnnnnnnnnnnnnnnnnnnnnnnnnnnnnnnnnnnnnnnnnnttaaaattgggcctttgttcctattcagtaaatctatgtcacaggatgagccaggatttaaatatacaaatataaatttttagtatctttcacgtcaaattagaaacacatatttggaatttactgctgcagtctcaactgtgcttatcatggtagtggctgaaactggaagacattttttttaaaccctgaagtcattcatacttgctacttctttagtcttcttgcttggaatgaaaagtattcacaaataccaccacctaagcacctgtttcaaatgaaactcagccttctgcttgcaaaatgatgtctttataattaagcaaacagcaaaagacccatgtgagttgcttctttcttcctggagatgttagcaggataactggaatcctaggagctcctctgtgttgaatttgagaggcagaacaaaaagaaaagtggccttttccattccaaatcatggaggtaatgtgtagagaagtgatagccacatttcaaaaacagggaaagtaactgggtaaaagaagcaggactacccactctaggagacaacatagagacacttgccaagtcctgagttcagaattttgtttttgagatgaatataaaagcacctaaaggtcaaggaaaattttcttcctgtgataaggaacacaaagcctgtttggtggtctcttcgcacggacgcgcctaacactttgctttagtgtagatgaccactcccctctataaggtagggaggaagaatgttcggttagttcctctcctctggccgatattttttttcttctcctcgcacggtccaacagatgcactcggcctcccgggggctgctcgcccccggcccagaggccagtttgcagcggcacgccttactccgccatcttcgcagcttctcaaggtggccaaccctgcggtgggccgttccgctctcgacgaattcgagctcggccgatttggcctgatnnnnnnnnnnnnnnnnnnnnnnnnnnnnnnnnnnnnncgccgccaccgcggtgaacgggaggtcccctatatatcatcattcc

SEQ ID NO: 349925 - DNA, 1054 bp, Homo Sapiens
  misc_feature (756)..(756): n is a, c, g, or t
  misc_feature (945)..(945): n is a, c, g, or t
  misc_feature (964)..(964): n is a, c, g, or t
agcgggagggcaacgggcgccctcgccgccatcgtggggctctcgctcagcccggtcaccctggggacctcgctgctggtgtcggccgtggggctgggggtggccacagccggaggggccgtcaccatcacgtccgatctctcgctgatcttctgcaactcccgggagctgcggagggtgcaggagatcgcggccacctgccaggaccagatgcgagagatcctgagctgcctcgagtttttctgccgctggcagggctgcggggaccgccagctgctgcagtgcgggaggaacgcctccatcgccctgtacaattctgtctacttcatcgtcttctttggctcacgtggcttcctcatccccaggcgggcggagggggacaccaaggttagccaggccgtgctgaaggccaagattcagaaactggccgagagcctggagtcctgcaccggggctctggacgaactcagcgagcagctggagtctcgggttcagctctgcaccaagtccagtcgtggccacgacctcaagatctcggctgaccagcgtgcagggctgtttttctgagaacatcctttccccctaatgaccgaggccagcaaatcatcctcatgggatgctccagaattggtagctcccttaggaaaacaccggtgtttatcgatgccactcccctaccttatagaggggagtggtcatctacactaaagcaaagtgttaggcgcgtccgtgcgaagagaccaccaaacaggcttngtgttccttatcacaggaagaaaattttccttgacctttaggtgcttttatattcatctcaaaaacaaaattctgaactcaggacttggcaagtgtctctatgttgtctcctagagtgggtagtcctgcttcttttacccagttactttcccgtttttgaaatgtggctatcacttctctacacattanctccatgattgggcatggnaaaggccacttttctttttgtgctggctctcaaattcaacacagaggagctcctaggatatcagttatcctgcgaacatctccaggaaga

SEQ ID NO: 349926 - DNA, 644 bp, Homo Sapiens
  misc_feature (31)..(31): n is a, c, g, or t
  misc_feature (111)..(111): n is a, c, g, or t
  misc_feature (132)..(132): n is a, c, g, or t
ctctggagggacggaaagtgtgcctgccttntgagccaagtgttgctcctgatgatattaaacgcctcggctccacgccctcctggtgagctcctactcatcctccaaatnacagccaccctcagctcctgnagcttacgcccagctggcagcaccaggcgtcctggcccacagaggggcacagggtaccgggatgttagggcaacgcccagcaagggcgctccgggtctctacccaacgcagacacccaaacccatgcccagcaccttcgaggcctggctgcctatccctgtgtaccggcagcaaccagaggccctggtgacatgggggtgcccatgggggcctggggccattttctgagctgcagtgaaaacgccttctaaatgtctgcatgggagcctcacgtggatggcgtgtgggagcctcacgtggatggtgtgggctgcacttctcaccacaagtggtcacagttgctctaaagagggctgtgtccagctcatgattaaaaacagggactcgaacatgaggccaaatacatgagcaacaataaactgaccagctgtgcttcatgaaaatgacaatctgttatctatcaaaatacaccattaacaaagtaaaaagaggccgggcacagtggctcacac

SEQ ID NO: 349927 - DNA, 384 bp, Homo Sapiens
  misc_feature (256)..(279): n is a, c, g, or t
aaaccttaattatgttatacctatcaatatgtactagaagaaagaggagaaaaaaagtcgctacactagtaccaggacagcacgcttacaagatagccattttatacattattaacatacaatgatcaacaaagagtcttctatgaggtgatgggggatgcagagaaaaggaagggaagtacagtacatcaccaacatggacaaaataggaattaaattccctcgtctaaacactgaatttctgggaatttactannnnnnnnnnnnnnnnnnnnnnnnaaataaaacttttgttgttttatgacttgaacaagttttgatattttaaaagcgctcagcatttaatctggttgtttgggggaaaagaaaagaaacaaagaaagg

SEQ ID NO: 349928 - DNA, 604 bp, Homo Sapiens
gctcaaggcacagcatgagcagtatgttgcagaagccgaggagaagctgcagcgagcccggctgctcgtggagagcgtgcggaaagagaaggtggacctgtccaaccagctggaggaggagaggaggaaggtggaggatctgcagttccgcgtggaggaggagtccatcaccaagggagacctggagacccagacgcagctggagcacgcgcgcattggggagctggaacagagcctgctactggagaaggcgcaggccgagcggctgctccgagaattagcggacaacaggctgaccacagtggccgagaagtcgcgcgtgctgcagctggaggaggagctcaccctgcgccgaggtgaaatcgaggagctccagcagtgcctgttgcactcgggtcccccacctccggaccacccagacgccgccgagatcctgcggctacgggagcggctgctctcgccaagcaaggaacaccagagggagagtggggtgctgcgggataaatacgagaaggccctgaaggcctaccaggcggaggtggacaagctccgcgcggccaacgagaagtacgcacaggaggttgcgggccttaaggacaaggtt

SEQ ID NO: 349929 - DNA, 1555 bp, Homo Sapiens
  misc_feature (1501)..(1510): n is a, c, g, or t
gctgaagcaaaagatttgcatttaaggagagaaatacaccctgaaatttgagtttgaaagattagaacatagagggtctctacagtgtttttctgcaacaccaagtagtcaaatctatttatagaaactctgattacaacagaaattttaaaatgaaattttccacatcggtattttgtaggaaagctcttataatcaatgcttaagctgctttttgaggcttttcttgtacagaggttgcagccaattacattttaattggtaggctgctgaataatgtttttgtatgttttaaaataatatttattttaataggttttttaacattatgcaaatcccaataaagaactgacacgttccataggccattgactgggaaattttgtgaaacacagcctaaatacacagtttttacaccaactaatttgtcttgcctttaaaactgattataactcttctttaagtacaacttttataaagaaaaatacaacactaagactgtatgttctgtaaattatagtgtgatgacccatgcagaaccgctgtctgaagcttactcagcgattcatagccatctccagccatgttttatcaaatcacacactaaaaataaatggaaatgctacagtgaaaaaccaaaagttacagagcaacataagtaaaatgactaggcagtttcttagtaacatgtttgaaatgggaaaggtgactgactgcctttcaccagagtcttagctgtttcacgttcactattttaggttaattttcttgggaaatcaatttgaatattcccccctgtccttttgcattaaaggacgaaaatatatgttgagagtttgacagactttttaaatatgcctctttcccaattttatgtatttttggttctgcgcacacagatttatcaatgaagtacatttgcctctggctttatcacaaggaaaaaggaatcaaacattgaacacaaatgtgttccaaaccagtcttgtccatcttgtcacttttatgtgactgctcctctgaaccagaaggggcacgatagaaggccataggaatgaaagtaaatcattcaggtgaagtgagaaattcttccatatacagagtgaaaatgtgtgatttcattcctgccttcctttaaacgttgtcttgatctctgcctagtagtagttgagccctcagtcgcccaaacatgaggagagacccaactccagcagccagaatttagtatttacatttgccttcccaagttgagaatagaatgtggtgttctgtgctttctgtttttattattccaaaatatttttttaaagaagtgttatttttcaacagattcataaattagttcctgatgtacggtaaattaaaactcccactgtgtcagtcaaactgagatgtgctcatttcataaccactcatttctagtctgtcagagctgcactggtggcttattgctggtttttaaaggtgtttttaacttacatgtaacatgtttaggacatgnnnnnnnnnnctaatttgtgtgtctttacaactgattaaacagtagtttaaaaat

SEQ ID NO: 349930 - DNA, 447 bp, Homo Sapiens
  misc_feature (19)..(19): n is a, c, g, or t
  misc_feature (30)..(30): n is a, c, g, or t
  misc_feature (71)..(71): n is a, c, g, or t
  misc_feature (102)..(102): n is a, c, g, or t
  misc_feature (211)..(211): n is a, c, g, or t
  misc_feature (229)..(229): n is a, c, g, or t
cccccccaaaaaacggggngaaaatgtggngaattccatccccggccctccctttaaaacgttgtcctggnacctccgcccctagtagtagttgaagccccncagtcgcccccaaacatggaggagagaccccaactcccagcagcccagaatttaaggatttaacatttgcccttccccaagttgagaatagaatgtggtgttcctgtgnctttcctggttttattantcccaaaatatttttttaaagaagtgttaattttcaacagattccataaattagttcctgatgtacggtaaattaaaactcccactgtgtcagtcaaactgagatgtgctcatttcataaccactcatttctagtctgtcagagctgcactggtggcttattgctggtttttaaaggtgtttttaacttacatgtaacatgtttaggacatgtttttt

SEQ ID NO: 349931 - DNA, 411 bp, Homo Sapiens
  misc_feature (393)..(393): n is a, c, g, or t
ctgaagcaaaagatttgcatttaaggagagaaatacaccctgaaatttgagtttgaaagattagaacatagagggtctctacagtgtttttctgcaacaccaagtagtcaaatctatttatagaaactctgattacaacagaaattttaaaatgaaattttccacatcggtattttgtaggaaagctcttataatcaatgcttaagctgctttttgaggcttttcttgtacagaggttgcagccaattacattttaattgggtagggctgctgaataatgtttttgtatgttttaaaataatatttattttaatagggtttttaaacattatgccaaatccccaatgaaaggaactggacacggttccctaggggccattggactgggggaanttttgtggaaaacacagg

SEQ ID NO: 349932 - DNA, 1193 bp, Homo Sapiens
  misc_feature (644)..(656): n is a, c, g, or t
ttttaatcatctacatgtaaatgaagcaatagaattctaacataaggccaagaaatgagacgaatgttggggtttatgttttttaaggtaattacgggtatggtttttaattattaccatgtattaaattgtgggctttgaaacctaatgaaacctgttagccacttctctgtgccatatacttcccatgttaccaaaatacccccaactctttagccaaaagagaaccctgacctcctgagtttccatgctcctttctgtaccaggtttaaatgtagtcttctggagaagtatttttgacattgagctctgggacaggacaccttgggttggtggactgcagcccactatgatgttattacttctctggccaggcctccagtggaagtgcacaggcactcccaatgttgttaatgctctgtcttccatttgttctggaatcctacgtgttggtctgtggttccatgcattagctgtttgtaaataatgcatttgcatactgaaaaaggaatgccacctgccacagttgatggtgaggaagctcctttgacgtggtgcaattttgatgagatgtctctggggacacgaggatgccctaatgatgctgacttgtcatggttgcagcatttgaacttttggtgttnnnnnnnnnnnnncctgtaagtctgtaacctggcaacattttacaaccctgtatttttaaagatggctttctaataaaaaatccagaaccacacagccctatggtcaaacaatcctacgtttgtgcctctgcttttaaaggtgctgtgctggacagttggcatgccagggttcgagaagagtgaatggcttgacgtacttgcagttaactgtgcaaaattggctggctgcctctgttcctactgtactgtaactttgatcatgtctgttcctgttccattctcccaggagcttctctgcagactgacacaccctcccccaccccgggtagtggagatgctggtgtctgggtagtcatggatttctgctggacatttgaatgtgataaacaatccagcattacttaggaaatgctacatgcggaatgtgcacgtttccaggggcgagtattgtcaatcaaaaggtttgcaatgatttccttcctgccaaaaataaacatgtgaaactgctggagaacaaaatataagcaacaaaagaacaaaaaagaaata

SEQ ID NO: 349933 - DNA, 1527 bp, Homo Sapiens
tggaccggtccggaattcccgggatgttcttcttgaatggcaatgttttgcttttgctcgatgcagacagggggccagaacaccacacatttcactgtctgtctggtccatagctgtggtgtaggggcttagaggcatgggcttgctgtgggtttttaattgatcagttttcatgtgggatcccatctttttaacctctgttcaggaagtccttatctagctgcatatcttcatcatattggtatatccttttctgtgtttacagagatgtctcttatatctaaatctgtccaactgagaagtaccttatcaaagtagcaaatgagacagcagtcttatgcttccagaaacacccacaggcatgtcccatgtgagctgctgccatgaactgtcaagtgtgtgttgtcttgtgtatttcagttattgtccctggcttccttactatggtgtaatcatgaaggagtgaaacatcatagaaactgtctagcacttccttgccagtctttagtgatcaggaaccatagttgacagttccaatcagtagcttaagaaaaaaccgtgtttgtctcttctggaatggttagaagtgagggagtttgccccgttctgtttgtagagtctcatagttggactttctagcatatatgtgtccatttccttatgctgtaaaagcaagtcctgcaaccaaactcccatcagcccaatccctgatccctgatcccttccacctgctctgctgatgacccccccagcttcacttctgactcttccccaggaagggaaggggggtcagaagagagggtgagtcctccagaactcttcctccaaggacagaaaggctcctgcccccatagtggcctcggaactcctggcactacccaaggacacttatcccaccagagcgcagcatccgaccaggttgtcactgagaagatgtttattttggtcagttgggtttttatgtattatacttagtcaaatgtaatgtggcttctggaatcattgtccagagctgcttccccgtcacctgggcgtcatctggtcctggtaagaggagtgcgtggcccaccaggcccccctgtcacccatgacagttcattcagggccgatggggcagtcgtggttgggaacacagcatttcaagcgtcactttatttcattcgggccccacctgcagctccctcaaagaggcagttgcccagcctctttcccttccagtttattccagagctgccagtggggcctgaggctccttagggttttctctctatttccccctttcttcctcattccctcgtctttcccaaaggcatcacgagtcagtcgcctttcagcaggcagccttgggcgtttatccgccctggcagggcagggcccctgcagctctcatgttggcccctggccttggggtcaaggttgaaacggaaggttggaaggggaaaagcttaagggtgcagggagttcttcccccacttttggcccggccccagtttggggggtgggggacctccaagtttcaaattgggg

SEQ ID NO: 349934 - DNA, 651 bp, Homo Sapiens
tcacaggttgcaaaccctggtaacactgcatgcttaatgttgtgtcttctgagcctgtttctagggatacaaagcaatcctgtgttctcagaggaagttgcacacattgtgccctaaagaaggccctcaggtgaaagagcagagctgtgaagaactatcagatttggaattcaatgacactcgagttctggtccaatctgaagccatggattaatctcaaagaatcagtcagtttcatgcaacagaagcccttttcaatggcacctttatatttttatcattcctttttcttcatttatctaaccccaaagccctgatatgccacagaaatggagctatacagccatgaagcggtgttacaggtgaggagtgtaatcctaggaagcataaggtgaaaagcaggagaccaaagaagtggtcaggaacaatcatcagccctcctctgggcgggaatcagagcagtcagtccagcaggaagagtggcagactttgtagctccatgggcacgtcatttactaatgctaagatgtgttggactctgaaaaacaaaattctgtggctacactgtactgaatgaaattaaagaaactttttttgcatggacacagattagctgaatacttaaattattttcttggggctgcaacttgc

SEQ ID NO: 349935 - DNA, 907 bp, Homo Sapiens
  misc_feature (60)..(119): n is a, c, g, or t
  misc_feature (137)..(388): n is a, c, g, or t
  misc_feature (401)..(521): n is a, c, g, or t
ggcagcctctctctggccagcagggaaaggtctccacctttgaaggactcacccaatggnnnnnnnnnnnnnnnnnnnnnnnnnnnnnnnnnnnnnnnnnnnnnnnnnnnnnnnnnnnnggcatgatggctcacacnnnnnnnnnnnnnnnnnnnnnnnnnnnnnnnnnnnnnnnnnnnnnnnnnnnnnnnnnnnnnnnnnnnnnnnnnnnnnnnnnnnnnnnnnnnnnnnnnnnnnnnnnnnnnnnnnnnnnnnnnnnnnnnnnnnnnnnnnnnnnnnnnnnnnnnnnnnnnnnnnnnnnnnnnnnnnnnnnnnnnnnnnnnnnnnnnnnnnnnnnnnnnnnnnnnnnnnnnnnnnnnnnnnnnnnnnnnnnnnnnnnnnnnnnnnnttcatctcaaagnnnnnnnnnnnnnnnnnnnnnnnnnnnnnnnnnnnnnnnnnnnnnnnnnnnnnnnnnnnnnnnnnnnnnnnnnnnnnnnnnnnnnnnnnnnnnnnnnnnnnnnnnnnnnnnnnnnnnnnnnacagctcccaatctggagagttcataagtgggatcctgcagaccacgccagcacagtgccagacacgatggcacagtgactactgtactgcctcctccatctgagggattctaaagcaggaaggggagccgcccacagtctggagaaggggtgggggcagcagggggagccacatctgtcatctctgggcccccaagagggcatctttacttccattttcagccaagttcaaacaggacaaggttccatgaaaactatttgaaaagacagacagggattcttatattcccagaaccattcaaggccagtaactggaatgttctacagttcacatcctgaggaaaccaaatcacagcatcaaattatgggaaatcaaactctttttg

SEQ ID NO: 349936 - DNA, 1085 bp, Homo Sapiens
  misc_feature (308)..(431): n is a, c, g, or t
aaaaacacatcagaactgacacatcctcttggatgatgggtccttcagtcaccttgtgagcccatgtacttattccgttgatacagcctgtgctataaacatgtggggccctccttgtgtgagctgcttgaatggccagtacccccattcttttgaatattcccaatggcagtcaatcttggcctttaagaataaatttaaatatttggaaatagtccttaggatccaagtttgatcaatgaaaaggatgcttaagctgagtttggggtcacataagaagtgcagttataaagaaataagacatgttnnnnnnnnnnnnnnnnnnnnnnnnnnnnnnnnnnnnnnnnnnnnnnnnnnnnnnnnnnnnnnnnnnnnnnnnnnnnnnnnnnnnnnnnnnnnnnnnnnnnnnnnnnnnnnnnnnnnnnnnnnnncaaaggacttagtttttatgtggctcataagtgtctctaagttataccaaaagtttgagcacaacagtagtagcagaatgcttagaataaatgcttgacttttaagctgacttttggaaggaccatacccacatagaggcatcttttctgctgtggtaattttttaaattaatacattgctttaggattacatctcaaagtaaataaaaaaatcaatatttaatttgtttttttcctgcaaataaattaaatgctgggaccataatgattatttttgcatagtaatagctggtgaagaagttgttttaaaattaaattgccaaaagtattacctcttgaaaaatttattttcccaaagtttttcatatgtcatgaaacccctaatcttgacctttatgacacagtggcattacactgatgttggaagcatgtgtgagatctgtgccctggtcgggagtcatatgccttaaaaatgactgcgagtcagtgtgaagtagtataaagtggagtcctacgtgggaaaaagcaggctactgaggacaaaaacctcccaaccctccccaccttgttttccactggggaatggagaatttggatatgaggaaacttcaaccttgcagaagtgtggattccctctgaaattaaatgttcaca

SEQ ID NO: 349937 - DNA, 515 bp, Homo Sapiens
  misc_feature (425)..(425): n is a, c, g, or t
  misc_feature (452)..(452): n is a, c, g, or t
  misc_feature (484)..(484): n is a, c, g, or t
  misc_feature (505)..(505): n is a, c, g, or t
tcccccatatcattcatatagtgtgatagaagttcattaaaataattttttaaaaagccatgtgaaagtaaataccacaaggttacaaaaggtacaaaaatgtgtgaaacatttaaatttcagagggaaatccacacttctgcaaggttgaagtttctcatatcaaattctcattcccagtggaaaacaaggtggggagggttgggaggtttttgtcctcagtagcctgctttttcccacgtagggactccactttatactacttcacactgactcgcagtcatttttaagggcatatgactcccgaccaggggcacagatctcacacatggctttcccaacatcagtgttaatggccactgtgttcataaagggtccaggataaggggggttttcatggacatatgggaaaaactttggggggnaaataaattttttttccaggggggtantacttttgggccttttaatttttaaaaccacnttctttcaccggccttttacnttggccaaaa

SEQ ID NO: 349938 - DNA, 2020 bp, Homo Sapiens
agcggggcggggcccgggaggaaggcggccgcgctgccagtcccgcaggtcccctaggcccctttcgctgcggcctttccccaacccggacccggcacttctcgggttccgcgactgccgatcgccccggcgcggcaccgctccctcaggagtcgcctaggccgcgcagtctcccgacttctcgtcaggctttcgcgccggcgctccagcaatcactggctggagaaggtgggcgttccggctcgagaggaccctgccgcggctccggaagagcctcgtcctgggcggcggtggtgcggcggtcgccgttatggccactgggctgggcggctgaccgccgggctaggaaagggcccagggccccgaatctcggtggccgctgctccagcgcggcctgcgccatggcctcctccgccgcctcctcggagcatttcgagaagctgcacgagatcttccgcggcctccatgaagacctacaaggggtgcccgagcggctgctggggacggcggggaccgaagaaaagaagaaattgatcagggattttgatgaaaagcaacaggaagcaaatgaaacgctggcagagatggaggaggagctacgttatgcacccctgtctttccgaaaccccatgatgtctaagcttcgaaactaccggaaggaccttgctaaactccatcgggaggtgagaagcacacctttgacagccacacctggaggccgaggagacatgaaatatggcatatatgctgtagagaatgagcatatgaatcggctacagtctcaaagggcaatgcttctgcagggcactgaaagcctgaaccgggccacccaaagtattgaacgttctcatcggattgccacagagactgaccagattggctcagaaatcatagaagagctgggggaacaacgagaccagttagaacgtaccaagagtagactggtaaacacaagtgaaaacttgagcaaaagtcggaagattctccgttcaatgtccagaaaagtgacaaccaacaagctgctgctttccattatcatcttactggagctcgccatcctgggaggcctggtttactacaaattctttcgcagccattgaacttctatagggaagggtttgtggaccagaactttgaccttgtgaatgcatgatgttagggatgtggatagaataagcatattgctgctgtgggctgacagttcaaggatgcactgtatagccaggctgtgggaggagggaggaaagatgaaaaaccacttaaatgtgaaggaacaacagcaacaagaccagtatgatataccaaggtaataaatgctgtttatgacttctttaaatttacatagtactgtagcatattaataccctgtgaactgcaaaaaaccaaatacatttacagtagtattggtcaccaaaatagaggggaaactttacaattgtgagaatgtgtaaatgttctcattaaggcagtattgacccagacaaccatttagtattcatctatcccctcaatgcctcataattctggaatgcctgttgtgaaacatgtcagtgcacagtgtctcctaaattctcacacgtgcttgattttctgattcatctggtgaactgggagtaggaagttggtcatagacaatatgccctccttctcttgtctgaccaaagcttgaagcaatcacatctactgccaggttagctgtagtcttcgcctcttcctctgaggtggccaactgaggattgacttcaacaagatccagtgctgatagcaaccctggaagaacaaagtgtgacaaaaccctcaggttcccttgctgctactctcagtgagggtcatcccactgggacagggagaacaagccaaagtaaaaacaagagtccattttatagtagaaaatacctatttttaggaagccccttgcacctcatcctcttggccatgaatttaagttaaaaaactgttgtgctatagtagattaaaagaaaccttttaagataatgaaataaaccatccctgttcaact

SEQ ID NO: 349939 - DNA, 2848 bp, Homo Sapiens
agcgggaaagatttttgagtctacaactgacaaaatgtcttcttcaaattaaaaaaaattgagaagcagcactttaagtctaactctacaccattttattgcatgtattagttttattaatgatttttggtgcatgcctttgggcttattcaaaagtgtacaataggaaagtatatttcctttcttagaaaggagatgttttctactttgcaacatgtgattacaaaaatcttcctctgtgggaagattaaccatgtattgaactactgaaaagtatatatttttagatatacagaaggaatctacatggagcagcattcagacctatatagaagtcatagcattctgtataggaccaaaaaggaaataacattaaacacttaaacagacgttgttgggtagaaatacctttagatcttgcatttacttccaaaaagaaaaaatgccacagaagtttgctgaaaacttttgtcgtttgaattttctctgtcagtgtatttagcccaaatacaacagctttgggttagcacacacataagaatcaaaaaaacaaagctcactaaataaatcagtctggtttgccaatccagcttgactgaaataagtaaaccaatcacttgcaacatgaaaaactgtccaactcctctaaggttctgacaaaataaccttggctgatgtgggaagactcccactttgattactgacctgacagtgaagattcatgcttgacatgatttcagacttgacaatgtctgtttaaggagctatggtacagtttgctaattcaatcccagatacctgttgattacctgtgagatctagagtccaaagtagccagcagccatatccctgagtgctctgtgcccatcagatatctgaaagtaagcagggttgggacagggcacagcttggatgattgacctcaggtgccgtagacagccccagattcaagaattgtatctgctttcttgggcagtcgtcactgaactaatgtcccatactgtgttacttactgtaggatgctctcttttagagggagggcccagagcacacatcctaatcgctagcgggtactcagagaggggggtgctaactctgatgccctggccaaattccagtttagggatgtgggtcttcttcttgtcattctaattggaaatgtgcatcacttcccatttttcttactgatctcagtgcaaactacactagtctgtttctttgccctggtctcaagtctctaagacgctggtgtgtattatgtgggctaagttcatgtgttatcctaaggcacaagagttgaggaatgggtgagcttggtgtcagagcactgtgtggttggagggtggactcttgtgatgctgtggggatgaaattggccctcttttagcataagttggggagtgtgcactggctggaggcttccagaggcttccagccatgaggtgtgagctgaaaccaatttttcctctttccttatagcatgttgagaaaatctgttgggttttcagcagtcagggaaggccggagttctgctttaatctgggtaactgaggctaatatgagcaagactttggttaattaactgggttctcagatgccacagactccgtgagaagtcaccattattttcaatggttgtgatagaatttcccccagtagccattattttaagattatattgcagagttgctttattttgagctttttgtgtatacacaatcccaaactggaagaaattttaaaaaaaggaatcctgctgtgaaaggtatatattactctagatttttcttactgtaaatattgtaagattgtaatactgtcgatattttattaaccaacaaatgttaatctatgtgaaatcagacttattttaaatgtgcttcttatttactgtgtgtggtccctgttgctgacagtattaagttatattctgatgtaagattaactttattaaagaatgtaaacattaatgtttccttatgggaaaacaaataaagtataaagaagacaattcttttcattgaaatatactgtgtatttacacttgctagacccagcaccacttataaatttagtacactgttcagaattttagttaacacagctgacatggttgtgctctgtttgaaagtctaagaataggtattgttggaatatacagtttgtatttgtctgctgtgaatcataatcttgaaatttctaatcaagtttgtaaaatttttatagtgaaacattttaatgacaatttaaaaatttatcttctctaaagaatggtcaaaacaatatcctttcagaaatagaattgttctttaatatctttccaaaatgactttggttaaatggaccagatgtatattagttaaaatttaggactaagttgttgatattctttgagtttacaagttaatccttattggagatgtgccaatatacagttagaatatcattaatttgcactgtttggggaccccatttaagaatgctgaattttgccaactaagaagtaagcaaatgcaatttaaaaagtaaatttgagcattctgtattaaatatgtgcagttattatcacatgaagaaacgcagtgtgtcgggctgtaatattaccatatttgctgtcatgttctcccatctcagtgctgggaaatcaccatgtggaaaccaagcaaacgtgttgtgcatcagccggcttgagtttgttcaatatcaaagctgaaaactagcgaggtctgctgtactgcttattgaagtattgtgattattttaggcattgattcttacaaaatatatactgtaacagtatactttgtacagatttaaattttatttgaaaaaatgaaataaagtaggc

SEQ ID NO: 349940 - DNA, 1746 bp, Homo Sapiens
  misc_feature (95)..(103): n is a, c, g, or t
  misc_feature (291)..(322): n is a, c, g, or t
  misc_feature (1525)..(1537): n is a, c, g, or t
tgtacagatagtttataagcacaatattttaagaaaaaaaagtggctggtctactaggcagcctttgtgccacttcagtgctagaaagttaaagnnnnnnnnncttttgtgatttaataatactatttctgtggaataattataaaagtatgaccttttttaaatcaacctttatttggatgcatctgaaccagcagagctgtgtttatattttctatctttgctagaacttcgtcattgaaggacaatttcttcaaagtggttacaattcataatgcagcagtttctccnnnnnnnnnnnnnnnnnnnnnnnnnnnnnnnngcgcttttccagtcacacacccctgatgttggaaccaagtttttggaccttctgttccaaaaccttttgcaggtcaatctttgtatttgaaatgatccaatccaacttgaagtcaattgaatattaaggcgctttacttccgtgtgctttcagtttttccatcatgagatgaatgagcattactctagataaatttcaagacaggatactacaggtggcctgctgaggctgccccatattttagaaaatgtaaaaatggtggtttggccattaatttgtcttccatttgatgataccgcaaaattccgtgagtccattcctttggcatggcactttccctgggcctacagttggtattacctctgtgctcagtgccaggcaaaacactagctcaaaggagagtcaaggaaaccgctggcagacgataaccagtcgaaactcgtgacttcggtttgttgaactttggcagccagttggtgagggccagatgttattccctttcttaaagatactccaagccacatgccactaaccacaagcaagctggctgcaagactaaagagctgataacatagtttatttttacactgtcttattatagagaagtaatagacctatcagaacctgcactgaccaacaaataaacacatgttgccaagatgaatcggtctctatctctatctgcttattttggtactgaaagcaatagttcctcattcaaatcaccacccactgttctccccctttgggacatgttaggacgaggccctattccatgcccctctttaatggtggaacaaatgttaaactgctcatctaaagatcatgttgacattattccaggttttaagatcaacttttgttacatactgtaatttaaataaactgcatttacatgcctagtttctgtaatattgtgtatacaaaacccaaatctctcaaaatgtaaattatgtatacctgccaagataccttttccagggtgtctgcgcacattttaagttaattcacataatataaaaattactcaatgtgactgttgatttgctgaactttacatatcacaaagtgaattatttgtgatactttagttaataaaatggtaaatttttttctcagttattgaacaagcaagcattatccagttgatctggcaatgactttttgtgtgtgggccacaatattgattttcccattaacaannnnnnnnnnnnnaaatactaatatgtttcacactatagtttgtgtaacaacacgtgttcgcattatctatgttgctgttacttttgtgcttttattctttttagactttataacaacaaataaaaaagctccgtgtaattgggcctttctcccaatccttaaatccctgtatggcaaccaaaaattactggtcacaaatacatatactattgcctaaggta

SEQ ID NO: 349941 - DNA, 925 bp, Homo Sapiens
ggtgggaggaaatgtttcagatgaaacttactcaattcataccaccctgaaatggaggacagaggtgacaaacttcagtttaataggtttctcaccaagttgtatgttccattggcccaggattcttgcactaatgggtttctatcacatcatgtctataaatgggtgcactttactgtttgaatttgtaactgaagtactggatatttaagtgtgagtaatgtcttcattagaaaatagcagaaccgctcttgtcttttagtgtatttttcaagaaaaaaggaaaggaaagacatcaagcagtggatcacaacatttatagcacaagaaataacttgtatataagcatcaaaaagattaagaattttttaatatgaaaaatatttgcagtgattttaaagtgcttttccagcaatgttcttagggactcctgagacacggttacttaatctactggatcagtaaggcacacaattaacaattaacaattaatgttaattacaaagtaaagggaaaacctgtgtaacatgagaatttggcatgacaaaatggagaccattttgtatctgctgttgtatcttgtccgggttgcagacgtgcactattaaagtcccaagttaatagagcacaaacccttctcgctcctcccccatgtgcccctctttttagatgtgtataacttaaactcgatggctcaggaaaattccactaattagaatcatgtacagtaccccaggtcgttgtccagatatacaagtttgctaatgtagttaagcctggattattaaacacttttcctaaattattgtaaacagaacagcttagagaaaggtattctcagtccttaatattgtatagtagtttatgagcccctctctaaatattggtatttttatattccagagatgtacccaatagaaaaaaa

SEQ ID NO: 349942 - DNA, 864 bp, Homo Sapiens
ggcctctgcaggttataaagagataattagtgactatatctattttaaaaccctgtgatttttctctttcatacacatagcctgcttacacccaatttcaaagaaagtgtgagctaatttatttatattaactcttattaatttgccagtggttgaagttggagtttcttttctccactggttttataggtgtgtttagtgtgaagaatgtgataccattgaacttccacactacttagctggggctcttttaaatgttggaactatagtaacacacattccctcacagaaaggagattgggaaaatagctattttgaaagttattgcagatgtagggaatagcttgtttcccattatgtttctagaatattacacatttggagtaagcctttgctttttcaacatgcatcatgtaaaattacatgaaagaaaataatttgaaaattacacaagatttctctttcttgatcttgttgatgatgattgtgttctagctcaaaaaacagaccttcttagaatttcttattttttaaaaaaatgagtactcaacagataatacttttggtactgcccgttgcagacatgggccctactaaactaaaaagagcatttgaaaaaccaaaaggcaaaggtttccatcaccatcctgtgggaaatacgtgagttgttcatttcagtacacccatagttctcaacaggtgtagcagatttgtttctaaaggacataggagtgcattttttatatgaaaccagaactggagtggtaatggcacttctgattcaattaacttacttggtgaagctgccagggaaactaaatatgatgagaagaagaggaatgactggatcaaattaatagaata

SEQ ID NO: 349943 - DNA, 1048 bp, Homo Sapiens
caaatttcttcatttccttacaggtcaagaatttttttcgaatgttcggggagtttctgaaacccaggatttgtaagcttcccaggtaagtgccttttggacattcccaaggccctttcagggctgaggtttcccaaggtcctcctttccccagaaccaaagatacttccctgtgctaagccgaaggaggtaaccacttctccttcggttacttcgtgagttgtatttctgggagggagtagcacttggagagaaacttgacggtgagagtagctgatgggggctacgagttgacacactcctttttgttaggggggtttctggggtagagatagctcgcttctgagaaccctttgaaggtgtggtgtaagagttcaagaggatttcctcttcttcttccacttcaattagctcttgaatggaaacaatgtctctagctcctgcatggccactgtccttgcaggtactatgcctggctttcgataatcttttgctcagaaactcatgctcaaaagagttcaggatctctgaggtaaggccaactttatgtgtgctggtgcagaaggctataagctcgcctaccattccctcctcattctgtccatactgaacacaaagctctaccaatttctcaattagagcctcctcgcagtctaggccgaagatctgcagctcctccgccagctgctgggcggatgcggacatggtcgcccaagccaggggccggggagccggcccacccagctccgacctgcgcccaagaagcccacgggggtggcgagcgatgagctcctcgccctcttatccttcccccctccgcggaccgtgacaggaggtgactggcccaagcaagacctcagaccgtcagaaggccccggccgtcggtcacagagaaatactttttttaaaaaatgaaggggtggctcccaaacgccctgaatggagggagcagaaatctcgagaggacgctctcctggtgagaacgtcctgcttcccaaaaagctaccgctgagcttctcagcctcgtgccgaattcgccacccaggcc

SEQ ID NO: 349944 - DNA, 797 bp, Homo Sapiens
  misc_feature (393)..(491): n is a, c, g, or t
ggggcagtggtatcaacgcagagtgtccattacggccggggcaatgcacaataaactaaaataacctactaataataaatatgaaaaagtgttttaatatactagtaataaaaaatgcaagttaatatgatatattcctttttatatgtcagaaaggcaaacggtataaagaattaaaattcccagggacaaaaaggaagtacagaaataaacctcttacagagtcaacaggaatgtaaattgattccacctttctgaaaaaatattttggtaatatagttttcctgcatgcctagtaattccactttagggaaattctcctttaaatgggtcagaaaataaaatgagctaagatgtatttattcattattcaaaaagtatatgcaagaaagnnnnnnnnnnnnnnnnnnnnnnnnnnnnnnnnnnnnnnnnnnnnnnnnnnnnnnnnnnnnnnnnnnnnnnnnnnnnnnnnnnnnnnnnnnnnnnnnnnngtaccagttaagaataagcaccatatgtgtatttattgaaatgtacaagctatattgttagatgaaaaaggaagttatagaggaatatttatagtacgatccctttttaaaaatatatgtatgcatgtgtgcattaaagagtctgaaaggatacttgccaaagtgtaaaagcatttatctctggggagggtgagatttggagcaattatattttctttttgcatatctgtaaacttctaattttccacaatgagcatgtagtgtctgtaaaatttttcagggaataaacaatgatgttcacaatat

SEQ ID NO: 349945 - DNA, 1039 bp, Homo Sapiens
  misc_feature (13)..(13): n is a, c, g, or t
  misc_feature (920)..(931): n is a, c, g, or t
tgcttctgtgcgngtactcagtcgctggtcagcttcctggagtctcactttcagtcagccagctggaatcctttgcagccacagcttcagtcaggtcatctacttgggctcggagtcctcgagtcattcgatcactctttgaatggtcagcattccacttttcaactcttgctcttgctttgtttaattcttcttgagtctctttggatctttggagtaacgaggccatttcttgatttaaagactgaacttcattcctcagcagctgattctccagtcgaaggttagacagttcatgtgatttgccatcatcattaggtgttggggtgtggtcagggcaggcagcatttgatgacacattttcctttgaagattcctcttgaccttcatggctagaatctgagttactggcagcttctttttcctttctgatttccaccctcccggtaggctccttctgtgaactattaagaaaatcaaacagcagctcatcatcaggttctgacttttttcttcgcacaaaatgggatgaaggcctaggaacagatgcattttcaacaggatgagaggcctctactggtgtccgagatcctactttcacatttgcagtgccagctaagatgggggctttttgatttcgaatgttatcacctgctgatgaaatatacgtagatttagggccagtctgatatatcaaatctgtattttgctggtgaaagtcagaatagtcaggatttttgctatatatggtgctggccattgtctttccctacggaaagctgttgcaacccccttgaacaactcggtttaaaagaattttctggctttttccagccagatccaccaaccccagaactgaatggcaagcagaaaaatcctattgggcaaacctggaggacatccggaaagggtgcacttcnnnnnnnnnnnncaagggctttaaccaagggaacccccctccatttaattcccccggcccgggttctccgggttgtgcccccccggttcgccctgtcccgccccgtgccacacataaaag

SEQ ID NO: 349946 - DNA, 2404 bp, Homo Sapiens
tcgggcgcgggcgctggggcgcgtgggctggtgcccgggcggagcggtggctgctccggacagtgtgggccctcgcgccggcttctaccggcaggagctgaacaagaccgtgtgggaggtgccgcagcggttgcaggggctgcgcccggtgggctccggcgcctacggctccgtcgtgttcggcctacgacgcccggctgcgccagaaggtggcggtgaagaagctgtcgcgccccttccagtcgctgatccacgcgcgcagaacgtaccgggagctgcggctgctcaagcacctgaagcacgagaacgtcatcgggcttctggacgtcttcacgccggccacgtccatcgaggacttcagcgaagtgtacttggtgaccaccctgatgggcgccgacctgaacaacatcgtcaagtgccaggcgctgagcgacgagcacgttcaattcctggtttaccagctgctgcgcgggctgaagtacatccactcggccgggatcatccaccgggacctgaagcccagcaacgtggctgtgaacgaggactgtgagctcaggatcctggatttcgggctggcgcgccaggcggacgaggagatgaccggctatgtggccacgcgctggtaccgggcacctgagatcatgctcaactggatgcattacaaccaaacagtggatatctggtccgtgggctgcatcatggctgagctgctccagggcaaggccctcttcccgggaagcgactacattgaccagctgaagcgcatcatggaagtggtgggcacacccagccctgaggttctggcaaaaatctcctcggaacacgcccggacatatatccagtccctgccccccatgccccagaaggacctgagcagcatcttccgtggagccaaccccctggccattagacctccttggaaggatgctggtgctggacagtgaccagagggtcagtgcaagctgaggcactggcccacgccctacttcagccaagtaccacgacccccgaaggatgagccacaggccgaaccatatgatgaaagcgttgaggccaaggagcgcacgctggaggagtggaaggagctcacttaccaggaagtcctcagcttcaagcccccagagccaccgaagccacctggcagcctggagattgagcagtgaggtgctgcccagcagcccctgagagcctgtggaggggcttgggcctgcacccttccacagctggcctggtttcctcgagaggcacctcccacactcctatggtcacagaattctggcctaggacccctcgccttcaggagaatctacacgcatgtatgcatgcacaaacatgtgtgtacatgtgcttgccatgtgtaggagtctgggcacaagtgtccctgggcctaccttggtcctcctgtcctcttctggctactgcactctacactggaacatgactgtggggtcatagatgacaaaggggttcccctgcggagttcccctgtctgtcccaggccgacccaagggagtgtcagccttgggctctcttctgtcccagggctttctggaggacgcgctggggccgggaccccgggagactcaaagggagaggtctcagtggttagagctgctcagcctggaggtagggggctgtcttggtcactgctgagacccacaggtctaagaggagaggcagagccagtgtgccaccaggctgggcagggacaaccaccaggtgtcaaatgagaaaagctgcctggagtcttgtgttcacccgtgggtgtgtgtgggcacgtgtggatgagcgtgcactccccgtgttcatatgtcagggcacatgtgatgtggtgcgtgtgaatctgtgggcgcccaaggccagcagccatatctggcaagaagctggagccggggtgggtgtgctgttgccttccctctcctcggttcctgatgccttgaggggtgtttcagactggcggctccagtgggccaaagggcaaccacatgagcatgggcaggggctttctccttggatgtgggacccacagcagctccctgaggctgggggtgggtgggtggatggtttggccttgaggacgctagggcaggcagcacacctggatgtggacttggactcggacacttctgccctgcaccctggcccgctctctacctctgcccaccgttgtggccctgcagccggagatctgaggtgctctggtctgtgggtcagtcctctttccttgtcccaggatggagctgatccagtaacctcggagacgggaccctgcccagagctgagttgggggtgtggctctgccctggaaagggggtgacctcttgcctcgaggggcccagggaagcctgggtgtcaagtgcctacaccaggggtgcacaataaagggggttctctaatcaaaaaa

SEQ ID NO: 349947 - DNA, 1686 bp, Homo Sapiens
  misc_feature (1248)..(1248): n is a, c, g, or t
aagtataaaggtcgcaaacaaaaatattttgggagggggtaaaggtggaaaccatttttttaaagaggtgtgaaagaatgctttttcacaattgtgttgcagcccggggaatccctttttaaagggttttaaaaccaacccctttaaatggttgtcaaaattgcccaaccggatattggccaattgtctttctggtggtttagtaaagggaaacattcccttttggtacaaattcgggaggtatttttaaaaaatcaaccttaaaccgcaaaaaatagtccatgtaattttaacttggtttaggaaaaacaggaaagaactgtcaacatttggggggggaacaaggttttgaaaaaccccgtatcagaggtctcattcacttttttccacatatcacttgaaggttttgaaactgggaaaaacagaattcagctcgatgtacatcaaaactttaacagttctgaaaaagacgtatttcgtaagggccaaaatgtacagcacagcaatattacaatgttacagtataaatatgtcaagccaatttgtaataaaataagacagttgtcttcaaaagagctgtttgactatagagcaaccaaatagatctagaacatctttggaaaaaccacaaagtgcctttacagaaagttaagtttagactacacttaattaaaagataatactctaaactcaaaattattttctctatatgaggaattttgacacttgttttcacacctgccaatattcaatatttttaactcacacttcttttcatacatctgccaatatttaatattttattctatgcccctgcactgaattgatgtaagtgtgaagttccactattattattaccacacatgctaatacctaataactggtctgtcattatgtagtggttaaataagcaaatgctgaactcagcacagctctagcaaaatgcaaaggaaataagaaaagcctcacctcagaatgattacaccataaacagaaataaacattttcaaacacaagtttcacaaaataatataatcatcactttaaaagaaattcagaactctatttggctgttgatcaaacttgtgcatacactcaagttactaaacacaagttgatagttagatacttgtaaaaatgcattctaaacttaataatcaattaattcataattaacaagagcaaacattcctagtcctaacatttaaaaaaacccagtccagtgctgccacatctcaagttctgaanagctaaaggcagaaacaattctggttatacaattcctgcatttctccaccttaaaaaatacttgaagaaactttaggaaactttatattaaggcttgctgtatttctgtatcttaaattgagaaaaatcaaaacctacgatgtaacctcgaattatttaaatagcttttggcatttttcttgaaaagcaaatttgaatctttcactataaaacatttctataccacaattactaattcacattaatgtgtaagtgccctcatttcctattccctggcaggcgctatgtcttctttctacgttttgtgcagctttcagaacagtcagtgctcagaaaaaatgaaaacgtaatggagcaaaatcaaagtccccaaaaaaagtgatttatcctagattacaaaatccagtagtggaagaaccaacatttacacacccaaat

SEQ ID NO: 349948 - DNA, 640 bp, Homo Sapiens
  misc_feature (71)..(100): n is a, c, g, or t
ttatcccctttcctggtttccgaaaggcaagttatatctattatgtataagtaaatatattatatatggannnnnnnnnnnnnnnnnnnnnnnnnnnnnnagcgcttctgcagcctcggcctaggtcacgttggccctcaaagcgagccgttgaattggaaactgcgttctagaaactcgtggcatcagcctagtctcgggctgacccttttctgatcgtctcggcccctctgattgttcccgatggtctctctccctctgtcttttctcctccgcctgtgtccatctgaccgttttcacttgtctcctttctgactgtccctgccaatgctccagctgtcgtctgactctgggttcgttggggacatgagattttattttttgtgagtgagactgagggatcgtagatttttacaatctgtatctttgacaattctgggtgcgagtgtgagagtgtgagcagggcttgctcctgccaaccacaattcaatgaatccccgacccccctaccccatgctgtacttgtggttctctttttgtattttgcatctgaccccggggggctgggacagattggcaatgggccgtcccctctccccttggttctgcactgttgccaataaaaagctcttaaaaacgc

SEQ ID NO: 349949 - DNA, 1378 bp, Homo Sapiens
gagcgaggcctgggtggcgaattcggacgaggcccacatggcggcgctcctgaggagactgctgcagcgcgagaggccttcggcggcctctggccgccccgtaggacggcgcgaggccaacctgggcactgatgccggggttgcggtgcgagtgcggttcgctcccagccccacaggcttcttgcacctgggtggcctccgcactgccttgtacaactacatctttgctaagaagtaccaggggagcttcatcctgaggctagaggacacagatcagactcgcgttgtgcctggggcagcagagaatattgaggacatgctggagtgggcaggcatcccgcctgatgagagcccccgccggggcggtcctgctgggccctaccagcaatctcagcggttggagctgtatgcccaggccacagaagcgctgctgaagaccggagctgcttacccctgtttctgctcaccccagcggctggagctcctgaagaaggaggccttgcggaaccaccagacgccccggtatgacaatcggtgcaggaacatgagccaggagcaggtggcccagaagctggccaaggaccccaagcctgcgatccgcttccgcctggagcaggtggtgccagccttccaggacctggtgtatggctggaataggcatgaagtggccagcgtggagggagacccagtcatcatgaagagcgacggcttccccacataccacctggcctgcgtggtggacgaccaccacatgggcatcagccacgtgctgcgaggctctgagtggctcgtctccactgccaagcacctgctcctctaccaggccctgggctggcagccaccccacttcgcccacctgcccctgctcctcaacagggatggcagcaagctctccaagaggcaaggggacgttttcctggagcactttgctgctgatggcttcctgcccgattccttgttggacatcatcaccaactgtggctcaggttttgcagagaaccaaatgggcaggaccctgccggagctgatcacacagttcaacctgacacaggtcacctgtcactccagccctgcatggacctggagaagctcccagaatccaacagactgagacctccagcggctggtgagcaatgagagccagaggcgcccactggtgggggaaccttgcaggcccttgtggaagaggcctttggttgccagctgcaaaaacaggggatgtccctccaccccaatcttacgtgggagaaggatccctcccggctgaaaaccgggtccccattttgccgccttgccgggaacttggtggtccccccggaataactcttgacctggggggaactcccccctgcgcaaaaaggtccaagcaccacggtgg

SEQ ID NO: 349950 - DNA, 598 bp, Homo Sapiens
cagattctgacagaacatcagaagtatatctccatgaagaattacagcaagacatgcaaaagtttaagaatgaggtcaacacattagaagaagagttcctggctttgaagaaagaaaatgttcaacttcataaagaggttgaagaagaaatggagaagcacagaagtaatagcacagaattatcaggaaccctaactgatggtactactgttggcaatgatgatgatggactaaatcagcagattcctaggaaggaaaatgaagagcatgacaggcctgcagataaaacagctaatgaaaagaacaaggtcaaaaaccaaatatatcctgaggctgactttgctgactcaatgaagccatctgaaatagcctcagaggattgtgaattgtctcactctgtttatgagaattttatgttgctgattgaacaacttagaatggagtataaagattctgctagcctaccaagaatccaagacacattttgtttgtgtgaacacttactgaaacttaagaataatcactgtgaccaacttacagtaaaacttaaacaaatggaaaatatggtcagtgtactacaaaatgagctatctgaaac

SEQ ID NO: 349951 - DNA, 1006 bp, Homo Sapiens
gctcggaggcgcacctgtgaggtgtccctgaggagagggagggcgccctgcgtccggcagaggaggcgagcatcccgctcaggtgatgaggaacccctcgcgcacccagcgcagaaggctgctgccgccggacgcctccattgtttgaccacaacaagggccggattctcacccaggatcctaaggcctttgtagtccttcagccactgtgggccctgcctctgcctgttcttctggaatgtcttgggggttttgatcctgtcactgtgacctgcaaatccaagagacacatctttggaacgataagagagcttcttcaagaccaaaaaaggagacggcatgatacccatgtagggaattccccaaagcagggcttgccatacctggaccccgaggagcctgcttgctggaaaggctttcctgtctgatgtgcaggaggcagaatgccaaactgactcttcaaggggcaactgcaggggctcgagaccagccagcagtatctcatccttcgatacaggggatatactgtacagtccttttttctagaagtgagacatacaagattactctacaagaggaagattccaggcgctcaaaaaacgcaaaggtttgcactttgagagccccttggaattgttgacaactcaggatctaaaaacaaagttctgtgttaatgagttacagaattcacgtggaagtcaatgtcactttataatcgataataatactgagtgaggaacactatgcaggaagaaaccttccgtagaaagacaggcagggaaaagcttaggctgaccttaaacttacctaatagagcaagcctgagatagactgccaaaatggccaaataagagactctatgaaataacagtcttgtaactgtagtaatcataaggaaattttctccttgaaatcacgatacccaataggaaaaatgatctacagtgccccatgtgtaggaattttcctctgagagagtctccgtcgaactgggatcctctgatca

SEQ ID NO: 349952 - DNA, 633 bp, Homo Sapiens
  misc_feature (549)..(585): n is a, c, g, or t
ttgcaataagacagcccgtaagcaatctagcaaccagaacagttcagttcggagcaggctcccggggagatttagttgttagagttcggcaagaaaggtttcacaaaggagctgagttctgggggaaatgagaggtgatgtggcggagagatggatccggacgggaaaatgtctgggagggggtatacggagttcatgagaagccggggacagtgaaaaaactgcagtcgagtcctggaaggggtgagaacgcctgcggaggcgggagtcagagggaagtggacagcgccggcagccggtttacctgggtgagaatccggcccttgttgtggtcaaacaatggaggcgtccggcggcagcagccttctgcgctgggtgcgcgaggggttcctcatcacctgagcgggatgctcgcctcctctgccggacgcagtgcgcctccaagtgaggggagtcagcgccccaggccgcgggcgccgcgcacccacctccctctcctcagggacacccgctctcgacgaattcgagctcggccgatttggcctgatnnnnnnnnnnnnnnnnnnnnnnnnnnnnnnnnnnnnncggccgccaccgcggtgagctccagttccccatagtgatcgtatcatt

SEQ ID NO: 349953 - DNA, 1238 bp, Homo Sapiens
  misc_feature (47)..(47): n is a, c, g, or t
  misc_feature (55)..(55): n is a, c, g, or t
  misc_feature (1070)..(1112): n is a, c, g, or t
ccttttgtcccagtttgggatgaaggaaaggaggaacaggcggtggntgtgtggnccccttgagtggagccatggaaggggtggcatggtgccactggggcctgtggctgtagtagccctgggccaggtaacctccagggccctgacttttccagaggctgctgccacctacttcttatcaaagaagggggagaacagttcatctgagtcagtgcacctcccctccagtctccactccctgaggatggaatcggggaaacagcatcctgccgcctcctctctgcctgcccactcaccggcaaggttgtccctctgcccagggctcagggccatgtaccagatctgtctgtgcccacccaggcacagccactgcctcccccttggctccctgctcctacccaggatagctccctatccgcctttggtcagagctgaagccatatacgactgggtgtttgtccccctactttggccccaggagtaaaaaaacttctccttttctcacttcctttcctgcctcgggaggtggcagggcagttccctggctgaggccttttgcgccccacctccaggaccaagggccattctagacagggtgtcttctaccaggacccgtccctagccttcctggcctggagggcctggtcttgcactggcagctgtaatacaaagggaactcgccccacttctcccagcctggtgctgtcctctcggcccaccatcggccaggtccagcgcttcctctggggctgacaacaggcccctgactcaccccggtcacctcccagggtccatggccagggcctctgtgtttggggggccacttgcccttcatcctgccaggcgctttgcccgccctgcctcagcctgggccctgtgcccttgagccctccacccctggcccaagacccccccaaactgtctgactctgtgtttcctgccctgaggagagaggggtcagattgcagcgggccgagtgccctctccgtcccctctcctcccacccacgccacaggccagcctactcttccctccatccatggccacacccccagccattttgtaccatnnnnnnnnnnnnnnnnnnnnnnnnnnnnnnnnnnnnnnnnnnntgaagacatcttcttggtttttattttgaaacaatttttaggcttgttccgggggtctctgtgctgcctgtactgtattgacctgttttataggtgcctttttattaaaaagaaaattcaaaatcc

SEQ ID NO: 349954 - DNA, 861 bp, Homo Sapiens
tggccattctggggggtttattctttcggggagggtaaaattaggttttttcccagtagttttttggaagttttcacctctgctcccatattttccaggtggtcccgttgtcagccagaatgaagtgggaatgcatgctgttgagaacagtgagcttgcccatgggattggacatggtctggtatggccggacaacatctcttccaaatgaggtcctcctggttttccacaattccccagggggcaatacctatggtgcatatctttcctcgagacttagaggcatgatccttcaaggcatcgccaacatgacgaataacacctgtgttaacccctccagtgaatatccacgctccagttgtcatagctgctttgatgagccctttcccaaagacttgcttgagttttggctggagttcaaagttctgcaggcccccatggacagagatgagaagcttgggaagctccaactgccattccttggtcatcaggtgtaagaggagatcaggttttgtatcaaaagatactcgcacatacatggctttgttggaatggccacctccttggaactcaatggtcccaaaagcatccgtagggctgagttgagtgtgtttgctgatggaccacttttcagactggatgtcatttcgggagaggcgactttcatttttctcattctgaagcacggagatactgggggtgaggccaacatgctggcctatcagacgcccacagcaacacctatgggggtctttggtgctgggtatgatgtggacacattctcttttataaaatgctctttctatccaggatttctgagcctgagcactgattctgggtgctggcaaaagcagccccgct

SEQ ID NO: 349955 - DNA, 767 bp, Homo Sapiens
gggattattaacggaatgaccagccctagctgcagcaaaatgaaagcaacaggagctgctccggggactgcttttgccagtacccagaatcagtgctcaggctcagaaatcctggatagaaagagcattttataaaagagaatgtgtccacatcatacccagcaccaaagacccccataggtgttgctgtgggcgtctgataggccagcatgttggcctcacccccagtatctccgtgcttcagaatgagaaaaatgaaagtcgcctctcccgaaatgacatccagtctgaaaagtggtccatcagcaaacacactcaactcagccctacggatgcttttgggaccattgagttccaaggaggtggccattccaacaaagccatgtatgtgcgagtatcttttgatacaaaacctgatctcctcttacacctgatgaccaaggaatggcagttggagcttcccaagcttctcatctctgtccatgggggcctgcagaactttgaactccagccaaaactcaagcaagtctttgggaaagggctcatcaaagcagcaatgacaactggagcgtggatattcactggaggggttaacacaggtgttattcgtcatgttggcgatgccttgaaggatcatgcctctaagtctcgaggaaaagatatgcaccatagggtattgcccccctggggaaattgtgggaaaacccgggaaggaccttccattgggaaagaagattgttggtccgggcccatacccagaaccaatg

SEQ ID NO: 349956 - DNA, 629 bp, Homo Sapiens
  misc_feature (37)..(37): n is a, c, g, or t
aagatggaccaatatcaccaaagaaaaagaagcccanagaaagaaaacaaaagagattggctgtgggagaactaactgaaaatggtttgacattagaagaatggtggccatcaacatggattacagataccattccccgaagatgtccatttgtgccacagatgggtgatgaggtttattatttccgacaaggacatgaagcctatgtcgaaatggcccggaaaaataaaatatatagtatcaatcccaaaaaacaaccatggcataaaatggagctacgggaacaagaacttatgaaaatagtgggcataaagtatgaagtgggattacctaccctgtgctgccttaaacttgctttactagatcctgatactggtaaacggacgggcggatcatttaccatgaaataccatgatatgcctgacgtaatagattgcctagtcttgagacaacaatttgatgatgcaaaatacaggcgatggaatataggtgaccgcttcaggtctgtcatagatgatgcctggtggtttggaacaatcgaaagccaggaacctcttcaacctgagtaccctgatagtctgtttcaatgctacaatgtttgctgggacaatggagatacagaaaagatg

SEQ ID NO: 349957 - DNA, 186 bp, Homo Sapiens
ctgagccactgcgcccagccaataccatgagttttaagcctcacatcgtcacttgctgtcactgccagtgcctgttttattcatattgctggacaacagacatatgccaccaattgtatgattaataaagtctttttctggcgcattttgtccattataaaggaaataaactaattgttaacttgc

SEQ ID NO: 349958 - DNA, 947 bp, Homo Sapiens
  misc_feature (524)..(581): n is a, c, g, or t
  misc_feature (747)..(809): n is a, c, g, or t
  misc_feature (825)..(874): n is a, c, g, or t
ggccaccatccgccgcacaccctccaccaagcccaccgtgcgccgcgccctgtccagcgctggccccatccccatccggccgcccatcgtccctgtgaagacgcccacggtgcctgactcccccggctacatggggcccacacgggcgggcagtgaggagtgcgtcttctataccgacgagaccgcctcacccctggcaccggacctcgccaaggcctccccaaagaggctcagcctgcccaacacagcctggggcagcccatccccagaggcagccgggtaccccggggcaggggccgaggacgagcagcagcagctggcggccaaccggcacagcctggtggagaagctgggggagctggtggcgggtgcccacgcactgggtgagggccagttccccttccccactgctctgtcggccactacctaacgagacgcatcacgcatgacccctatgaccccgtggctaaccaggcacaaacaacacataatacccacgtcaaccccacttcatggacctgctnnnnnnnnnnnnnnnnnnnnnnnnnnnnnnnnnnnnnnnnnnnnnnnnnnnnnnnnnngccgatcgaaccgcagcaaagacacacggcgcaactggggccaccaccacaggggcgaacaacggcgcacgatgccgaccaggagcgcgcgacgcgccgctgccgcacaccaccgacaaaaccacagccgcaccccttacctccaaaaacacacccaactcgctcnnnnnnnnnnnnnnnnnnnnnnnnnnnnnnnnnnnnnnnnnnnnnnnnnnnnnnnnnnnnnnnatgcgacctaactgannnnnnnnnnnnnnnnnnnnnnnnnnnnnnnnnnnnnnnnnnnnnnnnnnacaccgacagcagaaccttcaacagacccaaactaaccctatatcataaaattccaaatcatcaaaacaaact

SEQ ID NO: 349959 - DNA, 181 bp, Homo Sapiens
accctccgtcccatctgaaccatttgtttcttttctttccgtcagattttggaaaaattctcctctcctccccgccccctccacaccatcctccccgatttaaatatagtcactgctacaagtaacagatgcactgtgaagattccagtattaataaaggtgtactgtaattaacacccct

SEQ ID NO: 349960 - DNA, 886 bp, Homo Sapiens
  misc_feature (793)..(821): n is a, c, g, or t
tccccacatcactgagtcgaagactctatgacatgccctcagaatatcagaatcttcttagaaataaactaggaaatgcagatgtttttaactactcagacttttgaggaattaatccttttaaaacattttgttaaagttagtgtatcagtaagaaacagacctagtttaaaaggaataatcaacaattttataaaggagatggcttattcaaccatagcccctccaacatatctactggaaattctgctggttaactttatctctctctctcttaatttagactttcaacctatgaaaatgtaaatacctttgaaaaaactaaactatcagtcatttacatcttctcatgaatgaaatgcagtgtagggagaggagatggcaggacacagcaaacaggacacatttgcctgcttctctcttgcctaattcttcctgacctgtatttactgatgcttaataatacttgtaagactctaggggttcatttcccatttcagcggaaagtacttcactcaacaacaatattctcaagagtcttctactggaagctagaaagaaataggaatttaagtccatagaatgaaggtagttattcctgcctgtgttgcccacctgttcacaaaaagtacctttatgcttgaaaacattaggttctttggttactgcactgtagtttcaaatggatcctccagatggcattcatgtcttactcagaaagggcactgccattgtccccaaggcttctgtctactaattctattggtcttgtgttttgcttgattgcttggcnnnnnnnnnnnnnnnnnnnnnnnnnnnnntggagctattttctgtctatataaatctacttatatgaataaccattaaagtgattttgtatatg

SEQ ID NO: 349961 - DNA, 1484 bp, Homo Sapiens
  misc_feature (324)..(384): n is a, c, g, or t
  misc_feature (682)..(701): n is a, c, g, or t
  misc_feature (1406)..(1406): n is a, c, g, or t
  misc_feature (1436)..(1436): n is a, c, g, or t
  misc_feature (1450)..(1450): n is a, c, g, or t
  misc_feature (1452)..(1452): n is a, c, g, or t
  misc_feature (1455)..(1455): n is a, c, g, or t
  misc_feature (1458)..(1458): n is a, c, g, or t
  misc_feature (1460)..(1461): n is a, c, g, or t
cttgtgactctccttcatgcctcccgacgtcccccgggccgctttggtttaggtgggtttgagcgagaatttggactcgaagctgccctctcagccccagtgccagagcccccaaactccagggtgggaaaggggagtcccagccctgctccccctctcccccagtccccgcggcgggtgagtcacccgagcgctccctacttagtcctcaggcgctgcggcgcgtaccaagacgcggacgcagggggaggcagctagcgcggcgaactcctggagccgtggagcccgctcggccgtggccgtgggagaggcgccgggaggctnnnnnnnnnnnnnnnnnnnnnnnnnnnnnnnnnnnnnnnnnnnnnnnnnnnnnnnnnnnnngctgggtcccggggcgctgctggggtggacccccccgcctcgaacttggtacgcgccagagaggccaggcccagcccgggcggtacaatagggttgggccgaggccgggactgggccggcgccgggcggggaacgggttcgcgaccgcagccgagagaccccgggcgaccggcacctccgagactcgcgggccacctgcctcgaccttccccggagcgcccccgcctccgagtcgctacttgccgggccgggccgggccgggcgtgatgcgccgcgggacccctgtcctggccactgnnnnnnnnnnnnnnnnnnnntgagaccccgagacccccagtgacgccgcagccatggagagcggcccgcgtgcggagctgggggcgggcgcacccccagctgtggtcgccaggacccccccagagccaagaccttctccagaaggtgacccttcccccccaccaccaccaatgtcagccctggtccccgacactcccccggacacccctcctgccatgaagaatgccactagctctaagcagctcccactggaaccagagagcccctcagggcaggtcgggcctaggccagcccccccgcaggaagagtccccttcctctgaagcaaagagcagaggacccaccccaccagccatgggcccacgggatgccagacctcctcgaaggagcagccagccatctccaacagcagtgccagcctccgacagccctcccaccaagcaagaggtgaagaaggcaggagagagacacaagctggcaaaggagcggcgagaagagcgggccaagtacctggcggccaagaaggcagtgtggctggagaaggaggagaaggccaaggcgctgcgggagaagcagctccaggagcgccggcgccggctggaggagcaacgtcttaaagccgagcaacgccgtgcagccctgggaggaacggcagcggcagaagctcgagaaaaacaaggagcgctatgaagcagccatccaacggtcagtgaagaagacgtgggncgaaatccggcagcagcgctggtcctgggnaggggcctgcacananctntcnannaataaaacaatgggagaagtgct

SEQ ID NO: 349962 - DNA, 946 bp, Homo Sapiens
  misc_feature (861)..(861): n is a, c, g, or t
  misc_feature (868)..(868): n is a, c, g, or t
  misc_feature (885)..(885): n is a, c, g, or t
  misc_feature (898)..(898): n is a, c, g, or t
  misc_feature (901)..(901): n is a, c, g, or t
  misc_feature (915)..(915): n is a, c, g, or t
  misc_feature (940)..(940): n is a, c, g, or t
ccggagcaagggcggcagcaaggctcccagacctgtccccagcccagccatcagcaggggagagaaagcgaaaccctttcaggggtctccttgtgactctccttcatgcctcccgacgtcccccgggccgctttggtttagctgtggtcgccaggacccccccagagccaagaccttctccagaaggtgacccttcccccccaccaccaccaatgtcagccctggtccccgacactcccccggacacccctcctgccatgaagaatgccactagctctaagcagctcccactggaaccagagagcccctcagggcaggtcgggcctaggccagcccccccgcaggaagagtccccttcctctgaagcaaagagcagaggacccaccccaccagccatgggcccacgggatgccagacctcctcgaaggagcagccagccatctccaacagcagtgccagcctccgacagccctcccaccaagcaagaggtgaagaacgcaggagagagacacaagctggcaaaggagcggcgagaagagcgggccaagtacctggcggccaagaaggcagcgtggctggagaaggaggagaaggccaaggcgctgcggcagaagcagctccagcagcgcccgcgccggcctggaggagcaacgtccttaaagccgagcaacgccgtgcagccctggaggaacggcagcggcagaagctcgagaaaaacaaggagcgctatgaagcagccatccaacggtcagtgaagaagacgtgggccgaaatccggcagcagcgctggtcctgggcaggggccctgcaccacagctctccaggacataagaccagtgggagcaggtgctccgtgtcggnagttaanctgcccaaacacgtggnctctataatcaanaancggctctcaaagtnctctgccacgctctggaatcccccngtagaa

SEQ ID NO: 349963 - DNA, 1590 bp, Homo Sapiens
  misc_feature (260)..(317): n is a, c, g, or t
  misc_feature (489)..(543): n is a, c, g, or t
  misc_feature (842)..(842): n is a, c, g, or t
  misc_feature (931)..(931): n is a, c, g, or t
  misc_feature (937)..(937): n is a, c, g, or t
  misc_feature (945)..(945): n is a, c, g, or t
  misc_feature (949)..(949): n is a, c, g, or t
  misc_feature (962)..(962): n is a, c, g, or t
  misc_feature (1040)..(1040): n is a, c, g, or t
  misc_feature (1077)..(1077): n is a, c, g, or t
  misc_feature (1082)..(1082): n is a, c, g, or t
  misc_feature (1085)..(1085): n is a, c, g, or t
  misc_feature (1091)..(1091): n is a, c, g, or t
  misc_feature (1095)..(1095): n is a, c, g, or t
  misc_feature (1104)..(1104): n is a, c, g, or t
  misc_feature (1121)..(1121): n is a, c, g, or t
  misc_feature (1127)..(1127): n is a, c, g, or t
  misc_feature (1311)..(1311): n is a, c, g, or t
  misc_feature (1317)..(1317): n is a, c, g, or t
  misc_feature (1327)..(1329): n is a, c, g, or t
  misc_feature (1331)..(1331): n is a, c, g, or t
  misc_feature (1343)..(1344): n is a, c, g, or t
  misc_feature (1377)..(1377): n is a, c, g, or t
  misc_feature (1397)..(1398): n is a, c, g, or t
  misc_feature (1405)..(1405): n is a, c, g, or t
  misc_feature (1447)..(1447): n is a, c, g, or t
  misc_feature (1474)..(1474): n is a, c, g, or t
  misc_feature (1491)..(1491): n is a, c, g, or t
  misc_feature (1494)..(1495): n is a, c, g, or t
  misc_feature (1498)..(1498): n is a, c, g, or t
  misc_feature (1503)..(1522): n is a, c, g, or t
  misc_feature (1529)..(1529): n is a, c, g, or t
  misc_feature (1543)..(1543): n is a, c, g, or t
  misc_feature (1571)..(1571): n is a, c, g, or t
ggccggattcccgggattcccatcctggccaggcctgcctccccctgccccagcccagggccaggccacactctgcctccaaagccaccgtccccccgaggcaccactgcatcccccaaggggcgggttcggaggaaggaggaggcaaaggagagccccagcgccgcagggcccgaggacaagagccagagcaagcgcagggccagtaacgagaaggagtcagcagccccagcctcaccggcaccttcgccggcgccctnnnnnnnnnnnnnnnnnnnnnnnnnnnnnnnnnnnnnnnnnnnnnnnnnnnnnnnnnntgctcccccggtgacccctagcaaaccaatggccggcaccacagaccgagaagaagccactcggctcttggctgagaagcggcgccaggcccgggagcagcgggagcgcgaggagcaggagcggaggctgcaggcagaaagggacaagcgaatgcgagaggagcagctggcnnnnnnnnnnnnnnnnnnnnnnnnnnnnnnnnnnnnnnnnnnnnnnnnnnnnnnncaggaggcacgagagaaggcgcaggccgagcaggaggagcaggagcggctgcagaagcagaaagaggaggccgaagctcggtcgcgggaagaggcggagcggcagcgtctggagcgggaaaagcacttccagcagcaggagcaagagcggcaagagcgcagaaagcgtctggaggagatcatgaagaggactcgggaagtcagaagtttctgaaaccaagaagcaggacagcaaggaggccaacgccaacggtttccagcccagaggcctgtgaaaagctgtgggaggctcgggtcccncagggctgccagaaggaggctgttgcagaaagaggagccccatcccacaggagcctcagtggagtctcccaagcaaggagttgccagcntccctngtgaatgncctncagcctctcccancacaccaggagaatggcttctccaccaacggaccctctggggacaagattctgagccgaacacccagagacactcctnccctttgcagaggcagaagccttcctcaagaaagctntggtncantccccncagntcacagaantcctttaagagggtttnccttgnatccgggcacagttttgagggctcctctgcatcacctaccaggatgtctggaggagaaaaagacagaacaaagatggaagtggcctgggccccctgggggtgggtcctctctgttgtttttaatctgcaccttatagactgatgtctctttggccggagccaaatctgcccctcagtgcattcntgtgcncgcacgcccnnncntcccctctcccnnatacacacatatacactcacagcctctctggcntcttcccttggggaggggcnncctgtantatttgccttgatttggtggggtacagtggatgtgaatactntaaatagcttgtgctcagactcctctncgtggagagggtgggtncannagncagannnnnnnnnnnnnnnnnnnnggggagntcttcctctctctntttaactgtaactgagggggatcccagntctggggatgggggattcc

SEQ ID NO: 349964 - DNA, 2153 bp, Homo Sapiens
  misc_feature (451)..(512): n is a, c, g, or t
  misc_feature (1643)..(1665): n is a, c, g, or t
ctgggtggcgttttcaaaagagggtccccccgaggcacctttgcatcccccaaggggcgggttcggaggaaggaggaggcaaaggagagccccagcgccgcagggcccgaggacaagagccagagcaagcgcagggccagtaacgagaaggaggcagcagccccagcctcaccggcaccttcgccggcgccctcgcccaccccagccccgccccagaaggagcagccccccgcggagacccctacagacgctgctgtcttgacctcacccccagcccctgctcccccggtgacccctagcaaaccaatggccggcaccacagaccgagaagaagccactcggctcttggctgagaagcggcgccaggcccgggagcagcgggagcgcgaggagcaggagcggaggctgcaggcagaaagggacaagcgaatgcgagaggagcagctggcannnnnnnnnnnnnnnnnnnnnnnnnnnnnnnnnnnnnnnnnnnnnnnnnnnnnnnnnnnnnnacgagagaaggcgcaggccgagcaggaggagcaggagcggctgcagaagcagaaagaggaggccgaagctcggtcgcgggaagaggcggagcggcagcgtctggagcgggaaaagcacttccagcagcaggagcaagagcggcaagagcgcagaaagcgtctggaggagatcatgaagaggactcggaagtcagaagtttctgaaaccaagaagcaggacagcaaggaggccaacgccaacggttccagcccagagcctgtgaaagctgtggaggctcggtccccagggctgcagaaggaggctgtgcagaaagaggagcccatcccacaggagcctcagtggagtctcccaagcaaggagttgccagcgtccctggtgaatggcctgcagcctctcccagcacaccaggagaatggcttctccaccaacggaccctctggggacaagagtctgagccgaacaccagagacactcctgccctttgcagaggcagaagccttcctcaagaaagctgtggtgcagtccccgcaggtcacagaagtcctttaagagggtttgccttggatccgggcacagttgtgagggctcctctgcatcacctaccaggatgtctggaggagaaaaagacagaacaaagatggaagtggcctgggcccctgggggtgggtcctctctgttgtttttaatctgcaccttatagactgatgtctctttggccggagccagatctgcccctcagtgcattcgtgtgctcgcacgcgcagacatcccttctcccccatacacacatatacactcacagcctctctggcctcttcccttggggaggggccacctgtagtatttgccttgatttggtggggtacagtggatgtgaatactgtaaatagcttgtgctcagactcctctgcgtggagagggtgggtgcaggaggcagaccctccccccaaagccccctggggagatcttcctctctctatttaactgtaactgagggggatcccaggtctggggatgggggacaccttgggccacaggatactggttgcttcaggggtacccatgccccctgccctcgcctggaatcagtgttactgcatctgattaaatgtctccagaaataaagaatnnnnnnnnnnnnnnnnnnnnnnntaatcacaactacattaacataacagatatatatatctataaaggggggggcgcgcctctaaatagaattcccccaggggagcgccacaatttccgtgtatccccggtttttgttgtgcacaaagtgggcgcccctatatggggacaccgtattaataaacccgccattggcacgctggacagcggcgtgttttaaacacacacgtgttgataggcggagaaacactggtaccttcgaggctacccttgtgggaaaagacacaccccatacattcccagcgagggggggcacaactacattgtcgggcaacaccaacaccccctcccaaagagttttatagaaccgcccctaggggcgcatatcatcaaagcacttatcaggcacgtataaaacggtgtggtacaaccaaccgcacattattctgcacagccaagaaaaaattttcgtccacccaaggactagtagtgtctcgacacaacttattccg

SEQ ID NO: 349965 - DNA, 1250 bp, Homo Sapiens
  misc_feature (128)..(128): n is a, c, g, or t
  misc_feature (765)..(816): n is a, c, g, or t
  misc_feature (1203)..(1203): n is a, c, g, or t
cctcacctcttcagccgaactgcagattcgctggacacagcggaggtccttgcgcgcagccgctgtccgcggtcgtggggtatgtgcgcgcgcgccgcgtcatcgttaggtataggtcgctgtgaaantgcgcgcccttcggcgagtcctttgctacgcggtgcggtgtgaaaaagtacggagaggtgggggggagagaatggttggcgatcgggatgcttcgtgaccaaccgccacggagggaggaggggggagggaaacggagggtatcgtagggctggtcggcttctgagctagttaaaatttggcgatagggggacctcacgcgggagaggggcagtttttcctccttggttcggagtcgcagcgcggtcacactgccccgcaacggccgggaccaggccgtcccgggtgtgcccgcgctcggcctccgccagccccctgacgccgtgcagcgtcacccgaagcgtgcaccgctgcgcccccgccggtgagcgcggggagcgccgcaagcccaacgccgggggcagccccgctccggtgcgccgccggccggaggcctcgccggtgcagaaaaaggagaacaaggacaaggagcgggaaaacgacaaggagaagagtgtccctaacccgggagcgcagctctcaagaagcgccagtcgctgcccgccctcccccagtgccccgcccttttcgtcaggaaccgccctctgaagctcagcccccaaatccccgggccaggcccatccttctccctccaaaatnnnnnnnnnnnnnnnnnnnnnnnnnnnnnnnnnnnnnnnnnnnnnnnnnnnnagggccacaactcctggcccctccaaaaacccaccgggacccccccggaggggaacacctgggcattccccccaaggggcgcggggccattccccacgaaaagggccggagccacaaatgggaaaaaagcccccggcgattgacccgcgcttctttatggcacaaggaagaccccggaacaatggccgtaagggccacctcaccaaccccccgtgaccgatacaccagccctccccccggttctacgccgggggaaaaccttccgccccgcgggaaccccttataccgtccactccaccgcgccaggcagattcaatccccctacccctccccgacttaaccaaattcacgcgcccggattccccgcgcccgcgaggtgggtttttnacattagtaacctgcttccccccccgcatcgcggcccgcgcgctgtt

SEQ ID NO: 349966 - DNA, 691 bp, Homo Sapiens
  misc_feature (512)..(528): n is a, c, g, or t
cactgtttgccatttattcaggtgtgtgaccgatgtcggcagaaaactcgaagtaccaaaaagttgacagtacaaagattccctcgaatcctcgtgctccatctgaatcgattttctgcctcccgaggctccatcaaaaaagttcagtaggtgtagactttccactgcagcgactgagcctaggggactttgccagtgacaaagccggaagtcctgtataccagctgtatgccctttgcaaccactcaggcagcgtccactatggccactacacagccctgtgccggtgccagactggttggcatgtctacaatgactctcgtgtctcccctgtcagtgaaaaccaggtggcatccagcgagggctacgtgctgttctaccaactgatgcaggagccaccccggtgcctgtgacacctttaagctctggcacctgtgaagccctttaaacacccttaagccccaggctccccgtttacctcagagacgtctatttttgtgtctttttaatcnnnnnnnnnnnnnnnnntggttgtagctccattattttttttattaaaaaatacccttccacctggaggctcccttgtctcccagccccatgtacaaagctcaccaagcccctgcccatgtacagcccccagaccctctgcaatatcactttttgtgaataaatttattaagaaaaaaaa

SEQ ID NO: 349967 - DNA, 2838 bp, Homo Sapiens
  misc_feature (2352)..(2360): n is a, c, g, or t
ggtaccggtccggaattcccgggatcggtggccgggcgggaccaacaaagatggcggcggcccctgcggcgggagcgatctgggcaacggctgcggctaaagctgcagccgggcccacgggggggctgcacgggggtagtagggggtggccctgaactggggcctggccctggctggcctctcccgccgcctcactgggggacaggtccagcctgtggtgtccacaatgccccaggcctctgagcaccgcctgggccgtacccgagagccacctgttaatatccagccccgagtgggatccaagctaccatttgcccccagggcccgcagcaaggagcgcagaaacccagcctctgggccaaaccccatgttacgacctctgcctccccggccaggtctgcctgatgaacggctcaagaaactggagctgggacggggacggacctcaggccctcgtcccagaggcccccttcgagcagatcatggggttcccctgcctggctcaccacccccaacagtggctttgcctctcccatctcggaccaacttagcccgttccaagtctgtgagcagtggggacttgcgtccaatggggattgccttgggagggcaccgtggcaccggagagcttggggctgcactgagccgcttggccctccggcctgagccacccactttgagacgtagcacttctctccgccgcctagggggctttcctggaccccctaccctgttcagcatacggacagagccccctgcttcccatggctccttccacatgatatccgcccggtcctctgagcctttctactctgatgacaagatggctcatcacacactccttctgggctctggtcatgttggccttcgaaacctgggaaacacgtgcttcctgaatgctgtgctgcagtgtctgagcagcactcgacctcttcgggacttctgtctgagaagggacttccggcaagaggtgcctggaggaggccgagcccaagagctcactgaagcctttgcagatgtgattggtgccctctggcaccctgaactcctgcgaagtgttggaatcctactcgattccgagctgtcttccagaaatatgttccctccttctctggatacagccagcaggatgcccaagagttcctgaagctcctcatggagcggctacaccttgaaatcaaccgccgaggccgccgggctccaccgatacttgccaatggtccagttccctctccaccccgccgaggaggggctctgctagaagaacctgagttaagtgatgatgaccgagccaacctaatgtggaaacgttacctgggagcgagaggacagcaagattgtggacctgtttgtgggccagttgaaaagttgtctcaagtgccaggcctgtgggtatcgctccacgaccttcgaggttttttgtgacctgtccctgcccatccccaaggtgggattccagaggattccggggtggacaggacaggggctctctgacccaagcctacccacccccagagtgtgggcgggaaccctgtgggtttctggagcagaactgaagcctggattgattgagaacgagttggaaaacggaaattcagaacatgttgacctttcttcccctttttcccccagaaaggatttgctgggggcaaggtgtctctgcgggattgtttcaaccttttcactaaggaagaagagctagagtcggagaatgccccagtatgtggaggttcacaagggatacagtaagggtgggagacctggggggactccatgtggataaaagggattgcatgatgtcttcatatggggaataatatttatgtatctgggtttgtgttggagtctcagatctgttctagtactcctagagcaaaggggagaagccaagaggatccagctgtaatgaagagcatactaaatttgtatgtggatcggggtgtcagaaaagccaattgaggttaggagcatattaacctaacactgtttgccatttattcaggtgtgtgaccgatgtcggcagaaaactcgaagtaccaaaaagttgacagtacaaagattccctcgaatcctcgtgctccatatcctaatcttcagattcttacttctcttaggatacctcccatacattctctttcctccatgtttccagagaattgaattttccttaggaaaagtctgccacccacttttccacaagatgctcccagtgtgccgggaatggggagaggaccactttcaagatagaaaaacttcccctcaaagggccactgccttcccaaatgctcctttaaccaagggctttagattctgaattcgcatttttctggcctcccggaggcctcccttccnnnnnnnnngtttcaacctaaggtgttaagaacttgttccccctggccaagcggagatggagcccttaggggtggacattttgacccaatttgaacacaaggcccccggttgaaatcctcgggatgggggggaaaaatgcccccctaccggggagccacaaagggaaagtggtgggggcgaccaaggcctctctcaatcatatatacaaactttgggattccacttagtccccaacccccgcgcacagagtaagcttcctctgtgatatacccaaggctgtgtatatgcctctcttttggtggcaacgctcccttcccagcgcgcggcggggtgcccaacattttggggctccacattttaccaacggcgcgccttgagtggccgcgggtgtcgccacgagacacttgagcttagtggccgtatctgcacatcacctcaatttcgatatctcccctcctcggcgttcctccaccgccttgctctgca

SEQ ID NO: 349968 - DNA, 792 bp, Homo Sapiens
  misc_feature (65)..(82): n is a, c, g, or t
tggagaccaaggagcctccaggtggaagggtattttttaataaaaatataatggagctacaccannnnnnnnnnnnnnnnnngattaaaaagacacaaaatagacgtctctgaggtaaacggggagcctggggcttaagggtgtttaaagggcttcacaggtgccagagcttagaggtgtcacaggcaccggggtggctcctgcatcagttggtagaacagcacgtagccctcgctggatgccacctggttttcactgacaggggagacacgagagtcattgtagacatgccaaccagtctggcaccggcacagggctgtgtagtggccatagtggacgctgcctgagtggttgcaaagggcatacagctggtatacaggacttccggctttgtcactggcaaagtcccctaggctcagtcgctgcagtggaaagtctacacctactgaactttttttgatggagcctcgggaggcagaaaatcgattcagatggagcacgaggattcgagggaatctttgtactgtcaactttttggtacttcgagttttctgccgacatcggtcacacactggggcattctccgactctagctcttcttccttagtgaaaaggttgaaacaatcccgcagagacaccttgcccccagcaaatcctttaggcctggcacttgagacaacttttcaactggcccacaaacaggtccacaatcttgctgtcctctcgctccaggtaacgtttccacattaggttggctcggtcatcatcacttaactcaggttcttctagcag

SEQ ID NO: 349969 - DNA, 649 bp, Homo Sapiens
  misc_feature (88)..(104): n is a, c, g, or t
gtgagctttgtacatggggctgggagacaagggagcctccaggtggaagggtattttttaataaaaaaaataatggagctacaaccannnnnnnnnnnnnnnnngattaaaaagacacaaaaatagacgtctctgaggtaaacggggagcctggggcttaagggtgtttaaagggcttcacaggtgccagagcttagaggtgtcacaggcaccggggtggctcctgcatcagttggtagaacagcacgtagccctcgctggatgccacctggttttcactgacaggggagacacgagagtcattgtagacatgccaaccagtctggcaccggcacagggctgtgtagtggccatagtggacgctgcctgagtggttgcaaagggcatacagctggtatacaggacttccggctttgtcactggcaaagtcccctaggctcagtcgctgcagtggaaagtctacacctactgaactttttttgatggagcctcgggaggcagaaaatcgattcagatctaagcctggttaaggagcatttgggaggcagtgggcctctgaggggaacttcttctatcctgaaagctgtcctctccccactcccgaccctcgtgccgattaaccacccagcctcgtacctagccgtaggtt

SEQ ID NO: 349970 - DNA, 585 bp, Homo Sapiens
  misc_feature (103)..(103): n is a, c, g, or t
  misc_feature (194)..(194): n is a, c, g, or t
  misc_feature (196)..(196): n is a, c, g, or t
  misc_feature (526)..(526): n is a, c, g, or t
  misc_feature (549)..(549): n is a, c, g, or t
  misc_feature (556)..(556): n is a, c, g, or t
atgatgaccgagccaacctaatgtggaaacgttacctgggagcgagaggacagcaagattgtggacctgtttgtgggccagttgaaaagttgtctcaagtgcnaggcctgtgggtatcgctccacgaccttcgaggttttttgtgacctgtccctgcccatccccaagaaaggatttgctgggggcaaggtgtntntgcgggattgtttcaaccttttcactaaggaagaagagctagagtcggagaatgccccagtgtgtgaccgatgtcggcagaaaactcgaagtaccaaaaagttgacagtacaaagattccctcgaatcctcgtgctccatatcctaatcttcagattcttacttctcttaggatacctcccatacattctctttcctccatgtttccagagaattgaattttccttaggaaaagtctgccacccacttttccacaagatgctcccagtgtgtcgggagtggggagaggacagctttcaggatagaagaacgttcccctcagagggccaantggctcccaaatgctcccttaancagggcntaagatctgaatcggtttttctggctccc

SEQ ID NO: 349971 - DNA, 3751 bp, Homo Sapiens
  misc_feature (3669)..(3705): n is a, c, g, or t
ccgccccggcacctgcctgctcttctcgcgtggtcggaccgcgatgcgcgggggccgacgggtcgccgctgcgccgggccgggatggcggccaccgcgctgctggaggccggcctggcgcgggtgctcttctacccgacgctgctctacaccctgttccgcgggaaggtgccgggtcgggcgcaccgggactggtaccaccgcatcgaccccaccgtgctgctgggcgcgctgccgttgcggagcttgacgcgccagctggtacaggacgagaacgtgcgcggggtgatcaccatgaacgaggagtacgagacgaggttcctgtgcaactcttcacaggagtggaagagactaggagtcgagcagctgcggctcagcacagtagacatgactgggatccccaccttggacaacctccagaagggagtccaatttgctctcaagtaccagtcgctgggccagtgtgtttacgtgcattgtaaggctgggcgctccaggagtgccactatggtggcagcatacctgattcaggtgcacaaatggagtccagaggaggctgtaagagccatcgccaagatccggtcatacatccacatcaggcctggccagctggatgttcttaaagagttccacaagcagattactgcacgggcaacaaaggatgggacttttgtcatttcaaagacatgatgtatggggattagaaagaactcaagacactcctgcttgatacagaacaaaaagagcttaacaggaccaacagggcttaagcccagacttgacgtaacagaaatgtgccaataggtaataggtaatttttctttctctgacttgttttgttttcttgaaataacactgttgtgtggctagaaaggaaaagatttagtgtggcttgtattcatgggatacaggacagggatggggctatcatcttttcttgaatagggctaaagaagtattttaacaaaaatctattatgtacctaatattgtgcctaataatatttagcaccacaactcaaaaaacatttagcacttaaaaaaaggagactcacctctggctctttgccactgtcagaatctgaatctcactggccctgtggagtagggatcctatctggagaagtgggagcatgggctgcagtcaggactgctgcagactgagccatgtgatggtacgtaatgagttcccctgagggaatgaaacaccctcaccccttcaaagtcacccctttggaattcaacacagacacacatatcccttcaaaaacttttatttgtatcaacagttcctagctcttgacttagcttagagcttttaaaagagcagacaccttatatatttgagattgaaaaagtttctgctattaatcagaaataatcatttctattttctggcttaccccttggaataagccaaaaataaaaccaaagttacatttcctgacagatggctaagaaaacaatagaaggaacatcctgaattctagagttgactcttgctggtgaagtacaccttcagcttagtccattctcctaagtaaagcctgaaggaaaactcttaacacctaattctttgtggaaaaatgatcaactagccatttcacaggctatagaacaaaagtacaattgggcatctttccttatgtcctgggatcaggggtgcttacatttaacattgatcaggtaaagaggagaggctgtgcctaaggtctgagaaaaggcttgctctaagcaagctgtggtgaggcacaggatgactagggaatggcagagaacaggctggcctactgtcagttcaagcaaccagctgagcagcagcagtctaaaaagccccaaacagaacacctccatggattcagggaagggctgaggcactgcctttctagtatgtgccaaaaaaaacataactctgaattggggcccaggggactttgagtttgtatggggagggaaaaggagtgagcagttctcctcccctccccacagccttaggccaacacaaactgcaaattggtaagcagcaccttaatacctcttgtgacagttacggctgaagtggcagggtcaagcttgtaggtgttggcatccccctttttatatcggtcccggaagacatagatgctcccgttacagctggcaatcttccagagggatggggcagagctccaggcctcaggaaggcaaagccgggtgaagctgtctagcaagggattgtagcacaccagggagtccccttcagccacgatgaacaccagatctttatgcacagctgcgtgcatgcggcctgcaaagggcagcacatagggcttcacatggcatttgtctgtctctgtgtcaaagcactggatgagtcgggaaggtttggtaaagaagtccagatcattctcctccccccctagtaagtagatgatcccgttgaggttggcaccagcagcccctgacacagccacctctagctgagttgtctctgtccacacattatcacctacgcgataataaatgactgcgttggagagggtatcttgcagtgtctgtgccacccagtgaatatatggcatctttcccgggcacagacaccagggtgtgctggagccggtcccgaggcaaaggagcacaccacccccagtcaacggtggaattgttgcacttccacatgcgccgtgggatggacccccccaccacatacaagtctccaccatgcttgcaggccgcagtgatctggtggcacaaactgttttggccacttacactgatggagtcatcttctgcacagtgcaaggacacagccaacgagtgggtacgagatgactctttcccaatcaggtaaatgtgcacattctccccaatttccttcaagcttgtcctgagtgactctgcaaaagcctctctttcctctttattaaagttgatccaggcttctattgcctctgttgggttctgagaacacggaactccatccgagatgatatctgtgagtaagcggtggggcaagtggagaaattcctctgtattctgcagctgggccaggtgggtcttggcacagtgcttggcagccgtatagagctcaggatcactgtgccgatctgccagccacatcacctgaaggcagtttcccacttgcactgtgcgggccaaaaaccgagagcattcctcaaagagagatgtcagctgatacatgtctgacacctcataaatttcctgcaactcctcagctcgaagtttcacagtcccatggtagatataatcaaccaggagctggaaaacagactcgctgacatcctgcagcacaatcacccggttgtgggcctccttcaggttggaagtgaacatggatcggaagaagcagctctgagctgagaggaccagccgatggagctgaaactcccggccttccaccgaaatggtgacatcagcaaagagctcctcctctagacacagtttcatgatgccttgagccacacggcctgaatgtgaccgatctttgaaagtgtagttcacaaagtagttctcatccatggatgctccaggctcctctggtgattccatgctagccaacttctctctctgccagctgtctgcgttccctcctttcatcccggagcccggaacctccgcttccggctccacccgctctcgacgaattcgagctcggccgatttggcctgatnnnnnnnnnnnnnnnnnnnnnnnnnnnnnnnnnnnnncgccgccaccgcgttaatccgagtgcctatagtgatcgtatacatc

SEQ ID NO: 349972 - DNA, 911 bp, Homo Sapiens
  misc_feature (866)..(866): n is a, c, g, or t
ggggccgtcacccggtgcgaacccgcgagaggcctagtgcagctggcagccccgccccggcacccgcctactcttctcgcgggtccggaccgcgagcgcgggggccgacgggtcgccgctgcgccgggccgggatggcggccaccgcgctgctggaggccggcctggcgcgggtgctcttctacccgacgctgctctacaccctgttccgcgggaaggtgccgggtcgggcgcaccgggactggtaccaccgcatcgaccccaccgtgctgctgggcgcgctgccgttgcggagcttgacgcgccaggtgagccgggccggggagccagggcccctgccccgtccccgccgctccgtccctgtcgggccgctggggtctccaccgtctttgctgagccacctctttgcctcggcagctggtacaggacgagaacgtgcgcggggtgatcacaatgaacgaggagtacgagacgaggttcctgtgcaactcttcacaggagtggaagagactaggagtcgagcagctgcggctcagcacagtagacatgactgggatccccaccttggacaacctccagaagggagtccaatttgctctcaagtaccagtcgctgggccagtgtgtttacgtgcattgtaaggctgggcgctccaggagtgccactatggtggcagcatacctgattcaggtgcacaaatggagtccagaggaggctgtaagagccatcgccaagatccggtcatacatccacatcaggcctggccagctggatgttcttaaagagttccacaagcagattactgccacgggcaacaaaagatggggacttttgtcatttcaaagacatgatggatgggggattagnaaggaactccagacactcccgctttgaacccgaaccaaaaagacc

SEQ ID NO: 349973 - DNA, 949 bp, Homo Sapiens
tctaggtacgaggccggagtgttaattcggcacgaggccgggatgaaaggagggaacgcaggtgagaaagcgagacaggcaggtagggaaatcgtgaggtgagcgtggtcctagctccttgtggcagagcctagagagaaggcgaggacgctgaagaaccaggcggacagctggcagagagagaagttggctagcatggaatcaccagaggagcctggagcatccatggatgagaactactttgtgaactacactttcaaagatcggtcacattcaggccgtgtggctcaaggcatcatgaaactgtgtctagaggaggagctctttgctgatgtcaccatttcggtggaaggccgggagtttcagctccatcggctggtcctctcagctcagagctgcttcttccgatccatgttcacttccaagcctgaaggaggcccacaaccgggtgattgtgctgcaggatgtcagccgagtctgtctgccagctcctggctcgacttatatctaccatgggactgtgaaaccttcgaagctgaggagttgcaggaacatctatgaggtgtcagacatgtatcagctgacatctctctttgaggaatgctctcggtttttggcccgcacagtgcaagtgggaaactgccttcaggtgatgtggctggcagatcggcacagtgatccttgagctctatacggctgccaagcactgtgccaagacccacctggcccagctgcagaatacagaggaatttctcccacttgccccaccggttactcacagatatcatctcggatggagttccgtgttcctcagaacccaacagaggcatagaagcctggatccactttaataagcaggaaagagaaggcttttgcgagagtcctccggaccagcttgaaggaattgtgggcaatggcctttaccggttgtgcgaaaagctcgtcccaa

SEQ ID NO: 349974 - DNA, 463 bp, Homo Sapiens
tattgtctgtggctgctttcctgctacaatggagagttgaatatttgggacagagacctatggcctgcaaagctgaactatttaccatctggctctcaagaaaagggaaaaaaatgcttatctttgtaccccgacagtcttagattaagagtactttgtaccaccctgacgtcccaggcagccatgagtccagccacccctgaaatgtacacaagtctgggctagggttgcagcaggtgagtcccaattttgcagatctttggcatcaggggcacaacccaggattttgagtggggtttcctcaccattgtggctgggcactgggctagtgtgctttctgatttttgtatggggaagagaaaggagggaggaaatggcaacttgttgccctgttctaacattttcctaagatgggtctccaggccagggcttgggatctcaccttgcacagcttacaaaaccc

SEQ ID NO: 349975 - DNA, 1067 bp, Homo Sapiens
gaatgaatgattacatccttaacagaaaacctgggtgtataaataatacagctgaaagaaacagaagtgtacaccttccaacaacatacactcccaaccacttgtgttgtttttggcaacaaccaaaatgccattgcttgcacaaaaagtaaataaatgatcatatgatggcaacattcatcataagagagccagtaggcagtgactgtaagcatcacagccaccaattatgtcattttagaattgtgagcaaattcacaagaacacacagtgcaatttttagctgcatacatttcttctgagctccaactcagcaatatgcaatcttgacatcaaagcattagccaaatatttgaggaaattttcttactaaaataccaagtatctgataaatcaattttaccaaaatatataaacatatagaaggataagtgcatttagtagaaatacttacaataaaaaaatctcttaaaatctatgagccattcaatgtatacacaacgcaagaagtggcaataaggctatgattacagctccaggtcctgactgacctcgccaagttccatacacaatatattttttaatgccatgtgattgcagtgtgtgtgcgtgtgtaaggtgggagtgatattcacacatatgtagttctgaacatctacacaaacggcatgcacattgttgagaagttatctgttctcttattgcatacatcttactcactgttgaatccctagcagttttggggttgggttagggtcaagcataggaaatcatcatatttctttccttctccactcttgaggatctggaatcaggtcacagactgtgctgggtccacacgcttacatatgtgaaccttcaagtaactaccattccctcaataggcccacatagacaccacggacaagcaaataaggaccctctgtctaccataaatagaacttgatgctttcactttccaggagaagctgattctgtcggctttctctttgcccctccaacttcttagttgggcctattctatgctgctacttcaagtatactcaaatgtgttttgtccggggttg

SEQ ID NO: 349976 - DNA, 2243 bp, Homo Sapiens
  misc_feature (292)..(389): n is a, c, g, or t
ccaaagacaggcatccccagagacatcagcttccccagatgggtcacaaaatctggtttatgagacagaacttctcaggacccagctcaatgacagcttaaaggaaattcaccaaaaggagttaagaattcagcaactgaacagcaacttctctcagctactggaagagaaaaacaccctttccattcagctctgcgataccagtcagagtcttcgtgagaaccagcagcactatggtgaccttttaaatcactgtgcagtcttggagaagcaggttcaagagctgcaggcnnnnnnnnnnnnnnnnnnnnnnnnnnnnnnnnnnnnnnnnnnnnnnnnnnnnnnnnnnnnnnnnnnnnnnnnnnnnnnnnnnnnnnnnnnnnnnnnnntgagccacggcgcccggcccagacttaacttttaagaggagaaattcaagaatgagaatctgggagaaaaatctaatcaagacaagagttttatgtaggggccactaaatatagatgttgctccaggagctccccaggaaaagaatggagttcacagaaagagtgaccctgaggaactaagggaaccgcagcaaagcttttctgaagctcagcagcagctacgcaacaccagacaggaagtgaatgaattaaggaagctgctggaagaagaacgagaccaaagagtggctgctgagaatgctctctctgtggccgaggagcagatcagacggttagagcacagtgaatgggactcttcccggactcctatcattggctcctgtggcactcaggagcaggcactgttaatagatcttacaagcaacagttgtcgaaggacccggagtggcgttggatggaagcgagtcctgcgttcactctgtcattcacggacccgagtgccacttctagcagccatctactttctaatgattcatgtcctgctcattctgtgttttacgggccatctatagacttagttgttactctttggaccactcccctcaaaacttggaattctctcacctctaacatcagaacatcaattccagtggaacagtcttcccatttacaggtcttctctccaactcttcacggaaagtgcctgcaaaaacagaggtggatacgaggacaggttggagctgcagggactggcgagtctgctttcttctactgccctgagcctgaacgcttctgcttaatctgagaatcacatttggtttgttgagcctaatatttgttgagattttgcaggaccctgatcttttgtggtcctgtaaaagatactgaggaatgtctttcagccaagccaagaggatggtttcaataaacctaataatctgaagttcagtatcattttgattgataactttctttgccttgtttgcctgtattttctcctgtttcagggggaaggtggctctgccataaaacagagttcagggaaatgaacatgtcacctcataggacaatctgatttaggtctcttgcagaatagggtggtgaaagctgaaggaactccctaggggttttagctgttagatcacatgggaggacagcatcttcttccctgccaatttcagatataattggagggagaatttcaggtcttagactataaggatagaatccctttgcttttgcccttgatcacatgtatactaaggtattaagtggcccaagtctttcctttcaccaaagggcagggagaagtgtctatggacagcagggttccaattcttgtcattccaggaatatctgaatattcctggaatgtggaccctgagacagtgctcaggggccactgggagccaatattaggcattgactctcagccaggagtctgactggtctaacaccacactgcaactcctgacctcttgaagtactaagctactttgctgttagtgacagttattacagtttctcagccccattgtctctgccctctgtggcaatggaaggagaatatagagaagacaaaattaaatatagatagacctgagaaggacagccaggatagaattccatttgtgcctattccctgcctcccctcccctcccccatcctaccagttggttattttctcattgcatacgtgatgtgttcactgcctagcctctccctaaagaagagagaagacaagtgggctgactgatctgctctaaatctactgtggtgattaaatcttggttacaacatcctgggaagtttcctgaacaactgtaaaataataaaattattttcagaatgaag

SEQ ID NO: 349977 - DNA, 443 bp, Homo Sapiens
  misc_feature (149)..(149): n is a, c, g, or t
caggccctctatagtaggccctatcctacagaaaagcattaagtccttttctccccactcatgtctcctaggctacaatggaaagtcccaaagatgcttgttgaacaatgcacctatcaaaagagatgcccccaaatttttaaaaaatnattttagtcaatttggtataaaagaaaacttggagccgggcgcagtggctcacacctacaatcccagcactttatctcctctatgagatttcaccttttaaaaaaaatcccttaccatattatcacatacaacaggcaattcaaaataacattcgtaaaatgggtgtcctggaaactcaacataattctagtctaagctcagccagcaaccaggaggatattgaactctgggctggggagactatttgccatcccattatctttccctcaactttcctattttatctataaaat

SEQ ID NO: 349978 - DNA, 1046 bp, Homo Sapiens
ggattaccttcttggtgacctcccccaccatcttgtctcacttggaaaccgttgtcagtttatttactatgcaatagacattcattgttttgtatccagctagctttggtttaatatgccactgctttgtctttctgttacacatacagttttgatttatttacaatatatgctgtgccattttgatttttatattgtttggttggttgaataaatttgcgacactcaaacacttgaggtgatagttgttaaaaacaataccagtatttgatccagtttcatctcaactatgttatacctggacattttagatgtttatcaaaggtcttttatggggaagaaagtaaatgtatgaaataataaatgtgtgacatttatagggaatgttggctctgaacaaacttttgaaaacttggttgacaaaattttggatcaactgaaaaaaagcatgacttttgaaatctctgaatgccttggttctcagtattatcattctttattgaatttatttcttattaaaatatgtagtttttaagactttttttctgacagtattatgtaattttttagcgtgggtagatgggagtgtcgcttgtatgttatcgtacagctgacatgtatttttgtctattctttattatcttagtttcatgctatgtatgtaccataaccaacctattgcctatgagaaacatgtaagataatgtatttacagccattgttacaagtttataatgtatttttctatcttgttttatatgtatgttatataacattcaaaaagaatttttttcttgattgagaaaaggatacaaaatgcaaaatccacaattttgataactgaaaattgccaattgttttgcagtactttattatattgggtgtcttgtcttttttgggcttttagttagctaatgaatgaatacattagacacttttgggttttagttgggattttacatagcttgcattttaattctttggttctttgctgtttctattaacccacagcattattttaataaatgttataataccaacctact

SEQ ID NO: 349979 - DNA, 756 bp, Homo Sapiens
  misc_feature (241)..(253): n is a, c, g, or t
  misc_feature (597)..(660): n is a, c, g, or t
aataggaaaaatgacaacgtaaatcacattttccttttctttactagtaatgaactatggcaatccatttgagaaagcaccagccaaccgtacaagtcatttcagcaccctttgctcttcaaaactgaccatcttttatatttaatgcttcctgtatgaataaaaatggttatgtcaagtacagacgtcagcaacgtgtcagttggtgtgaatttatgatgtgttcctaagtcaacagagnnnnnnnnnnnnntctctcatgtgaataaaatctaaggatgaaaaactatcctttgataattatcacaaggcaaaatcaaccaccttttcatcagtactagtgtggaatggaaatttctttattaatactttttatgggaatgttttaaaggcataggtataaatgcacatgcaatcagcttgcccctcttagatactaacttccccagcttcactcctccttttcactggaacaagctgctgaatccctaactccaaagtctgcagtgcttggtgagcatttttaaataaagattatatgtgattttcactttttcacaaaaatgaagtacagagaagactgaaaagcagtgagannnnnnnnnnnnnnnnnnnnnnnnnnnnnnnnnnnnnnnnnnnnnnnnnnnnnnnnnnnnnnnnactggttcgtgatgattgatagtaaatcacaaaaacaaaggacagatagggccaagaccgaagggaccaccagaccaccgagccccaatgtgcccc

SEQ ID NO: 349980 - DNA, 2280 bp, Homo Sapiens
  misc_feature (1930)..(2006): n is a, c, g, or t
  misc_feature (2189)..(2198): n is a, c, g, or t
aacactggctttctctggaaaagcttcctcagctggaagctttactccctcctcgacagaaagtgaggattacagatgacatggatcaggtggagctgaaggagttttgtcccaatgagcagaactggcgtcagcacagggaggcctacgaggaggacgaagacgggccccaggctggagtgcagtgccagacggcatgacgtggtgcggggcagcgtggcccgaccggactagcacatgatgaatgtaaagttggcacaatgaaaatgacatcgctttaatggccttgtgtttgggatgtcctgtgtatgtgttcagcattcttaattgctgagtgtctttttggcttttcttttggttgtaacttaagttatagcttaatttatatttaaatgttttaagtataaatcacctctagtctgcatatggaatctgttcatttctattttcaggatatacttttgagatgtcagtgattgcaccaacactttgtgcttctagtggctttgcataattcagtgtcaccaataaggcacagcccagttagcagcttagcccccctagcaaaccccaaggcacaaagtgggcatcctgactcatctctaggtctgtggtttctcccctcttcccttggcagagttattgagggcatgatctcagggctgctaagataacatttctgaggattctagatgatcctcttaaagaataaaagcacatccgtggatcggacatggctgcatgtgcctgcttaacagggccaacttagttcctactgttctgtgcccttcagtggatggaacgtgagtgtctgatcatctctcttggaagttttctgaaccttccaagctctgtggtgaggacaaaccagtgtttgaatcatatgctgataactgtttgcctgtgaccctcacaccttgttcttcagggttttaatgattttctgttgacaacttttgcaatgctttcccaccaaagtgcttacttgtaaagaaaactaaatccttctgtgtccccggcagcctcagtgcagcaacagaagccaagggagaatgctgctggtttggcccatggcacagccagcttctctgaccagtaatccggggtgacttgagggtctgcaaaggcatagaactccccagtgttttccacctcattctcccagattgagctcccttccaaaggatcgttcctctcattgcacagccatattacaaagggtttcctgctcaagtgatgttttggtaagaacttcgctgagttccactgtggattacagtttgtatggactactactgtaaattatagcttgtttggagggatattagtcattattttattcatgacaggtagactacaattcgaacttagggttacctcagtctttagccattactgcttatttcttttccccaagtcacaaaaaacttgtaagctgctgggttaaagcagaggccacctgtcagatctaccctacccttatttggttacatggcacctgagagtttcactcagaccagggatcttccttaggagggtcaaagtgcagatcagaccatgcaggtaaggtgaaccagctgcacggaccaggttcccgcaaaacattgccagctagtgaggcataatttgctcaaagtatagaaacagcccacctgtgcccactttgaccattggtgaggatagatataaaatcacttcttccaacgaagcctaggtgaaaatctatttataaatggaccacaactctggggtgtcgtttttgtgctgtgacttcctaattattgctaaagaactactgtttagttggtaatggtgtaaaattacattcagctccttcttgtcatataaaaggaatttggagggtgtcgcttaaaattttattccacctgtacatttgtcactttaaaattaaaattgagctggtatgagnnnnnnnnnnnnnnnnnnnnnnnnnnnnnnnnnnnnnnnnnnnnnnnnnnnnnnnnnnnnnnnnnnnnnnnnnnnnncagggggggcccctttaaaaaatcccccgggggggcccaatttacccccaccccatttttttggaaaaagggggccccaaaggggggccgattaaaaactagggcctgggccccctttttaacccccccggagtgggaaaactgggaaccttgggaattttggggaggggaactttctttttnnnnnnnnnnccaaaatggggccacctccccccccagaaatttaagccctctagggggaaaaataaaaattttttaagggttaaaggggggg

SEQ ID NO: 349981 - DNA, 1620 bp, Homo Sapiens
  misc_feature (726)..(734): n is a, c, g, or t
agctatttgtctgactgaaagctaaaatcttttatagtgtggcctgttagatactttggggtaaatgtggtctgaggtgctggactagcacgggtagatggagaaagctgttgggaagttgcataatgtggtcatctgtgcctaattaaatgaggttagaggtgtgcacaccaccacaatgcctgggatctaaatcttcagatattaacgtttgaggctatggagctgtttccctgaatcacacacgagaaagcagtcaacatgggtgggccaaatgtggccaagatgagagagccagaagtgttggccttagagcagagcctctgtgtgtgagacattagaaggccagagccggggaggtgccggcgcagccactgccttccggtgggccggacggaaagcttggtcttatgctagattcagaagcactgaagaatggaggttgacactttagaggactaggaagggatcatttgtgctcttgcagctattgctgatagctagagccaaagaccattatattgctgaggcttgggtaagaaagttagggatgtgaggaggttgaaaatcctgaagaagagaaaaaatatgagggaggctaaggaaacttagccactttctgatcactgatgactccttaggctgcacctgagtgatggtggtgtttttggaggctgtacctgagtgatggtggttttaggggggctgcacctgagcgatagtgannnnnnnnnggaggctgcacagctggtcagaccatctctagatgttctttccacagtggttcatagggcgtcattcccccttcctggattattttgactatgggtagcttattttcaagagctctttgcctttttaatcctgttccagatcacttatccaaaatctttccaaatcaattatattttgctgcttttctttaattccctaaaagccatagcttctaaattttctatcagcacacattctcaccagaagttgaaccaatacaggtagaaaaagaaagcccccttaatgtttttaactgatgatatttttttaagcttaccaatataagtatttttaaaggttctatttttcaaagtcataacaatgattgttcttgttttctctcatagaatagactgccatcggataaagagtggtccctagcttctatttttccaagtaaataagtagaacatgttcttgggattataccattaaatgttaattttcttgaagaagaaagattgttgtctgccaagattttatgttagcgctcggattgaggcagaaaacggaagcaccaggtttaacactgggatgacttgggttgtgttcctggaggtttgaagtgggccttcccgccttttgagggggaaaactgactgttttgaacacatatcctggattagttgggttgttttgtattgaggatccctaaaagacaaaagagtcttggaaaggactgctggcttcgtcttgaacgttcgccccatcaccagtgtgagtccgtggggaagtcttcctcaagtggggttcagtctgtaattttcctgtctgttcttagtttgttctgagttattttggattttgttctttagccaaataaaggcagtgtggttttacctgaaa

SEQ ID NO: 349982 - DNA, 1073 bp, Homo Sapiens
gggtgaaatgttacgtttgtgcttcatttttgccaaggtaaaaatgttccatcatttctagctaaaactccatttggtggaaccaacatatccatttcttttcctagttacggatgatttggggatgcttttgcagaaatgtgttcatagatgatgctgaatgggggaggggggcagcacgtcagagaatttactattaatcccagagttttctctgtattctcagaagatgttaatagtttgttactagccagagagtatgactatgttagattatttttaaagatgaaacatgtatgataggatggattctttctgtattctgagagtgtacagtacaggattattataatgaaagtttatatcaacagggtttcgttggctctgccatatattataagcaaaagagattggtaaagtgccacagtattccagataacttttcagttgcggcctttcttctcgttctttaatttgaaacctagatacatgcagtaaaaactaggagaatgacttttacccttggggacagccaagttttgttgataaacctatttcctagcatgccttcaggaagttgtgccagaccctagattgtgaaggacccactgttcttctgttgtacgagctccctgaaccattgttcagaggaccaatgtcacatcgcttcatgggcatggcccatggagcatctgggtgatatctgtctacagtattggctcttctgcgaggctgatacacaaggcctctcttccacatgatcatttgcaaacctcccccagcccctacccatcccaatgtggaaggaaaacaagaactgccctgaagaagagtccaagctacagatacacagcgtgtgcattgcggctgtcaccttcctcctcccacttctgtatcctcagagatgctgcgtggatgtttccttaacctcagctgacttccctgtgaatgtctaatgctagttcagggcctccaggcattgatttgtacagtggtaactcccaatgaggcttctgttatcatttggtgtgctttctctgtcattaaaagaaatgattttcccatggccagtg

SEQ ID NO: 349983 - DNA, 1234 bp, Homo Sapiens
  misc_feature (153)..(153): n is a, c, g, or t
ggtggcagctctcaaatcttgcagccctttacttcctttattaataacagtgttctgcataaattcgtgccacagtgtaatcaactatcaatgtgaccattagctccgccacaagtaaagatcgacaggatccaggctgcactgtgtgcacancagcccaggcaggtgaagagtcgtgacatcgcaaaaaggaccacggtttattaccatctctaacgcccatgttccagcaaaccgaagaaaaacactgtttcttaaaactgcagaggaatacaaaattaaatactacaaaacaaaaatcagacaggaagacgaaacaatctacctcctcctaatggtaaaataatctgaaaggagtttaaaaataaatgaactaaaatttttataactattatcttttctgccaattttgaagatgtctacaggtgccacaacgtggggacagaaagaataaatatcaatgtataacttctagagtgataataaacaacaggaccccatctcagatggatggattttttttcctactggagccaaaaaacaagctgaactctatgtacaacagacagactatacaactaggagcatttaaaaataataagactcctctctctgccttcttccaaagaatagaatatatatttaacagcacaaaagacgacaccacttgagcttcccctttagccaacaggaagaatttccacatataaaaattaaaaatttaaactttcaaatcattcatgttttaaacataatacagacttaaaaattcttcaacattgacccataatcccaccccagcacaaaaatcaaccccaaatccagacgtcacagttttttgttcctaaaaatcccacagcactgaacttgatcttcacatcaagctgacagcacgtaagaggcccatgccatgagcaatccccgagggaagaacggaggcacagtcaatgctgcagctcttatctacctgggcggcactggtgcacctctgaggtcaggtccgtgagattcgccccacactagggtcccggaagggtgagctggccgcttccctcctcttccccctcgaaggatgtccaataagcacctgggaattgacttttcttgggaaaagggtgctggtaacagctgtcagggccaaggcaatagtgagaagttcagttctctgctctttggatgaactgtgtaaaacatttcttttaaaagacacaatgttaaaaatattaagaaaaat

SEQ ID NO: 349984 - DNA, 877 bp, Homo Sapiens
  misc_feature (90)..(90): n is a, c, g, or t
  misc_feature (827)..(827): n is a, c, g, or t
  misc_feature (848)..(848): n is a, c, g, or t
agagcacctaggctgtgagaggatggggccaaggccttattctgatgtggcccagctccatctttcactctggggatgttccagggtcanaaattcccccaaacctttgaccacgaacagattcaagcaggaaaaccagggcattggaatgttgaaataagcctgaaatacacttgattcagtggcttagatgatggcaaacagtggcactcaaaaacagcttgtcagtaccggggtttcttctctttttcctcatcctcccttctgctcacacatgccacaaccacacatggtccccagcaggaaccccaaggtggcaaggagcagcacaaagagggctgataaatgcaggcgaacttcaggtcgtgcagcttcaggcctgaagatgatcgaaaagcccatgtgggggatgctgagcttaaatccaggagttttccatccctcctggactctctccatcagaaaagaagtcatccacaatcggggaaaaacattccaatgagtaaaacatcagggtaggttgctttgaggcaaagccacctttgggcggcaccgcatatgggagacccaaagtccactgcacactctttcagtgcccaggggcctgcggtgcatcctacatagggacaagcctcaaaaaatcacagcttggcaggctgcagcatttgacactggtacagtatagcaatggcaaattatcataaataatttggcataagtaaaatataaattacatagaaataatatttttgttccttcttctcatttctcctctcggtccttacaggctctccccagcccagctcgccaagcacgcccagctcgcnccaactcaccacaggtgagcngaaggcacagagcactcaccatggtgggg

SEQ ID NO: 349985 - DNA, 2231 bp, Homo Sapiens
  misc_feature (1852)..(1868): n is a, c, g, or t
acatatatattcatcaactattttagaagatttaattctatcaaatcttgtattacctcagatcattttaaatagcaagccaataacgagctttgaaggctattttaccattcctgttcacaaaaggttctcatggtgcctgacaggttacccttgagggcttgtgtctactttttaaaagtcaatggttttttttcttgtgttctagtttccataataggagagaaaatatagaaatatatgcaaaaattatagttttctttagatcagaaactgatatttttgggtcagccatatgtattttgtttaaaggatttaaaataaagtgccgtcatgtagccctgtggaagggagcacataaccagctgtttggcatgacaggtgacttagtatatttgtaattggttttaaaaccaatacaccatactttctttctgcaaacagccatctttatacttagggaagaaaaattgttgggttctagacttttttaatataaattttgttgatatggaattaggtaagtttaagtgtctatgtgcatatgttttttatataagttttttctattcagtttcactgatccaactggcagtgggtaaatatggcataagttaataacacttttccccaaaatggtgctttggatttgaaaagggtctgatggggagaaggagaacgtatcatcctagcttcctctcttaataaacctagaaaaacgggtagtaaactgtggatagtcaggaaaacacccagcaagggacacagctgtcaggaaatgaatcttccccccaacccccaccatgcagatggatagacagaatctttcctgactagtcattaggatcaggggcctctgttggatttgtgtttcttgaagaatagctggcagagtggtataaaagacacgaatatctcctggtctataaggatactctgatttggggtttgcatttttcatggtttttatttcctgttccccctggagttttccattagtgagtttttgtgcaaggatcttatttgtgatgccttccctcccctagaaagattttgtgcaatatattaaatggggacagaattctaaatggataaaacaatggctggttctagccctgagtgacagtcttaaggctagatccttcccatagtatcatctgtcctctggaatgactctcctgtccctaaaggggttaagagagagatcacctagaaatccctctggacacttgtgggttctttagggtttgagtttcttcttccccttgagcttcagagaggagagttggcatggttaaatctgaatggttacctcactgctgaaaacccagaggggcgtggcacactcgcttgtgtggaaaagcctctaaatgcatcccttcctttctttcctgcttcctttgccttacaattgaagcagcccgtggtaccatcacagtatgcagagacttcctcacctttcatatctagggaccacccccgatgcattggtgagggtgggcacttataaatgcctgctattgttaagccattccagcctcttcctctgaatagaccagacgccctttcacttagttcagtgccagtccttttgccttcccaaccctgctgttaggcctgctgttccctttgctcttgattaggagagatggaaggagatgagctcccataactgaattggcctttggttcatgttttctccccatatgtatatatgccatatgtgaatatgccatatatatgtgccaacaaatctatctacgttgttcttttcaaattagcacgcagataggaattttgagtttcttcttcttttagtaactagtataacaagcactggtatttttgtacnnnnnnnnnnnnnnnnngattgactattgtggtctgcatgacataaacaaacaaatggtgatatcaaagcaacgtataccccagtccagtgtgtgttgccataatttgcaattcagcttaacagtgcacccaatctatatttgcattttgatattatttaagctctatgtacaaggttttgcatgtatttatatggttcttagggaaaaaaaatgctataaactgcaaatctgaaattcaaatgtgttgttccactgagaccagaagaagaagaggagttttaaaagggataatttgttggagccaataaagctttttgctgatgaacagaaaccaatactgctgtgcactgagaataaaaactcatgcccacttgtcat

SEQ ID NO: 349986 - DNA, 854 bp, Homo Sapiens
  misc_feature (830)..(830): n is a, c, g, or t
  misc_feature (836)..(836): n is a, c, g, or t
attcctcgcgagtgtatggcgtgggctcccttccccctctgtgggtcccgcgaggagactctcgggctttgaggtgagacctgaagttccgctggccggtagtgtagcaggaaagggcaggtcctcccgggtcgtgagccagtagcctcctggggtggcaaggtgtagagaggggggcgttgaaaggacacccgctacccggcctgctttctaggggtctctttggattgaggacatcagcagcagtggaagggattttactggagacctgtcactgtcagagccttaaaatatcaccgacggggccttaatgtcaccgaggtagagagaaaagggcagtagccctagagactattgcgacacagtgtgcccctcataagtttttccagggaggggttctgtactgagttgacgccccaggagctgagcaccaggctttgcatccttgggaactcagcaaacgtttgttcagccaattgcaggtagcatggcccagggcttgattgaggtggagcgaaagttccttccagggcctggcacagaggagcggctgcaggagttggggggcaccctggagtaccgggtcaccttccgagacacctactatgacacccctgagctgagcctcatgcaggctgaccactggctgcgacgacgagaggatagtggatgggagctcaaatgtcctgggagcagcaggtgtctttagggaccccacacggagtattaaggaactcacagcggaacctacaattgtggcccaactctgtaaggtgctgcgggcttgacggctgggggctggagatgtggctgctgtgctgggcccactnggcttncaggaagtagctaatttt

SEQ ID NO: 349987 - DNA, 1194 bp, Homo Sapiens
ggcacgagggggagccgtgcggggccaacaatgaggagcagaatgcaaggggcggcctcgctcccctggccaccgcgggggtcgcggcctcccattacatagcgcgtgtctcgagccctggcctgctctcggcaccgccacaacgggcgtaatatggccgctggtgccgggacctgccgggcgcgcggagggtcgggccgaggtccgggatccggaactgctcccggcattcctcgcgagtgtatggcgtgggctcccttccccctctgtgggtcccgcgaggagactctcgggctttgaggtgtgcctgcacaggagacagcaccagccaagctgattgtgtatctacagcgtttccggcctcaagactatcagcgcctgctagaagtgaacagctccagagagaggccacaggagactgaagatcctgaccactgcctgggctaggggtgtcacttcctagaaggggaagggaactctgggtctaacggagtccactcctgggcccactgtgcctctcccctcagtgtcccttctgacagtgactcctctctctccagcgctgcctgtttcttccccctcctctaagctactcttccttgagccctccctggctgcttcctctcgctcatccgtcagatgcaatctgtgggccgcccctctcccctggccgctaagcagcctccattgatttccgctcgtgtttataggatttccacttagccgtgatcagtagttaagcacaggaaaatcccttgccaccccccctcccttggtcgatgccattgattctgccagcggctcctaaaccgccttacagctgagttagaagatgaggagaggcagcagggatttccctgccttgggatgtgggaaacagaagaaaagttgaggaaatggttgggaatcgctgttagaactctagaaattctaatctgactttgccactgtgcccagctctggcccagagggtagagtgcctcctgtggaagtttaggggcaaatttgttccctgacctggagagggttagaaagaaccaacagctgccccctccccgcccccgtgttgagacaggttctcaaggctcaggggaagatgcatacctcctatgtaagaatgctcttcccttgctgttattcatacacactttccacttcaaatatacccaaatatggctttcctcacaaaaaaaa

SEQ ID NO: 349988 - DNA, 1186 bp, Homo Sapiens
gaattcccgggatggggtgcctggctcagcctcaggcatgagacctgtaccagcccccgggagccgtgcggggccaacaatgaggagcagaatgcaaggggcggcctcgctcccctggccaccgcgggggtcgcggcctcccattacatagcgcgtgtctcgagccctggcctgctctcggcaccgccacaacgggcgtaatatggccgctggtgccgggacctgccgggcgcgcggagggtcgggccgaggtccgggatccggaactgctcccggcattcctcgcgagtgtatggcgtgggctcccttccccctctgtgggtcccgcgaggagactctcgggctttgagccaattgcaggtagcatggcccagggcttgattgaggtggagcgaaagttccttccagggcctggcacagaggagcggctgcaggagttggggggcaccctggagtaccgggtcaccttccgagacacctactatgacacccctgagctgagcctcatgcaggctgaccactggctgcgacgacgagaggatagtggatgggagctcaaatgtcctggagcagcaggtgtcttaggaccccacacggagtataaggaactcacagcggaacctacaattgtggcccaactctgtaaggtgctgcgggctgacggcctgggggctggagatgtggctgctgtgctgggcccactggggctgcaggaagtagctagttttgtgactaagcggagtgcctggaagctggtgctcttgggagctgatgaagaggagccacagctcagggtggacttggatacagccgactttggctacgctgtggggtgaagtaaaggccctgggtgcatgaggaagctgaagtaacaactggccctagagaagatccacaggctcagcagcatgcttggtgtgcctgcacaggagacagcaccagccaagctgattgtgtatctacagcgtttccggcctcaagactatcagcgcctgctagaagtgaacagctccagagagaggccacaggagactgaagatcctgaccactgctgggctaggggtgtcacttcctagaggggaagggaacatctgggtctaaagggagtcaactcatgggccactgtgctctccctcagtgtccttctgacaggatcctctttctcagggctgctgttcttcccctc

SEQ ID NO: 349989 - DNA, 334 bp, Homo Sapiens
  misc_feature (316)..(316): n is a, c, g, or t
tgtatccctcaccaagcatgctgtctgaccctgtggtatcttctctagggcagttggtacttcagcctcctcatgcaccagggcctctacctcacccacagcgtagccaaagctcggctgtatccaagtccaccctgagctgtggctcctcttcatcagctcccaagaacaccagcttccaggcactccgcttagtcacaaaactagctacttctgacagggtccatcctggcgcgtccatcccagcctcccccactataggaacagaagccacaatccctgccccaggcagtctcatagagtgactaaacagagntacagcccatgtccggtc

SEQ ID NO: 349990 - DNA, 996 bp, Homo Sapiens
  misc_feature (44)..(44): n is a, c, g, or t
  misc_feature (59)..(59): n is a, c, g, or t
  misc_feature (61)..(61): n is a, c, g, or t
  misc_feature (63)..(63): n is a, c, g, or t
  misc_feature (932)..(941): n is a, c, g, or t
ctttcaactttatccacagtttgcatcggtaatatacatttcantgttccatttatttntnantgcatcagaaaagcaattatgatagatctgtgaccaatacaaacatttctgatttattcaaaaaattcagttaaaaaagtcattaaactagcattctgtaaagataattattaaacaaatggtaatgcatttttactccttatttcatttctaacatacccaatgtcacttctttcttgtgccatacagtaataaaatgtaacagaaatagatatctattaaattttgggggcctaataaaatatttttgattattcaactgtcattaaatcacaaatcccactcaagtaatgaaaatcattcttaattcaataactgatgaaatagataatagccataaaaacatttagaataaattttacacttagaaactactaaaagaaatacatcagagccttggtataacattgtaggggaccatgctgtgaaactgctttagacgtggtgttgccatttggcacaagagtaaatgaactgccatgatgtggacctcagagaagcccatcttaaattgaattttgctctgcagtaaagaatgctacagtgaggttctgctgtattttctttttaaaggaataattaactgaaaagtaactgaaatgttataagaaaatggcctacaatttcactactacttcaaagatatgaaacaggacaacacttgtaaaataattcatactagattgattaatcagagactatcataacacctatgaaagcagtatgaatgattgctgtgtttttaatggtcacttaatttgtaatgctgtcaaatttctacatacaaagtcattaactaaggtatttatttgccatttcttacatatattaccccaagttttcactaggggagattatgtcagcgagcnnnnnnnnnnacccacttaaaaattaacaactaatgagggcaaatatttaaaaataataattact

SEQ ID NO: 349991 - DNA, 2303 bp, Homo Sapiens
  misc_feature (468)..(476): n is a, c, g, or t
  misc_feature (1961)..(1961): n is a, c, g, or t
tggtataacattgtagggaccatgctgtgaactgctttagacgtggtgttgccattgggcacaagagtaaatgaactgccatgatgtggacctcagagaagcccatcttagagttgaattttgctctgcagtaaagaatgctacagtgaggttctgctgtattttcttgtttaaaggaataattaactgaaaagtaactgaatgttataagaaaatggcctacaatttcactactacttcaaagatatgaaacaggacaacacttgtaaaataattcatactagattgattaatcagagactatcataacacctatgaaagcagtatgaatgattgctgtgtttttaatggtcacttaatttgtaatgctgtcaaatttctacataaaaagtcattaactaaggtatttatttgccatttcttacatatattacccaagttttcactagggagattatgtcagcgagnnnnnnnnnatccaactaaaaaattaacaactaatgaggtcaaatatttaaaataataaattactaataatttaattcttaaaccatatactcatagaagctttaattctttaaaagctccaatttgacccttggggaatgtaatgaacacatctgtattctaaagccaaaatttaattctatggcttcatgccaactgatcaaaaaaagtacagttgttcctataccatttggcacactagttttttaccttttatatataccctttgaaatacccaggccaacatttttaataagttgcatccatattaagaggtaacaagtgcaaatgatcacatacttaagatatgatgcttgcttggttactacaaaagtaattattcaggttcttctataggaaactcagttattcattacagtaatgtttttgaaaaattcctgcaataccaccaatgtaaatttacccatacctaagttaaaacaaggactttgtgtaacacagtatctcatgaaaatatttatagaagagtctgtgtttaatttaacatcaaagtaattgaagatcacaaggtttacaggattcacaaatggccagattttgagtaaaaacctattcctcaactgctgctctctgagtatagctaaaggcagcactgatagaatgctgctcaaagggaagatataaacccaaactttggcagttttatcaaaatgtccttgataattagtacttcactagttctcaaaaactttactgctttgtgtaacattttcaatacagaaataaaatactcttcaaataatacattttaaaagatgattaagtttcacaaaattaaatagcataaattaatcatattaacattggtatttttgacaacatgaaataaccaatttaagggaaactgcaatggactaactaaaaaaccacaaatgtcacaatgtgaggctcatttaaatcctcacatattactgactttacaaaatctactaaaatattttaaagttccattgactctattaataccatttaaaaaaattgcaaaaatgcttaagactatgtaagagtcatcaattacacaggcaccttcacatgtaaaccatctacagtacaactgaaaatattttggcaccaacctataatactaaaagaatttaatataaagccagaattgttttttctactccttttttctagaaaactaagaccaaagattgaagaaattgtgtataaactagaattagaagtgtattaaataactcaaatatagaattgctctaaattgctaaaaaaaattacctgttatccagatgtttactaatatgctatgatgtaaaaaaaattaaacctaatgtgattattaaattgaaactacattttaaatttagtatcagtctgctttctgaaaaataatcaagattatcaactgacttagtaaaaagagaatttgagtttatcaatactcttattaagttaatccagttttcccccanagaagttcgggcaattcaatgtttaagtttgatgtttcaatgtaatttttttaaaatcctaaggcgtgacctaaggcaaactatttttgacggaatattcttattcatgaatttgaaatatttgaaatcacttcaaataaatgaaactatacacttagaattttaaaatgttatattaagccacagaaagctgagatgccttggttgttggtaattcaaggagcgcctgaactgtgacaccatctttcacaagtcctcgttcttccaaatatgatgaggcaaccaagtctttcctgtgagacacccaactttttacagcatcagaaaattttctacatttct

SEQ ID NO: 349992 - DNA, 700 bp, Homo Sapiens
  misc_feature (13)..(13): n is a, c, g, or t
agtgagcttatanttaggggatgatgggaaggcatagaccatggggtgtggcctgcagatgcatgaggtgggccctggcctctggggagtagatgaggggagttggcaaaggaactggggagacattaaggtgagcttactttctctgaactttgatcaacagcctgccctggtcatctcaggaactctggctgatttagggatttagggtgaaggcagatccataacgtttctcttctgaaaatgaataccccaaactctgtgcgaactttaaagaaatacacagtgggtcaaatacaatttgtaaattaaggaaaatgtaattagccaccctttcaaatgaagacttgtcttgggtgaggcagctacctcctcattcacccttatccagcctttattttgatgttgaaattgaaatactaaacaatgggaataccatcatgccaagctaaacacaagccaattctaagtcagttaaatatgagcatccctccagttgccaactgcaaccccccagtgagagtggtcattggccattcttgagtcttgtgtgttccatagaaaacagccaccaattccagccagaataagtttggcagtttgctccttagcctccattcctcgaggagccacgggttattttaattattgtctctagaggccttttagtgagttgaggctaagacccacagtactcatg

SEQ ID NO: 349993 - DNA, 431 bp, Homo Sapiens
aaataaacaaaataatgggatttatatatgtggcacccagtacaatgtacaattttcttttttaaaaaagtatttaggttatgcattgctaagcacatctgtgattgatgagagtgactctagtatctaaactgttggaggagggttgtaagggtaacaggtaggggaggcatatagaaggaatatgttggtatcatagatttcctaagactcagggaaggccacagagctagggtactagtctatgctagaattaatggattatgcaaccgaagaaagacaacttttgaatggaaaagctctctctgtgccagacttgaggtcaccaagcatactgctcacactctgcgatgtctgtggagtagcacaccaccagaaactgctgatggaattacatcttcaagattcaaaatgtttagatccaatatatc

SEQ ID NO: 349994 - DNA, 1255 bp, Homo Sapiens
ggggtggcggccattttgttttggacaccgagcaggagctggcggccgctgcagacgaaaggcaggaaagggcaggccgggtgagcagacggatcggccgactagacagccaaccagcaacaacgaactgagctcgcatactaccgcttacgcatctaaccaaccgcccatctagctaacccgagcccctccaccgtcaactcaggttcggccggtccccggcccgcctgccggagccgtggtggcagccccgggaggagcactggcgtctgtttccttcgattctcgggattcgaagatggctgcacagtcagcgccgaaagttgtgctaaaaagcaccaccaagatgtctctaaatgagcgctttactaatatgctgaagaacaaacagccgacgccagtgaatattcgggcttcgatgcagcaacaacagcagctagccagtgccagaaacagaagactggcccagcagatggagaatagaccctctgtccaggcagcattaaaacttaagcagagcttaaagcagcgcctgggtaagagtaacatccaggcacggttaggccgacccataggggccctggccaggggagcaatcggaggacgaggcctacccataatccagagaggcttgcccagaggaggactacgtgggggacgtgccaccagaaccctacttaggggcgggatgtcactccgaggtcaaaacctgctccgaggtggacgagccgtagctccccgaatgggcttaagaagaggtggtgttcgaggtcgtggaggtcctgggagagggggcctagggcgtggagctatgggtcgtggcggaatcggtggtagaggtcggggtatgataggtcggggaagagggggctttggaggccgaggccgaggccgtggacgagggagaggtgcccttgctcgccctgtattgaccaaggagcagctggacaaccaattggatgcatatatgtcgaaaacaaaaggacacctggatgctgagttggatgcctacatggcgcagacagatcccgaaaccaatgattgaagcctgcccatcctcccatgagagactcttgttagtcaacacatctgtaaataaccttgagataacagatgagaagaaatctgattgatgctggatggacctatcacaataggctgtggacttacttgccaccagcttgtgcatttagtgtgttccttttactttttgatactgtgttgtatgaaacccttttgttccgttgaaaaaaaa

SEQ ID NO: 349995 - DNA, 457 bp, Homo Sapiens
  misc_feature (166)..(166): n is a, c, g, or t
  misc_feature (444)..(444): n is a, c, g, or t
ggcaggaaagggcaggccgggtgagcagacggatcggccgactagacagccaaccagcaacaacgaactgagctcgcatactaccgcttacgcatctaaccaaccgcccatctagctaacccgagcccctccaccgtcaactcaggttcggccggtccccgctcgncctgccggagccgtggtggcagccccgggaggagcactggcgtctgtttccttcgattctcgggattcgaagatggctgcacagtcagcgccgaaagttgtgctaaaaagcaccaccaagatgtctctaaatgagcgctttactaatatgcttgaaggaacaaacagccgacgccagtggaatatttcggggcttcggatggcaggcaacaacagcagcttaggccagttgccaggaaacaggaagattgggcccagcagatgggagaattaggaccntcttgttccgggg

SEQ ID NO: 349996 - DNA, 1493 bp, Homo Sapiens
  misc_feature (93)..(93): n is a, c, g, or t
gtccgtgcggcctggtccgggccatgtccgcgtgaggaccccgccgctgtcgccgctcccgttccggccctggcccctctgcccggcagcgcncgcaccatgggctccattctcagccgccgcatcgcggggtggaggacatcgacatccaggcgaactcggcctatcgctaccctccgaagtccggaaactactttgcttcgcactttttcatgggaggagagaaattcgacaccccccaccctgaaggttacctctttggagagaacatggatctgaacttcctgggcagccgcccggtccagtttccctacgtcactcctgccccccacgagcccgtgaagacgctgcggagcctggtgaacatccgcaaagactccctgcggctggtgaggtacaaagacgatgccgacagccccaccgaggacggcgacaagccccgggtgctctacagcctggagttcaccttcgacgccgatgcccgcgtggccatcaccatctactgccaggcatcggaggagttcctgaacggcagggcagtatacagccccaagagcccctcgctacagtccgagaccgtccactacaagagaggggtgagccagcagttctccctgccctccttcaagattgacttctcggaatggaaggatgacgagctgaactttgacctggaccggggcgtgtttccagtagtcatccaggctgtggtggacgaaggagatgtggtggaagtgactggccacgcccacgtgctcttggctgcctttgaaaagcacatggacggcagcttctctgtgaagcctttaaagcagaagcaaattgtggaccgggtcagctacctcctgcaggagatctatggcattgagaacaagaacaaccaggagaccaagccctcggacgacgagaacagcgacaacagcaacgagtgtgtggtgtgcctgtccgacctgcgggacacgctgatcctgccctgccgccacctgtgcctctgtacctcctgcgccgacacgctgcgctaccaggccaacaactgccccatctgccggctgcctttccgggccctcctgcagatccgggcggtgcggaagaagccaggagccctgtcccccgtgtccttcagccccgtcctggcccagagcctggagcatgatgagcactcttgtccctttaaaaaatcaaagccgcaccccgcctccctggccagcaagaaacctaaaagggaaacaaactctgacagcgtcccacctggctacgagcccatctcgctgctcgaggcgctcaacggcctccgggctgtctccccggccatcccctcggcccctctttatgaagaaatcacctattcaggcatctcggacggctgtcccaggccagctgtcccctcgcggctatcgaacacatcctggacagcagccgccagaagggcaggccgcagagcaaggtccccgacagcaccctacggtcccgtcttaccccatccacgaagagga

SEQ ID NO: 349997 - DNA, 1657 bp, Homo Sapiens
  misc_feature (1653)..(1654): n is a, c, g, or t
ggggtgtggcatctgtgtttctgatgcttactacaatatgtgaaccactactttagaaaatctgctttaacttggcattcctctaattgtgttccctaggaaatgactgtcccaagagccagtgattattccaggtgttccctggaaaggtcaagtgagtctgggaaacactatgtctgtacacctcttgaaggtgtcgaatgtatgtttatacatcagtggaacccatttttctagcctagcaagtcccaaacacattacactgaagagattttggtgaggaaacttgctggagttttcagggaacactgttctaggcttaggtgaccgtaggatcactcaagtagacccttcactccctgcgagaaattaggatgaataactacctgtggcattgttggttctgaacttttacagttcaggcctgctgtgaatctttgatgaagctttaaggtgacactgttgtacaagatgtcagctttgctgaaacgcacattacctggaataagtgctttaattgtagaattagaatgggatttactgtactgttttaaatgagattggcttcagaatccattacagttaccttacatagcacttgatacgtgttaaatgaacatatgaatgtaatttatatattcctagaatttaagttactttgtgagattgggcctgtccctcaacgccagtttaggatttctttttttctatacctgaaatgattatcaaatagattttcatgggaattttaaaaactctatccaaaacatgttggagcattttaaagccccatacacagaagtatacgaaagcacacaaaacactccaagtttcagcagttttagcgccaccattaacccactttgcttgtctcatgaaaaatctttgttaaagtttgtacacaggtaacaaaaagttactttaaaaggtatataaagggctgtaagctaattgtggtgtctagtaagtagcataatgagatgtgaggagttggaactttgcgtgttttgcgtattttcatctgcattcagcttcttactctgggtttgtactcgagtgttatttctttacaaatgcccttgtaattaccactctgaagtctgctgactgtgtctcttgaacatacttaggatattctgcacattatggaaaaaggtaaattttagaagtttctgctctactaactgtagatatttatgactctgcgagttatctatttttataaccacctgtggtccattgttcattttaattcacatttcttatgaagtatggtaacagggagggagacacctagattagcagctcaatttgtactacttcagccaatctgtgaatgtaaaaactacactgttgccttgctaggatccaccctcctataatatggaacaaatatctgaatgaaatccaccctaggagacggagtcaaactaaacttgtggtttttcatttaacttttgactacagcatggccccatggcatccacaccaagagggtgttgtgatgaggtgccggtgtgcaaagggaactttagtttttccactggttcttatctgctagccttttacatacatgtgtactatatttgtttatagactgtaggtggatatataatttaaaagcttgatttaataaacatttaaccccctaannttg

SEQ ID NO: 349998 - DNA, 2859 bp, Homo Sapiens
  misc_feature (1748)..(1759): n is a, c, g, or t
gtactactgcattgcttccaatgacgcaggctcagccaggtgtgaggagcaggagatggaagtctatgacctgaacattggcggaattattgggggggttctggttgtccttgctgtactggccctgatcacattgggcatctgctgtgcatacagacgtggctacttcatcaacaataaacaggatggagaaagttacaagaacccagggaaaccagatggagttaactacatccgcactgacgaggagggcgacttcagacacaagtcatcgtttgtgatctgagacccgcggtgtggctgagagcgcacagagcgcacgtgcacatacctctgctagaaactcctgtcaaggcacgcgagagctgatgcactcggacagagctagacactcattcacgaagcttttcgttttggccaaagttgaccactactcttcttactctaacaagccacatgaatagaagaattttcctcaagatggacccggtaaatataaccacaaggaagcgaaactgggtgcgttcactgagttgggttcctaatctgtttctggcctgattcccgcatgagtattagggtgatcttaaagagtttgctcacgtaaacgcccgtgctgggccctgtgaagccagcatgttcaccactggtcgttcagcagccacgacagcaccatgtgagatggcgaggtggctggacagcaccagcagcgcatcccggcgggaacccagaaaaggcttcttacacagcagccttacttcatcggcccacagacaccaccgcagtttcttcttaaaggctctgctgatcggtgttgcagtgtccattgtggagaagctttttggatcagcattttgtaaaaacaaccaaaatcaggaaggtaaattggttgctggaagagggatcttgcctgaggaaccctgcttgtccaacagggtgtcaggatttaaggaaaaccttcgtcttaggctaagtctgaaatggtactgaaatatgcttttctatgggtcttgtttattttataaaattttacatctaaatttttgctaaggatgtattttgattattgaaaagaaaatttctatttaaactgtaaatatattgtcatacaatgttaaataacctatttttttaaaaaagttcaacttaaggtagaagttccaagctactagtgttaaattggaaaatatcaataattaagagtattttacccaaggaatcctctcatggaagtttactgtgatgttccttttctcacacaagttttagcctttttcacaagggaactcatactgtctacacatcagaccatagttgcttaggaaacctttaaaaattccagttaagcaatgttgaaatcagtttgcatctcttcaaaagaaacctctcaggttagctttgaactgcctcttcctgagatgactaggacagtctgtacccagaggccacccagaagccctcagatgtacatacacagatgccagtcagctcctggggttgcgccaggcgcccccgctctagctcactgttgcctcgctgtctgccaggaggccctgccatccttgggccctggcagtggctgtgtcccagtgagctttactcacgtggcccttgcttcatccagcacagctctcaggtgggcactgcagggacactggtgtcttccatgtagcgtcccagctttgggctcctgtaacagacctctttttggttatggatggctcacaaaatagggcccccaatgctannnnnnnnnnnnaagtttgtttaattatttgttaagattgtctaaggccaaaggcaattgcgaaatcaagtctgtcaagtacaataacatttttaaaagaaaatggatcccactgttcctctttgccacagagaaagcacccagacgccacaggctctgtcgcatttcaaaacaaaccatgatggagtggcggccagtccagccttttaaagaacgtcaggtggagcagccaggtgaaaggcctggcggggaggaaagtgaaacgcctgaatcaaaagcagttttctaattttgactttaaatttttcatccaccggagacactgctcccatttgtggggggacattagcaacatcactcagaagcctgtgttcttcaagagcaggtgtactcagcctcacatgccctgccgtgctggactcaggactgaagtgctgtaaagcaaggagctgctgagaaggagcactccactgtgtgcctggagaatggctctcactactcaccttgtctttcagcttccagtgtcttgggttttttatactttgacagcttttttttaattgcatacatgagactgtgttgacttttttagttatgtgaaacactttgccgcaggccgcctggcagaggcaggaaatgctccagcagtggctcagtgctccctggtgtctgctgcatggcatcctggatgcttagcatgcaagttccctccatcattgccaccttggtagagagggatggctccccaccctcagcgttggggattcacgctccagcctccttcttggttgtcatagtgatagggtagccttattgccccctcttcttataccctaaaaccttctacactagtgccatgggaaccaggtctgaaaaagtagagagaagtgaaagtagagtctgggaagtagctgcctataactgagactagacggaaaaggaatactcgtgtattttaagatatgaatgtgactcaagactcgaggccgatacgaggctgtgattctgcctttggatggatgttgctgtacacagatgctacagacttgtactaacacaccgtaatttggcatttgtttaacctcatttataaaagcttcaaaaaaacccaa

SEQ ID NO: 349999 - DNA, 1060 bp, Homo Sapiens
  misc_feature (214)..(214): n is a, c, g, or t
  misc_feature (259)..(259): n is a, c, g, or t
  misc_feature (287)..(287): n is a, c, g, or t
  misc_feature (312)..(321): n is a, c, g, or t
  misc_feature (604)..(612): n is a, c, g, or t
tgggattggagccccaaaggaaaatttccctgtttccctttttgccaatttgggccaaagggtttaaaaattgctcccctaaagggccccgccgcgcattccccaggctttcccccggtaaaaaccaggccaaagtttaaaaggaaaagtcttgccgggggtgggggaagccattagcatttccaatttccaaatgagcacaaaattccaaaantacattaaaaaagtagcatggctaccattttcagcagagaagaanactgaggaaatgtttcataaagagacanatgatttttaagatttactgtcacnnnnnnnnnnggggtttcacttcaggggagtggaactgggatgggaattttacaatgctagttccagcacgtggtctaatggccccaggggctggaaaagggaggtctgctccaactttaagatgcgcccttgggatgccttccaagcagctggagttagtgccacctgtctcacctggcacccacaggcaaacacacatgtgcgcacgcatgctttcaaaatgaggatcaaaactgtcccacataagaaattactcaagatggaaaaactagtctggtgattttcttagagnnnnnnnnngagagacaaaaaggaaggggtggggggagggggaagaaaccaaatagatcctgcttccccctgtcacacaaccatcatcaaaagacatatgaacaataataaaatagtaatagaagttcttactctggcagaaatagctagtgttgtcagagggcgcagggagctgtgagttttgctttcaggaaaagtgttcaaacagtgctgactgtgtacctcaaggccctctgacctcaaattaaattggctgtcaaagacttacggcccatggagctcccaggtgacagtgtcaatggcgctttatgtaagttctttccagattgatgaaccaagaaaaaggtcaactgaatcgttatacttaaggtttacaaactcaggagagtttcttgtatagtaactctagtttctggtatgcttatttctttgtcttcccatcccgggaattccggac

SEQ ID NO: 350000 - DNA, 1415 bp, Homo Sapiens
  misc_feature (629)..(654): n is a, c, g, or t
tttttttctctaagaaaatcaccagactagtttttccatcttgagtaatttcttatgtgggacagttttgatcctcattttgaaagcatgcgtgtgcacatgtgtgttgcctgtggtgccaggtgagacaggtggcactaactccagctgcttggaaggcatcccaagggcgcatcttaaagttggagcagacctcccttttccagcccctggggccattagaccacgtgctggaactagcattgtaaaattcccatcccagttccactcccctgaagtgaaacccttttttattggtgacagtaaatcttaaaaatcattgtctctttatgaacatttcctcagtttcttctctgctgaaaatgtaagccatgctactttttaatgtatttggaatttggtgctcatgggaaattgatatgctaatgcctcccccaccccccgccagacttttctttttatactttgtcttgtttttactggggtaggctgggcatgcgtgcgtgcctttagggcagcattttaaacctttgccaaaattgcaaatgggacatgtacattcttctgctccatcctacttaaacacctatcagctatttttatctttaaccttttctgtatgtttgaannnnnnnnnnnnnnnnnnnnnnnnnnaaagagcgagagaatgatgtcatctaaagttttttgaagaattatttggttttcattgcattaaaattctatcactcccagctttgttttcatttaaaaaaatatacaaagagctttgtaaatacaacacattttatttctcccccttcttttaatgtacagcttttttgccacttatatatacttaaaatattcccatgaattatgtccagttcttcttggaaaaaaatttggttttgaatgaacctgcaaagcatcctgcagcgtgagcagctcctccacctggagctccgaagcatcttctcaggccaaagcggcattacccgtgaatctgtcttctccgccacagcatggtttgaggcgcagtctgttaatatagctgggccatgtcagtgactgttgtgtttgtggggtcaggtggggggcatggtatttgcaaaaaaaacaaattatggctaatttattattttgttgcagtggggttaactgtaaactcatgtaagagtctgtgatttcctcattggttgatctctctctctgtaatcctcattgcaaattttcaccaggacagcgttttttgattagaggggagctctggcacagtatgctttaatttagcaggaacttccagatgatttaaattctcgatgctgtgatgacacacatatgatctttcgtgtttctgagcgactctactttcattgtttgccagcgtggctcgttgctgttgcccaataaagcttgtgtacgttctgaaaaaa

SEQ ID NO: 350001 - DNA, 253 bp, Homo Sapiens
actttcaaatcatgtcagtagacattgataaaagtatagcagcatcctctactgaggtcatttcatttattccctgcagcccactgataaatatctcacttctcccaaatagtatgtggactcccagctaagcagaaaactattgtcattcaactgaagaagaggaagataaaagattgtcttgtttccatcactgtattacttgtgtaacatgattacataattcttatcctaagagaaagctttcatattt

SEQ ID NO: 350002 - DNA, 1673 bp, Homo Sapiens
  misc_feature (15)..(15): n is a, c, g, or t
  misc_feature (23)..(23): n is a, c, g, or t
  misc_feature (1426)..(1451): n is a, c, g, or t
ttcccggcatctccnccgggaanaatcagtgctggatccctcagccgccgccgctcctcctcctggcaggccggccgcggagtcagctgacgccggcgctccagcctcgcctccccgcgccgcgctctgcgctccccgaaagtggctgcaagcggccgcccactgtcagggttggggggacagagaaagtgatgtgcgccttctaaagcctcgcccagcgccgccgaagcagcttcacctctccaactttctcccaccgactgcttgtcttgaccctgccctccaccctccccagagccacttcgggtgcgcgctcttgggtaaagggggggtcaccggctgtctgggatggcttccaattttaatgacatagtgaagcaagggtacgtgaggatccggagcagacgcctcgggatttatcagcgatgctggttagtattcaagaaagcttcaagcaaaggtccaaaaagactggagaaattttctgatgaacgtgctgcatatttcaggtgttatcataaggttacagaactcaataatgtgaagaacgtagctcgattgccaaaaagcaccaagaaacatgccatagggatttatttcaatgacgatacctccaagacttttgcttgcgaatcagatcttgaggctgatgagtggtgcaaagtactccagatggagtgtgtaggaacacggatcaatgacatcagccttggagagcctgacttactggccactggggttgagagagaacagagtgagagattcaatgtgtatttgatgccatctcctaacttagatgtacatggcgaatgtgccttgcagattacatatgagtatatctgtctttgggacgtccagaatcccagagtcaaactcatctcttggccgctaagcgccctgcggcggtatggacgtgatactacgtggttcacttttgaggcagggaggatgtgtgagactggtgaagggctgtttatctttcagacccgagacggggaggccatctatcagaaagtccactctgctgccttggccatagccgagcagcacgagcgcttgctacagagtgtgaaaaactcgatgctccagatgaagatgagtgagcgggccgcctcgctgagcaccatggtgcccctgcctcgcagcgcctactggcagcacatcacacggcagcacagcacgggacagctctaccgcttgcaagatgtttccagccctctgaagcttcatcgaacagagacttttccagcctacagatctgagcactgacagtaactgccaagaattgttaacacacttgtgatgtgtcagccacagattcacccaggaggtcacagaatgacagcaagggaaatgacgaccaagagaagaagcttaaagtcctggctaattgtgtggtcattggaaaactctgcaatacaataannnnnnnnnnnnnnnnnnnnnnnnnnaaattcttagtgtaattgaaacgtgctctatagatattgactctgtgttccctcttttacagctggacagaaagaagtcaatgtcacgaaatgattttctattgtagatactttgtcccttgcacttctctgaatctgtccttttgtggattcttggattttccttccaagtgtttcagttgtagacagtcagtacgacaataaaaggcttctcaattattt

SEQ ID NO: 350003 - DNA, 1127 bp, Homo Sapiens
  misc_feature (21)..(21): n is a, c, g, or t
  misc_feature (33)..(33): n is a, c, g, or t
  misc_feature (49)..(49): n is a, c, g, or t
  misc_feature (94)..(94): n is a, c, g, or t
  misc_feature (591)..(591): n is a, c, g, or t
  misc_feature (600)..(603): n is a, c, g, or t
  misc_feature (605)..(609): n is a, c, g, or t
  misc_feature (614)..(614): n is a, c, g, or t
tatatctttctttggacgtcnaaaatcccagantaaaactcatttcttngcccgctaagcccctgcggcggtatggacgtgatactacgtggtncacttttgaggcagggagaatgtgtgaaactggtgaagggctgtttatctttcagacccgagacggggaggccatctatcagaaagtccactctgctgccttggccatagccgagcagcacgagcgcttgctacagagtgtgaaaaactcgatgctccagatgaagatgagtgagcgggccgcctcgctgagcaccatggtgcccctgcctcgcagcgcctactggcagcacatcacacggcagcacagcacgggacagctctaccgcttgcaagatgtttccagccctctgaagcttcatcgaacagagacttttccagcctacagatctgagcactgacagtaactgccaagaattgttaacacacttgtgatgtgtcagccacagattcacccaggaggtcacagaatgacagcaagggaaatgacgaccaagagaagaagcttaaagtcctggctaattgtgtggtcattggaaaactctgcaatacaataancccccctannnncnnnnnctctnttaaattcttagtgtaattgaaacgtgctctatagatattgactctgtgttccctcttttacagctggacagaaagaagtcaatgtcacgaaatgattttctattgtagatactttgtcccttgcacttctctgaatctgtccttttgtggattcttgtgattttccttccaagtgtttcagttgtatgacagtcagtattgacaataaaatggcttttaattatttgttatttgtttacaccctattcctcagttattattactgtggttctgattaactactggaaattatatttgattatatcaccaattagttaaatcagtgcttcgactcactcttatctgttctgttcaaaactatttgttcaaagaacccgttagtgttgtttacagggttacagtttctctcacatgctttcctcacccctttacccccctttttgaaagcctttattttgttcggagtctcttcataaaacatttgaaaataaaagatcattcttcacccataa

SEQ ID NO: 350004 - DNA, 1209 bp, Homo Sapiens
  misc_feature (45)..(81): n is a, c, g, or t
gtatgatcatataggggaatcggagctcatcgcggtggcggccgnnnnnnnnnnnnnnnnnnnnnnnnnnnnnnnnnnnnnatcaggccaaatcggccgagctcgaattcgtcgagagcggactgggctccgcggagccagcgagaggtctgcgcggagtctgagcggcgctcgtcccgtcccaaggccgacgccagcacgccgtcatggcccccgcagcggcgacggggggcagcaccctgcccagtggcttctcggtcttcaccaccttgcccgacttgctcttcatctttgagtttatcttcgggggcctggtgtggatcctggtggcctcctccctggtgccctggcccctggtccagggctgggtgatgttcgtgtctgtgttctgcttcgtggccaccaccaccttgatcatcctgtacataattggagcccacggtggagagacttcctgggtcaccttggacgcagcctaccactgcaccgctgccctcttttacctcagcgcctcagtcctggaggccctggccaccatcacgatgcaagacggcttcacctacaggcactaccatgaaaacattgctgccgtggtgttctcctacatagccactctgctctacgtggtccatgcggtgttctctttaatcagatggaagtcttcataaagccgcagtagaacttgagctgaaaacccagatggtgttaactggccgccccactttccggcataactttttagaaaacagaaatgcccttgatggtggaaaaaagaaaacaaccacccccccactgcccataaaaaatagccctgccctgttgctcgtgggtgctgtgtttactctcccgtgtgccttcgcgtccgggttgggagcttgctgtgtctaacctccaactgctgtgctgtctgctagggtcacctcctgtttgtgaaaggggaccttcttgttcgggggtgggaagtggcgaccgtgacctgagaaggaaagaaagatcctctgctgacccctggagcagctctcgagaactacctgttggtattgtccacaagctctcccgagcgccccatcttgtgccatgttttaagtcttcatggatgttctgcatgtcatggggactaaaactcacccaacagatctttccagaggtccatggtggaagacgataaccctgtgaaatactttataaaatgtcttaatgttcaaaaaa

SEQ ID NO: 350005 - DNA, 468 bp, Homo Sapiens
  misc_feature (13)..(13): n is a, c, g, or t
  misc_feature (32)..(32): n is a, c, g, or t
  misc_feature (39)..(39): n is a, c, g, or t
  misc_feature (54)..(64): n is a, c, g, or t
aaaaacccttganggtgggaaaaaaagaaaanaaccacncccccaactgccccnnnnnnnnnnnccctgcccctgttgcctccgtgggtgcctgtgtttaactctccccgtgtgccttcgcgtccgggttgggaacttgctgtgtcctaacctcccaactgctgtgctgtctgcctagggtcacctcctgtttgtgaaaggggaccttcttgttcgggggtgggaagtggcgaccgtgacctgagaaggaaagaaagatcctctgctgacccctggagcagctctcgagaactacctgttggtattgtccaacaagtctcccgagcgccccatcttgtgccatgttttaagtcttcatggatgttctgcatgtcatggggactaaaactcacccaacagatctttccagaggtccatggtggaagacgataaccctgtgaaatactttataaaatgtcttaatgttca

SEQ ID NO: 350006 - DNA, 1438 bp, Homo Sapiens
  misc_feature (1368)..(1387): n is a, c, g, or t
ctttagaagagcctagctgctgcgcgcgtcggagaggctcctgggaaactcccacggcccagggactttcgaaagcagagcgaggagccctcgcacgcgctagtctgcgagtgagcgctcagcccggcacctgttcctccagcgccgccgccttcccacccctcggacccgcgccgctcgcggcgcccgcccgttcctgcgatgaatccggccctaggcaaccagacggacgtggcgggcctgttcctggccaacagcagcgaggcgctggagcgagccgtgcgctgctgcacccaggcgtccgtggtgaccgacgacggcttcgcggagggaggcccggacgagcgtagcctgtacataatgcgcgtggtgcagatcgcggtcatgtgcgtgctctcactcaccgtggtcttcggcatcttcttcctcggctgcaatctgctcatcaagtccgagggcatgatcaacttcctcgtgaaggaccggaggccgtctaaggaggtggaggcggtggtcgtggggccctactgacccgccctctgcccccgcggcaaccgctcccacgcctgcccactttgctagcccggctgtgcccctcactatcagagactgggcgaagcaaacctgtcggagtcaattatttctctcgacttcggcctttcggaaagaagcgaccggtttctccctcgccctctgaaagtcctcatgcctggcagtcggaggagagcgcccagactctgaactcagcagaaagtggcaagaagagggcgattagggcgcagaactttggaagctgctacttacttggaatgcggggagaccgacggtgcgaaggcccttctccacccgcaggtgggccaagctctgggggcaggtggagagggcgggcaggggagagacccagcggcactgatcgccttgtgaccggaagagtgacctgttaaaagccacgcagcagactcatggggtctcacaaatccgtgtccgggtgcgctcccactcttctcctgctccccccctgccctggaggggaggggcgataaatacctttgattgtaacgtgccgttttaagaggttttgtgtttgtttgcttgaatacaaatgtttgataagtctttttctgccccagtggcctgtttgcctgcctgaggagttacagttttgtcattgtgggagaaggcctccccccagggggagcctgcgaatttgaacggggtgagttgtttcttttagtgcatttcccactgggtcttttgggaggcgtctagcgttcctgctggccctgggacaaagacccagaatagaactcgtagctcgtgactgcacggtttacgccacaaaagtgctcttgacatccgtgacaccgnnnnnnnnnnnnnnnnnnnncttatttaacatttccttaataaatgcaacatttaagcgttttaaaaaaaa

SEQ ID NO: 350007 - DNA, 1193 bp, Homo Sapiens
  misc_feature (47)..(83): n is a, c, g, or t
  misc_feature (1090)..(1090): n is a, c, g, or t
  misc_feature (1131)..(1131): n is a, c, g, or t
  misc_feature (1148)..(1148): n is a, c, g, or t
  misc_feature (1155)..(1155): n is a, c, g, or t
  misc_feature (1160)..(1160): n is a, c, g, or t
  misc_feature (1175)..(1175): n is a, c, g, or t
  misc_feature (1178)..(1178): n is a, c, g, or t
  misc_feature (1181)..(1181): n is a, c, g, or t
  misc_feature (1184)..(1184): n is a, c, g, or t
tgatagatcactatagggcgacccggagcttatcgcggtggcggcgnnnnnnnnnnnnnnnnnnnnnnnnnnnnnnnnnnnnnatcaagccaaatcggccgagctcgaagttcgtcgagagcggacttggacctgaaccttgctccgagagggagtcctcgcggacgtcagccaagattccagaatgactactatcttgacttacccctttaaaaatcttcccactgcatcaaaatgggccctcagattttccataagacctctgagctgttcctcccagctacgagctgccccagctgtccagaccaaaacgaagaagacgttagccaaacccaatataaggaatgttgtggtggtggatggtgttcgcactccatttttgctgtctggcacttcatataaagacctgatgccacatgatttggctagagcagcgcttacgggtttgttgcatcggaccagtgtccctaaggaagtagttgattatatcatctttggtacagttattcaggaagtgaaaacaagcaatgtggctagagaggctgcccttggagctggcttctctgacaagactcctgctcacactgtcaccatggcttgtatctctgccaaccaagccatgaccacaggtgttggcttgattgcttctggccagtgtgatgtgatcgtggcaggtggtgttgagttgatgtccgatgtccctattcgtcactcaaggaaaatgagaaaactgatgcttgatctcaataaggccaaatctatgggccagcgactgtctttaatctctaaattccgatttaatttcctagcacctgagctccctgcggtttctgagttctccaccagtgagaccatgggccactctgcagaccgactggccgctgcctttgctgtttctcggctggaacaggatgaatatgcactgcgctctcacagtctagccaagaaagcacaggatgaaggactcctttctgatgtggtacccttcaaagtaccaggaaaagatacagttaccaaagataatggcatccgtccttcctcactggagcagatggccaaactaaaacctgcattcatcaagccctacggnacagtgacagctgcaaattcttctttcttgactgatggggntctgcaatgttaatcanggggggnaaggntctggccaggggtanaancgnggnatttggagg

SEQ ID NO: 350008 - DNA, 2585 bp, Homo Sapiens
  misc_feature (2042)..(2042): n is a, c, g, or t
  misc_feature (2050)..(2060): n is a, c, g, or t
  misc_feature (2062)..(2067): n is a, c, g, or t
  misc_feature (2069)..(2082): n is a, c, g, or t
  misc_feature (2085)..(2101): n is a, c, g, or t
  misc_feature (2103)..(2105): n is a, c, g, or t
  misc_feature (2107)..(2107): n is a, c, g, or t
  misc_feature (2111)..(2113): n is a, c, g, or t
  misc_feature (2115)..(2119): n is a, c, g, or t
  misc_feature (2121)..(2121): n is a, c, g, or t
  misc_feature (2123)..(2123): n is a, c, g, or t
  misc_feature (2131)..(2146): n is a, c, g, or t
  misc_feature (2151)..(2151): n is a, c, g, or t
  misc_feature (2155)..(2155): n is a, c, g, or t
  misc_feature (2160)..(2174): n is a, c, g, or t
agcggctgggctaggacccgccccttggtcccgcagagccttggtacttggacctgaaccttgctccgagagggagtcctcgcggacgtcagccaagattccagaatgactatcttgacttacccctttaaaaaatcttcccactgcatcaaaatgggccctcagattttccataagacctctgagctgttcctcccagctacgagctgccccagctgtccagaccaaaacgaagaagacgttagccaaacccaatataaggaatgttgtggtggtggatggtgttcgcactccatttttgctgtctggcacttcatataaagacctgatgccacatgatttggctagagcagcgcgttacgggtttgttgcagtcggaccagtgtccctaaggaagtagttgattatatcatctttggtacagttattcaggaagtgaaaacaagcaatgtggctagagaggctgcccttggagctggcttctctgacaagactcctgctcacactgtcaccatggcttgtatctctgccaaccaagccatgaccacaggtgttggcttgattgcttctggccagtgtgatgtgatcgtggcaggtggtgttgagtcgatgtccgatgtccctattcgtcactcaaggaaaatgagaaaactgatgcttgatctcaataaggccaaatctatgggccagcgactgtctttaatctctaaattccgatttaatttcctagcacctgagctccctgcggtttctgagttctccaccagtgagaccatgggccactctgcagaccgactggccgctgcctttgctgtttctcggctggaacaggatgaatatgcactgcgctctcacagtctagccaagaaggcacaggatgaaggactcctttctgatgtggtacccttcaaagtaccaggaaaagatacagttaccaaagataatggcatccgtccttcctcactggagcagatggccaaactaaaacctgcattcatcaagccctacggcacagtgacagctgcaaattcttctttcttgactgatggtgcatctgcaatgttaatcatggcggaggaaaaggctctggccatgggttataagccgaaggcatatttgagggattttatgtatgtgtctcaggatccaaaagatcaactattacttggaccaacatatgctactccaaaagttctagaaaaggcaggattgaccatgaatgatattgatgcttttgaatttcatgaagctttctcgggtcagattttggcaaattttaaagccatggattctgattggtttgcagaaaactacatgggtagaaaaaccaaggttggattgcctcctttggagaagtttaataactggggtggatctctgtccctgggacacccatttggagccactggctgcaggttggtcatggctgctgccaacagattacggaaagaaggaggccagtatggcttagtggctgcgtgtgcagctggagggcagggccatgctatgatagtggaagcttatccaaaataatagatccagaagaagtgacctgaagtttctgtgcaacactcacactaggcaatgccatttcaatgcattactaaatgacatttgtagttcctagctcctcttaggaaaacagttcttgtggccttctattaaatactttgcacttaagccttgccagtgttctgagcttttcaataatcagtttactgctctttcagggatttctaagccaccagaatctcacatgagatgtgtgggtggttgtttttggtctctgttgtcactaaagactaaatgagggtttgcagttgggaaagaggtcaactgagatttggaaatcatctttgtaatatttgcaaattatacttgttcttatctgtgtcctaaagatgtgttctctataaaatacaaaccaacgtgcctaattaattatggaaaaataattcagaatctaaacaccactgaaaacttataaaaaatgtttagatacataaatatggtggtcagcgttaataaagtggaagaaatanttggaacnnnnnnnnnnnannnnnnannnnnnnnnnnnnntgnnnnnnnnnnnnnnnnncnnnanaaannncnnnnnananaaaagaannnnnnnnnnnnnnnnaaaantttngggannnnnnnnnnnnnnnaaaaaaatttttcccaaaccatttcttttgggccgcgcgggccccattataatacaaccaaaactgggccccacccggttcccaaaaagaaaaccctcggcccataaaacaaacggcttgtgcttctcccacccaaaaataacaagccccccccggccagtccacccgcccgctttttaagaaaaacacaccccaggggggggcgcctcttcgaggggtgtattaacgcggctttcaactccaacgagggggtggggtctccccgttagcacccctcccatttattacaagaacactatcgcgcacaccgccccgccgcatcataccctactcatacatcatatttccttccctcaccacatcacgtccccccagcattacgcggacccccacagtagcgtcactaacccc

SEQ ID NO: 350009 - DNA, 1154 bp, Homo Sapiens
  misc_feature (912)..(912): n is a, c, g, or t
  misc_feature (1021)..(1021): n is a, c, g, or t
ccccctaggaaaaacagttcctggtggcccctcccaattaaaaaaccttggcaccttaaagccctggcccagtgttcctgagccttttccaaataatccagtttacctgcctccttccagggatttcctaagcccacccagaatcctcacatgagatgtgtgggtggttgtttttggtcctctgttgtcactaaagactaaatgagggtttgcagttgggaaagaggtcaactgagatttggaaatcatctttgtaatatttgcaaattatacttgttcttatctgtgtcctaaagatgtgttctctataaaatacaaaccaacgtgcctaattaattatggaaaaataattcagaatctaaacaccactgaaaacttataaaaaatgtttagatacataaatatggtggtcagcgttaataaagtggagaaatattggaaaaaagaccaacgcgccaaatgaccaccttacaaaccaccccgcccacacagacgccaaccccaaagaaccaaccgtcgcacacgcagcgaaacaacccgaccaccaaccacggcatagagatcttgttccgcgcccccgccgccccccaaaaaaactttctcccaacacacattggcttgggcgagccccagggccccccccggaggaaaagggggcaccgggggaccccgacaccgctggtcccacacagacaagaaatcccggcggctccttgcaacaaaagggcggggtttggcagtatgttccgccccaccctatttataaacaaacacccccccgccgggcggccctttcaaacacgcaggagggaattcctctccaataacacacgtccacccacaagagggagaggcgtcctccaagaagagcgtactctataactggtagagggaacccagcggacaagcgcnggggtatgctctcacacgccgcgccgagtgtctcttcattctaatcgcagcatatataacccgctccacccgacacacacgggtcaagagcaaccagtaccgcggaacnagacgaacctcgaggtgcagcaccattctcatcgctacagcgctcgtctctataccgtccacccacatcaaactcaaaaagcaacctaccctctgtcactacgcacccagtgctttatcagacactacccccg

SEQ ID NO: 350010 - DNA, 906 bp, Homo Sapiens
taaggctaggtacgaggctgggtggtcgaatcggcacgaggggtgtggactcgagggctgggcgcggggccggcgcagaagccgccagctggagacgatggtggaccacttggccaacacggagatcaacagccagcgcatcgcggcagtggagagctgcttcggggcctcggggcagccgctggcgctgccaggccgagtgctgctgggcgagggcgtgctgaccaaagagtgccgcaagaaggccaagccgcgcatcttcttcctctttaacgacatcctggtgtatggcagcatcgtgctcaacaagcgcaagtaccgcagccagcacatcatccccctggaggaggtcacactggagctgttgccggagacgctgcaggccaagaaccgctggatgatcaagacggccaagaagtcctttgtggtgtcggccgcctccgctacggagcgccaggaatggattagccacatcgaggagtgcgtgcggcggcaactgagggccacgggccgcccgcccagcacggagcacgcggcaccctggatccccgacaaggccacggacatctgcatgcgctgcacgcagacgcgcttctctgccctcacgaggcgccaccactgccgcaagtgcggcttcgtggtctgcgctgagtgctcgcgccagcgcttcctgctcccgcgcctgtcccccaagcccgtgcgcgtctgcagcctctgctaccgcgaactggccgcccagcaacggcaggaagaagcggaagagcagggcgcggggtccccagggcagccagcccccctggccccggccatctgcggagcgtccagtggagatgacgatgactccgacgaaggacaggagggcagcaaggacggcgactggcccagcagcgtgggagtttcaccccc

SEQ ID NO: 350011 - DNA, 1046 bp, Homo Sapiens
gcttctcaaaagtctagagccaccgtccagggagcaggtagctgctgggctccggggacactttgcgttcgggctgggagcgtgctttccacgacggtgacacgcttccctggattggcagccagactgccttccgggtcactgccatggaggagccgcagtcagatcctagcgtcgagccccctctgagtcaggaaacattttcagacctatggaaactacttcctgaaaacaacgttctgtcccccttgccgtcccaagcaatggatgatttgatgctgtccccggacgatattgaacaatggttcactgaagacccaggtccagatgaagctcccagaatgccagaggctgctccccgcgtggcccctgcaccagcagctcctacaccggcggcccctgcaccagccccctcctggcccctgtcatcttctgtcccttcccagaaaacctaccagggcagctacggtttccttctgggcttcttgcattctgggacagccaagtctgtgacttgcacgtactcccctgccctcaacaagatgttttgccaactggccaagacctgccctgtgcagctgtgggttgattccacacccccgcccggcacccgcgtccgcgccatggccatctacaagcagtcacagcacatgacggaggttgtgaggcgctgcccccaccatgagcgctgctcagatagcgatggtctggcccctcctcagcatcttatccgagtggaaggaaatttgcgtgtggagtatttggatgacagaaacacttttcgacatagtgtggtggtgccctatgagccgcctgaggttggctctgactgtaccaccatccactacaactacatgtgtaacagttcctgcatgggcggcatgaaccggaggcccatcctcaccatcatcacactggaagactccagtggtaatctactgggacggaacagctttgaggtgcgtgtttgtgcctgtcctgggagagaccggcgcacagaggaagagaatctccgcaagaaaggggagcctcaccacgagctgccc

SEQ ID NO: 350012 - DNA, 3031 bp, Homo Sapiens
tgaaccaagaatgcttcatctggagaatttcaaagagacaaccaaccacctgttgtcgagggccattcaccaccctaagtgttaatgtatctctggtttcctaaagctgttaaacgtttaatgaaagaagcggcagaattgaaagatccaacagatcattaccatgcgcagcctttagaggataacctttttgaatggcacttcacggttagagggcccccagactccgattttgatggaggagtttatcacgggcggatagtactgccaccagagtatcccatgaaaccaccaagcattattctcctaacggctaatggtcgatttgaagtgggcaagaaaatctgtttgagcatctcaggccatcatcctgaaacttggcagccttcgtggagtataaggacagcattattagccatcattgggtttatgccaacaaaaggagagggagccataggttctctagattacactcctgaggaaagaagagcacttgccaaaaaatcacaagatttctgttgtgaaggatgtggctctgccatgaaggatgtcctgttgcctttaaaatctggaagcgattcaagccaagctgaccaagaagccaaagaactggctaggcaaataagctttaaggcagaagtcaattcatctggaaaagactatctctgagtcagacttaaaccactcttttttcactaactgatttacaagatgatatacctacaacattccagggtgctacggccagtacatcgtacggagtccagaattcctcagcagcatcctttcatcaacctacccaacctgtagctaagaatacctccatgagccctcgacagcgccgggcccagcagcagagtcagagaaggttgtctacttcaccagatgtaatccagggccaccagccaagagacaaccacactgatcatggtgggtcagctgtactgattgtcatcctgactttggcattggcagctcttatattccgacgaatatatctggcaaacgaatacatatttgactttgagttataatatggttttgtgacttatgagctgtgactcaactgcttcattaaacattctgcattgggtataatctaagaattgtttacaaaaagattattttgtatttacccttcattcctttttttgatccttgtaagtttagtataaatatatctagacattcagactgtgtctagcagttacgtcctgcttaaagggactagaagtcaaagttccttgtctcactatttgatctgctttgcagggaaataacttgttttttctcatgtttcatcttctttttatgtaaatttgtaatactttcctatattgccctttgaaatttttggataaaagatgatgttttaagttccaatgagtattactagttactcaataccacttattgagtactctgtttctacgtatgtagaatgtatagggatagaagagttgaaaagggaaagcaaaactcctcaagtagcttccttaaaatgtcattcataggagatgtactggaattgctcattctgtgactttatttgtgtcctaaacattcttcagtgaaaataattttatttcagtcaaacatttatgaggaaatgagatcacatctttgtcactggatgctacttgaagagggagtactttgtaaccactttgatatgctgttatcaccaccccctgccctctgctgccataatcacacaaatttaaaaagaaagaaaacagtcttccatagatttttaaggaagaaagggcccaagccaggagatcgcttggttttcttccagaagttaaatggggggatctgaagatttgaatgtttggtctgctttgaaatgtatgtcttttgggatgtattatatgcctagctttataatcagtataaattttaattattccaggaatatgcataatattgaaatatttcatgtcctattttaatagaaaacctcagggcccaagtaacagtgatagaagttagaaaaacctttacttagaattgtccacctagtcagagcccaagaaagaattttcagtggaaaaatcaatatataacttagtgctagctagcgccacagactctagtagataatattatcatcataatggctggtgaaaccatataatcacagaaaaacattgccttcagcatgttcagttcgcagcactgagggcactcttgagggtgttgttaatgaagatttaatttttaaatacaggtggttccaagctttcaaataggttatgctccaaaagtgttatttgtaagttaatttttttacaagtcaaacaatgttggaagtggtatttaggttctagatcggtccacgaaagttagcccatatgtatatcttgaatagtataggggagggtattcataaagtccttatgtggttttaactaagtgaaattatggacaagagaaataattgtaaaatcgtcttaaaggcaaatttaatttttactcctgtttatgggacattcgttctattaactgtcagacacaatttctgttttcatctgagagccagttttcctttatttctacatctaaaataagaacatattgtacactattatataatacagaattgtcttaaactttaataaattcgcattttaaaggtgtttacagattattttttatatctgtagctgaatttgttaaagtctaaaaagctcaaggactttatgaagatctcattatatgaggaaaatcataggttaccattttataactctattgccataagaaaatacactctaaaatcttgatttgaaacatattagaaaccttgattcagtgctcagtggtctcctagtaagaagtcaccgacggtagcgtcatatgagaagaaagaaatccccaccacctcaacctctgctgagattgtgtgctaggaacagccttccctccgtttcccctcagtcaaacttgagccagcctctggatcgatgtgatcttattgcatgtttccatggggtgtacctatactttaagccaatcctgctgcatt

SEQ ID NO: 350013 - DNA, 930 bp, Homo Sapiens
  misc_feature (87)..(122): n is a, c, g, or t
tccggcccccagacactgttctatatagggcctagcattacagctgaagacgagcgcacgcgagtcattgagcgaggaagcgtgcgnnnnnnnnnnnnnnnnnnnnnnnnnnnnnnnnnnnnagtcgacggtagccggacatatgcccgggaattcggacatatacggcgggtatgactctgcctttatagtgggggctcctgtggggcaggccagtgtcttacacagcttcgtcaccacatccccacatgtcccatcctgagcagtgcagtatggcattacctcggggtgccactcttagctgtcatatcacgaatcaccagtagctacttagctaatttcagtgcttttcgttttggcttaagttttcagaacttgcagtaaaatcagcatagtacaacaaggtgacagtgcggtttttcttccagacttcacgttctcatttccttatgtctcatgagcataaattccctgccatatctgcaatgcatatatattttccttccaacttcgtcatcgtttggtcttaatacatatggccaaacatgcatattacaccagtcgggtaatactcacttaccaatatgatctgccagatcattccgtattcagcacatacgtctgtttctcgtccagtgtcatctacacctcacaacaactctgtactcccctgttactcccccatttacagaggagactggaggtctggagatattcactgcactggctggagggtcaccaccaatgactaagagcgacagtccacctttgcctcagcagtcctgcaaagctcctggacaatagactcttcacatggtccatgtggcctcactcttccaaccgtggtgtcatgagtaccctgtacgatctctaggaggactccctcaatctgcacactggtagtacaaggtgtatgcattacacaattgt

SEQ ID NO: 350014 - DNA, 521 bp, Homo Sapiens
  misc_feature (475)..(475): n is a, c, g, or t
gttcgtcccctttgtgaggcccgggatgggaggtgcccggttcccccagggacagcttcaagcggtagggacagacatctgaggacccagcctcagggatgctgtccccgggcttccaggctccagcgccgtaggactgaggcagactccacggtgagaaagagacccgatctaacccaggcctttcatcagagcccaggagggaaggcaggaagtgggaccacgaggcccggggggcttctaactcgtctgtccagggagatctgaattggggtgaagagcagaatctccaaaacaaggaggaggtggtgatcatggagacagatttggctgaaatgcctgagaaaggagctctgtcttcccaggattctccccatttccaagagaagagcacagaagagggagaagtggctgctctgcgcctcacggccagatcccaggaaacagtgacattcaaggatgtggccatggactntacaccagaggagtgggggaagctggatcctgcacaaagggatgtg

SEQ ID NO: 350015 - DNA, 828 bp, Homo Sapiens
  misc_feature (121)..(121): n is a, c, g, or t
  misc_feature (628)..(628): n is a, c, g, or t
gcggtggccgtccgagcgccgagaggtgagggtgcccccgcctcacctgcagaggggccgttccgggctcgaacccggcaccttccggaaaatggcggctgccaggcccagcctgggcgangtcctcccaggatcctctgtcctgttcctgtgtgacatgcaggagaagttccgccacaacatcgcctacttcccacagatcgtctcagtggctgcccgcatgctcaagaacacgaccctggacctcctagaccgggggctgcaggtccatgtggtggtggacgcctgctcctcacgcagccaggtggaccggctggtggctctggcccgcatgagacagagtggtgccttcctctccaccagcgaagggctcattctgcagcttgtgggcgatgccgtccacccccagttcaaggagatccagaaactcatcaaggagcccgccccagacagcggactgctgggcctcttccaaggccagaactccctcctccactgaactccaaccctgccttgagggaagaccaccctcctgtcacccggacctcagtggaagcccgttccccccatccctggatcccaagagtggtgcgatccaccaggagtgccgcccccttgtggggggggncagggtgctgccttcccattggacagctgctcccggaaatgcaaatgagactcctggaaactgggtgggaattggctgagccaagatggaggcggggctcggccccgggccacttcacggggcgggaaggggaggggaagaagagtctcagactgtgggacacggactcgcagaataaacatatatgtggctgtgaaaaa

SEQ ID NO: 350016 - DNA, 992 bp, Homo Sapiens
  misc_feature (978)..(978): n is a, c, g, or t
ggggcggattggccggagagagcggcgaggcagagcatgatgagtgtcgattggacggctgggcccaagtgggcggaaaacggacggtgcagggggtgggccacgtgtccagccctaacgaaacggtaaccagccctgggaagcccgcaagaggcctcagcggtggccgtccgagcgccgagaggtgagggtgcccccgcctcacctgcagaggggccgttccgggctcgaacccggcaccttccggaaaatggcggctgccaggcccagcctgggccgagtcctcccaggatcctctgtcctgttcctgtgtgacatgcaggagaagttccgccacaacatcgcctacttcccacagatcgtctcagtggctgcccgcatgctcaaggtggcccggctgcttgaggtgccagtcatgctgacggagcagtacccacaaggcctgggccccacggtgcccgagctggggactgagggccttcggccgctggccaagacctgcttcagcatggtgcctgccctgcagcaggagctggacagtcggccccagctgcgctctgtgctgctctgtggcattgaggcacaggcctgcatcttgaacacgaccctggacctcctagaccgggggctgcaggtccatgtggtggtggacgcctgctcctcacgcagccaggtggaccggctggtggctctggcccgcatgagacagagtggtgccttcctctccaccagcgaagggctcattctgcagcttgtgggcgatgccgtccacccccagttcaaggagatccagaaactcatcaaggagcccgccccagacagcggactgctgggcctcttccaaggccagaactccctcctccactgaactccaaccctgccttgagggaagaccacctcctgtcacccggacctcagtggaagcccgttccccccatccctggatccccagagtggtgcgaaccaccaggagtgcgncccctgtggggggg

SEQ ID NO: 350017 - DNA, 278 bp, Homo Sapiens
  misc_feature (72)..(72): n is a, c, g, or t
  misc_feature (79)..(79): n is a, c, g, or t
  misc_feature (81)..(92): n is a, c, g, or t
  misc_feature (173)..(173): n is a, c, g, or t
  misc_feature (185)..(185): n is a, c, g, or t
ccggacctcagtggaaacccgttccccccatccctggatcccaaaaatggttcgatcccccaggagtgccgnccccttntnnnnnnnnnnnncagggtgctgccttcccattggacagctgctcccggaaatgcaaatgagactcctggaaactgggtgggaattggctgagnccaagatggagnggggcctcgccccgggccacttcacggggcgggaaggggaggggaagaagagtctcagactgtgggacacgtactcgcagaataaacatatat

SEQ ID NO: 350018 - DNA, 401 bp, Homo Sapiens
  misc_feature (390)..(390): n is a, c, g, or t
gacgaccctgggacctcctagaccgggggctgcaggtccatgtggtggtggacgcctgctcctcacgcagccaggtggaccggctggtggctctggcccgcatgagacagagtggtgccttcctctccaccagcgaagggctcattctgcagcttgtgggcgatgccgtccacccccagttcaaggagatccagaaactcatcaaggagcccgccccagacagcggactgctgggcctcttccaaggccagaactccctcctccactgaactccaaccctgccttgagggaagaccaccctcctgttcacccggacctcagtgggaagcccgtttccccccatccctgggattcccaagagtgggtgcgattccaacagggagttgccgncccctttttgg

SEQ ID NO: 350019 - DNA, 1008 bp, Homo Sapiens
ccccctcctccagcccccacgcgacgaacgacgggcgtctcttagcactctttccccgcttccctttacccacccaccgggccatctaaagaggctggtaccggtccggaattctgcgaacaggggtgaggcgtgggagggttgccctgggtgttgctagagaggctggctggatgcactcgtgtgtgatgttgcccactttgtccacagggcaccatgaaacgccattcttcacgggacgctgctgggaaaccccagagacctcggtctgcccccagaaccagcagctgtgcagagagattgcagtcagaggagcaggtgtccaagaacctctttgggccgcccctggagtcagcctttgaccacgaagattttacaggctctagcagcctgggcttcacctccagcccctcccctttctcctcctcgtcgcccgaaaacgtggaggattccggcctggactctccgtcccacgcggcacctggcccctccccagattcctgggtcccccgcccaggcaccccgcagagcccgcccagctgtagggcgccacccccagaggccaggggtatccgggcaccgcctctgccagactcgccgcagcccctcgcctcgtctccaggcccctgggggctggaggccttggccggaggagacctgatgccctgcacctgctgaccccacagccagggagggcctggcagccccacccaggagacttcgctctaggaaggtgtcctgccctctcacacgtagcaatggggacctgtctcgttcccctgagcccctccccactgggctcttcagccgccagcactgccttggaacgggccagcttcttatcccagacaggacacggagtctcccggggtccgagccctgtggtcctgggctcccaggatgccctgcccatagccacagccttcacagagtatgtccacgcctacttccgtggccacagccccagctgctggctcgagtaactgaggagctgaccatgaccttccc

SEQ ID NO: 350020 - DNA, 889 bp, Homo Sapiens
  misc_feature (737)..(737): n is a, c, g, or t
  misc_feature (739)..(739): n is a, c, g, or t
ggcccctgggctctgatttgtcctttgcattgagaacggtgtggggatcagtgtgtgtgtatgtgatttgtttattgagttggctttgcttttttagtttttcttttaaaaataaaatccttccttcccatgttactaaattaatttatgtttttgagaggttgagtctcaaagtgtaaacaataaacctccattcataagatggatgttgtaagcttgatggtggttgtgaaagtgatttagctttgaccacttttcatcctacagcttcaatatcaaactggttaggaaagcccagggggaagggagggggcaggggaggaggcaattctgaatgaatgaatggattttttgttgtttttgcatgtttaatatagaagttcccctcgttccttgggagatgatggcctttgaatatgcagacaacctttgaattgtgcctactaaattatagcaggggactttggcacccaaggagttctgactttctgggattataatagtaattcccagccatactctggactttattttgctaaccataactgagcaaatgtaaattactgctatattaatgttttaaagcactgggatagtctaattctaacttgtaattaattatgtttgccaattatctgtttgaaataaatttgtgtctgaacagctattgaaactgttaaattgtacagatattattcatgacagctttgtactgtggaatgtgcttaataaaaaananaaaagtttgacttttgtccagtaaattgctaagtaatgtcaataaatcgagtatgggtattatgcagtgcacctaatctggcttcatgcaattgttacttcagctactgattcaaagccaatactcttaataaagtgttgcaatactctg

SEQ ID NO: 350021 - DNA, 3155 bp, Homo Sapiens
  misc_feature (187)..(223): n is a, c, g, or t
  misc_feature (267)..(311): n is a, c, g, or t
  misc_feature (475)..(500): n is a, c, g, or t
agcggaacggcggatcccgcagctgcaggaggcgcccggcccggcggagcagccctagccgccaccgtcgctctcgcagctctcgtcgccactgccaccgccgccgccgtcactgcatcctggctccggctcccgcgccctcccggccggccatgcagccccgccgcgcccaggcgcccggtgcgcnnnnnnnnnnnnnnnnnnnnnnnnnnnnnnnnnnnnncggagcggggccccgaggcagctccctggccaacccggtgcccnnnnnnnnnnnnnnnnnnnnnnnnnnnnnnnnnnnnnnnnnnnnncggaatgggggtgtgtgcacctcgcgccctgagccggacccgcagcacccggcccccgccggcgagcctggctacagctgcacctgccccgccgggatctccggcgccaactgccagcttgttgcagatccttgtgccagcaacccttgtcaccatggcaactnnnnnnnnnnnnnnnnnnnnnnnnnngatggctacctctgcatttgcaatgaaggctatgaaggtcccaactgtgaacaggcacttcccagtctcccagccactggctggaccgaatccatggcaccccgacagcttcagcctgttcctgctactcaggagcctgacaaaatcctgcctcgctctcaggcaacggtgacactgcctacctggcagccgaaaacagggcagaaagttgtagaaatgaaatgggatcaagtggaggtgatcccagatattgcctgtgggaatgccagttctaacagctctgcgggtggccgcctggtatcctttgaagtgccacagaacacctcagtcaagattcggcaagatgccactgcctcactgattttgctctggaaggtcacggccacaggattccaacagtgctccctcatagatggacgaagtgtgaccccccttcaggcttcagggggactggtcctcctggaggagatgctcgccttggggaataatcactttattggttttgtgaatgattctgtgactaagtctattgtggctttgcgcttaactctggtggtgaaggtcagcacctgtgtgccgggggagagtcacgcaaatgacttggagtgttcaggaaaaggaaaatgcaccacgaagccgtcagaggcaactttttcctgtacctgtgaggagcagtacgtgggtactttctgtgaagaatacgatgcttgccagaggaaaccttgccaaaacaacgcgagctgtattgatgcaaatgaaaagcaagatgggagcaatttcacctgtgtttgccttcctggttatactggagagctttgccagtccaagattgattactgcatcctagacccatgcagaaatggagcaacatgcatttccagtctcagtggattcacctgccagtgtccagaaggatacttcggatctgcttgtgaagaaaaggtggacccctgcgcctcgtctccgtgccagaacaacggcacctgctatgtggacggggtacactttacctgcaactgcagcccgggcttcacagggccgacctgtgcccagcttattgacttctgtgccctcagccccctgtgctcatggcacgtgccgcagcgtgggcaccagctacaaatgcctctgtgatccaggaacacactgtgaattgtacaaggatccctgcgctaacgtcagctgtctgaacggagccacctgtgacagcgacggcctgaatggcacgtgcatctgtgcacccgggtttacaggtgaagagtgcgacattgacataaatgaatgtgacagtaacccctgccaccatggtgggagctgcctggaccagcccaatggttataactgccactgcccgcatggttgggtgggagcaaactgtgagatccacctccaatggaagtccgggcacatggcggagagcctcaccaacatgccacggcactccctctacatcatcattggagccctctgcgtggccttcatccttatgctgatcatcctgatcgtggggatttgccgcatcagccgcattgaataccagggttcttccaggccagcctatgaggagttctacaactgccgcagcatcgacagcgagttcagcaatgccattgcatccatccggcatgccaggtttggaaagaaatcccggcctgcaatgtatgatgtgagccccatcgcctatgaagattacagtcctgatgacaaacccttggtcacactgattaaaactaaagatttgtaatctttttttggattatttttcaaaaagatgagatactacactcatttaaatatttttaagaaaataaaaagcttaagaaatttaaaatgctagctgctcaagagttttcagtagaatatttaagaactaattttctgcagcttttagtttggaaaaaatattttaaaaacaaaatttgtgaaacctatagacgatgttttaatgtaccttcagctctctaaactgtgtgcttctactagtgtgtgctcttttcactgtagacactatcacgagacccagattaatttctgtggttgttacagaataagtctaatcaaggagaagtttctgtttgacgtttgagtgccggctttctgagtagagttaggaaaaccacgtaacgtagcatatgatgtataatagagtatacccgttacttaaaaagaagtctgaaatgttcgttttgtggaaaagaaactagttaaatttactattcctaacccgaatgaaattagcctttgccttattctgtgcatgggtaagtaacttatttctgcactgttttgttgaactttgtggaaacattctttcgagtttgtttttgtcattttcgtaacagtcgtcgaactaggcctcaaaaacatacgtaacgaaaaggcctagcgaggcaaattctgattgatttgaatctatatttttctttaaaaagtcaagggttctatattgtgagtaaattaaatttacatttgagttgtttgttgctaagaggtagtaaatgtaagagagtactggttccttcagtagtgagtatttctcatagtgcagctttatttatctccaggatgtttttgtggctgtatttgattgatatgtgcttcttctgattcttgctaatttccaaccatattgaataaatgtgatcaagtcaaaaa

SEQ ID NO: 350022 - DNA, 1545 bp, Homo Sapiens
  misc_feature (437)..(437): n is a, c, g, or t
gtaaagaagaggggaaccaggagaagggtcaccgagccgggtgccagagtgggcgcggcccgggcctggggccaactcgggcctgggtaattcaaaaggcgaagggtcaagtcggaatgggggagcggaattcgagcgtaatcggaaaagtgaagggggatgaactggtgaaaagaccggaggagtgcatcgttagtgaatcagggaccaggttgtcatcagacgtatcttcataggcgaggggctcacatcaaacatgcaaggccgggatttcttccaaacttgcatgccggatggatgcaatggcattgctgaactcgctgtcgatgctgcggcagtttgtagaactcctcatagctggcctggaagaacctggtattcaatgcggctgatgcggcaaatccccacgatcaggatgatcagcataaggatgaagnccacgcagagggctccaatgatgatgtagagggagtgccgtggcatgttggtgaagctctccgccatgtgcccggacttccattggaggtggatctcacagtttgctcccacccaaccatgcgggcagtggcagttataaccattgggctggtccaggcagctcccaccatggtggcaggggttactgtcacattcatttatgtcaatgtcgcactcttcacctgtaaacccgggtgcacagatgcacgtgccattcaggccgtcgctgtcacaggtggctccgttcagacagctgacgttagcgcagggatccttgtacaattcacagtgtgttcctttgtattctgccaggcacacacactcatagccattaacgaggtccctgcaggtggctgcattcaggcatggagcggagaggcactcattatattcctcctcacagtagaggccatggtaacctggatcacagaggcatttgtagctggtgcccacgctgcggcacgtgccatgagcacaggggctgagggcacagaagtcaataagctgggcacaggtcggccctgtgaagcccgggctgcagttgcaggtaaagtgtaccccgtccacatagcaggtgccgttgttctggcacggagacgaggcgcaggggtccaccttttcttcacaagcagatccgaagtatccttctggacactggcaggtgaatccactgagactggaaatgcatgttgctccatttctgcatgggtctaggatgcagtaatcaatcttggactggcaaagctctccagtataaccaggaaggcaaacacaggtgaaattgctcccatcttgcttttcatttgcatcaatacagctcgcgttgttttggcaaggtttcctctggcaagcatcgtattcttcacagaaagtacccacgtactgctcctcacaggtacaggaaaaagttgcctctgacggcttcgtggtgcattttccttttcctgtacactccaagtcatttgcgtgactctcccccggcacacaggtgctgacccgacgcgtgggtcgacgatatcccgggattccgggaccgtacagcctgcttttacacacggttaataccca

SEQ ID NO: 350023 - DNA, 680 bp, Homo Sapiens
gattccctccggtactgagctctcagcagcagaaggatcctcaaggttggatgtcaaaggcctctgtgtcctcttctccgcctccttcatcatcataggtgaccacgttctcccgtacatcctcttctgaaatgatcaagggctcttttttgctgcgcctcagggtgataaaaagtaccacaattgccaggagaatgagaacacagagaagaatagcgattaaggctcctgtactcaaaccagccgaggacaggaaggcttctgcatggcaggtccgcacacgcccatctctctcgcatgcacaaaccctgatggtgagggtgctgctgctgcttcattgtccttcagagtgaagtttggatttacaggcaggcgttcatcaagaaagaagttaaaccttggtccattggcaaaatcatctttatcagtggcactgatggtatgaataacctggccaggcttagaattttcacatacaataatatcatattccctggcaagttcgggtggattgtcattgacatccagaactctaatacccactgtgacatggctcagcaaatcaggattatcaatttctgaagcagtgactgtgatgttgtaccatggagtttcttctctgtcgagaacctttgtagtcctaatggtcccagtattggcatcaatgttgaaaaatctcc

SEQ ID NO: 350024 - DNA, 1717 bp, Homo Sapiens
agcgagtggatattagagttctggatgtcaatgacaatccacccgaacttgccaggaatatgatattattgtatgtgaaaattctaagcctggccaggttattcataccatcagtgccactgataaagatgattttgccaatggaccaaggtttaacttctttcttgatgaacgcctgcctgtaaatccaaacttcactctgaaggacaatgaagataacacagccagcattctgacaaggcggaggagatttagtcgaactgttcaggatgtgtattatctgcccattatgatctctgatggtggaatcccctctctcagcagcagcagcaccctcaccatcagggtttgtgcatgcgagagagatgggcgtgtgcggacctgccatgcagaagccttcctgtcctcggctggtttgagtacaggagccttaatcgctattcttctctgtgttctcattctcctggcaattgtggtactttttatcaccctgaggcgcagcaaaaaagagcccttgatcatttcagaagaggatgtacgggagaacgtggtcacctatgatgatgaaggaggcggagaggaagacacagaggcctttgacatcacagccttgaggaatccttctgctgctgaggagctcaagtaccggagggatatcagacctgaagtgaagctcactcccagacaccagacatcatccaccctggaaagcatagatgttcaggaatttattaagcaaagactggcagaagcagacctagaccctagcgttcccccttatgactctcttcagacttatgcctatgagggtcagagatcagaagctgggtctatcagctcgctggattcagcaacgacacaatcagaccaggattatcactaccttggagactggggacccgagtttaaaaagttagctgaactctatggagaaatagaatctgaaagaacaacttagggggtcagttcttgcaaccttgtggaatttgcttcctgagtaagtggatatacaacctcagcaatgacaaggaagaagtgtggaaacagtacttggaactgaggaagctggacacagctcctgtagaaacaagtgcccttttcatgatcgaaactgggttatttaattggaagaaagtaagaaaaaaacatagacatggacatatacgcagagaaaaaaggttattggtcgcctggtggtatattgccaatggctcaataaaggctcggggggtccctggttctattaggaatacctgaattaagccaacacaatgatcttcggtttcaagtatgtggcggatcttatttttgtcaaaagcaaacattaaacagaaaggctcaagatcctggctggttatgacttatagggggggtaaccctaatagacggaaactggtgagcggtaatcacgacctcttttatcacttttctgggtgaaaccttgagaaccacactctgtgttgttaacagatctcatgagccttgtcctggtgtctatattacctgaggtattgccgcactctatcagtggcttgtttggtcccatttcccttttgcccgtcccaagttccttttctccccagtaacaaaaactgatggcagcatgggggaaatttgctgcctgcgctatatatgttttgccactttccggtgcccccgttggtgtgcttgtaccttggagcacgaaaactatttggctcctatccccggtaaaccc

SEQ ID NO: 350025 - DNA, 1607 bp, Homo Sapiens
  misc_feature (1545)..(1547): n is a, c, g, or t
ggtccggaattctcgggatgcccagtccctccattccagatggaattccagagcggaatacggattccgattttaaaataagcgcttctaaatctttctccttgcatctaagacgggtgggggaaagaaagggagaggagttgaggtcccaaggttcaaggcctggtgatctccaggtcccaggctgggcggcctcggtgcacggagagggcgaggggcgtgttgtggagccttggcaaggcgctgctcttcctcgcgcctcggtttgcggtctgtgaaatggggttggcagtgcctttgcagggacgcggcgaactcaagcaccagcaagcggactcgaactcaaagggtttcagggtgtagacgaccagagcgcactgaggggctccaggtcggcccgctccggagccgggagagtaaccgcgtgcagggaaaggcgcacggcagcctcggtgcctcccttccctccaccggacgggtgactgactaggggtgaggtcctcacctccaggctgcgcagctgagttctggaagctgcgtcaagagaggcccaggacaccaagagccagctgtggccagagccctttcactgacccagaacactggccctcggaaacctggagaactgcgagggcttttaatgcggctgagaagaaagtgaagaccccgactcctcctctctccttcgaaagagccgacacaggagccacttcaaccggttgtcgccccagtggccgccctctgagcacgtgttactgccagtctgcgtcagcgttgggtaaatacatgactggccgacgccgccggggcggggctatttaagagacagccgcccgctggtcctccctgaacttggctcagctgccgggctgctccggttggaaacgccaagccagctgcgtcctaatccaaaagccatgaacagcggcgtgtgcctgtgcgtgctgatggcggtactggcggctggcgccctgacgcagccggtgcctcccgcagatcccgcgggctccgggctgcagcgggcagaggaggcgccccgtaggcagctgagggtatcgcagagaacggatggcgagtcccgagcgcacctgggcgccctgctggcaagatacatccagcaggcccggaaagctccttctggacgaatgtccatcgttaagaacctgcagaacctggaccccagccacaggataagtgaccgggactacatgggctggatggattttggccgtcgcagtgccgaggagtatgagtacccctcctagaggacccagccgccatcagcccaacgggaagcaacctcccaacccagaggaggcagaataagaaaacaatcacactcataactcattgtctgtggagtttgacattgtatgtatctatttattaagttctcaatgtgaaaaatgtgtctgtaagattgtccagtgcaaccacacacctcaccagaattgtgcaaatggaagacaaaatgttttcttcatctgtgactcctggtctgaaaatgttgttatgctattaaagtgatttcattctgaaaaaaannnaccctggcgttccccaatttcgccttgaggacatcccctttcgcagctggcgtgcgaggc

SEQ ID NO: 350026 - DNA, 896 bp, Homo Sapiens
  misc_feature (675)..(692): n is a, c, g, or t
agggtacaggtcggcccgctccgggagccgggaagagtaaacccgcgtgcagggaaaaggcgcacggcagcctcggtgcctcccgttccctccaccggacgggtgactgactaggggtgaggtcctcacctccagctgcgcagctgagttctggaaggtactgtcctggggggtgtgagtgtgtgggccctcaggaaaggtgcgagggccggatgccgtggtctacccgagcttgcgggggtgcggtggtcaagttccccaggaccctcgctggcgccgcttgtcgacaacggggaacagtgggcgccgcgggtggtggtaacttggcccgggaagaaaacacatccctgttcccaaaccggattcctctgagcaaaaccagatggtgtcatccgcattttacagctgcgtcaagagaggcccaggacaccaagagccagctgtggccagagccctttcactgacccagaacactggccctcggaaacctggagaactgcgagggcttgtaagacggatgagaagaaagtgaagaccccgacgtcctcctctctccttcgaaagagccgacacaggtaggaagaccagcgcctcggacgctccggggtagggggccgacgccccctccctttcagaatcacgccttgctgatgctcagtcctgcccagtgtccannnnnnnnnnnnnnnnnnagtttcctttctagcccctccggtccccaaagcgaactaagctagcggcagcttctccatcccggaggagactccaaactcctaggtttcccaccttggagagtactgctctggaatgcgcaggggagcggcacctggaaagggttgggcggaagcatctcggacccagagggggcggacacccgatcccgggaattccggacc

SEQ ID NO: 350027 - DNA, 366 bp, Homo Sapiens
  misc_feature (82)..(131): n is a, c, g, or t
  misc_feature (269)..(269): n is a, c, g, or t
  misc_feature (282)..(282): n is a, c, g, or t
  misc_feature (285)..(286): n is a, c, g, or t
  misc_feature (288)..(288): n is a, c, g, or t
aacagaaaccatgcctttcaatataagaaataaatgtgatgatcatgtaaaatgtgaaaaattgaaagcattccagcaaaannnnnnnnnnnnnnnnnnnnnnnnnnnnnnnnnnnnnnnnnnnnnnnnnngaaggtcgcattatggacagacttcgtgaatgggaatttgcttagaattgtgagtagttctgaattagaaaagtatgtgaaggaaaggcagctgtaaacgtattgtgccctggagagttgtacacatgttgaaatgtnatctgggggctanccnngntccatttggagtggatgtcactgccgagtctgttctcacatggaaccatgtgtgtgggggttgcaggcctcacagatt

SEQ ID NO: 350028 - DNA, 1836 bp, Homo Sapiens
  misc_feature (20)..(20): n is a, c, g, or t
tggaccggtccggaattccncgggattcccaatcagtttccagccaacaccagggtgtcctagtccgcagaggtgtgggggacacactccataatctctacttttctttttgtgcagctgagtcatggagctttcagccccagcacatggctcctccttaactgcgtctgctcaacctccctcagccctgtgaacagcatccccgcacacagacgcagagcaggactctctctgctgccacttcaccttcctgagagaggaccagcggccagagcctcagtgactgccaccctggaggacagggcacaacaaccgtttctggagagaatgggaggattccagaggggcaaatatggaactatggctgaaggtagatcagaagataacttgtctgcaacaccaccggcattgaggattatcctagtgggcaaaacaggctgcgggaaaagtgccacagggaacagcatccttggccagcccgtgtttgagtccaagctgagggcccagtcagtgaccaggacgtgccaggtgaaaacaggaacatggaacgggaggaaagtcctggtggttgacacgccctccatctttgagtcacaggccgatacccaagagctgtacaagaacatcggggactgctacctgctctctgccccggggccccacgtcctgcttctggtgatccagctggggcgtttcactgctcaggacacagtggccatcaggaaggtgaaagaggtctttgggacaggggccatgagacatgtggtcatcctcttcacccacaaagaggacttagggggccaggccctggatgactatgtagcaaacacggacaactgcagcctgaaagacctggtgcgggagtgtgagagaaggtactgtgccttcaacaactggggctctgtggaggagcagaggcagcagcaggcagagctcctggctgtgattgagaggctggggagggagcgagagggctccttccacagcaatgacctcttcttggatgcccagctgctccaaagaactggagctggggcctgccaggaagactacaggcagtaccaggccaaagtggaatggcaggtggagaagcacaagcaagagctgagggagaacgagagtaactgggcatacaacgcgctcctcagagtcaaacacttgatgcttttgcattatgagatttttgtttttctattgttgtgcagcatactttttttcattatttttctgttcatctttcattacatttaaatctctggaccctggagcacttctaatgtatcaccccatggagtcattgttctaataatcaccaattcagactcagatcctcgtggtctatggagcatgctgcttgctgtctgtgcagctcccatttccccttcttcctgatagacttggagctgtgtgcctccactccaaggctgcctgcctgctgtaaacactattccactctgtctgccaacaactgcttcaggaatgggcctgagatcccatgcaggtccctgagaagtgagtaaaagtccgcagaggtggggatggaagatctctccttagatagaacctgtcttcctccctggcattgtggggtctgggcgtgacactgggactctcagcagctttgtgctgccaacctgagattgaaggcagtgcctcagagcagcacagagagttggggccccctgagccctgagccaccagccctgcagcctgccctatctccgcatttccagttgtattagccaatagatttcctacttatttaagctatttgagctccgggtctcttctacctgcattctaaaacattcaaagtaataaaaatttctccacaaa

SEQ ID NO: 350029 - DNA, 667 bp, Homo Sapiens
  misc_feature (298)..(310): n is a, c, g, or t
  misc_feature (328)..(328): n is a, c, g, or t
actgggctgtgtatggtccctaaagcctcaactctgccccagctgggcgatgggtgcccctctctgggcttcctgcctagcttccccttctgcctccagcctggagccttgctttccctggagacaagcccgtggagtcccccaccacactggagggagcacgaccaccacactgctgggcctggcagacaccacatctttggcagggctcctggacgggcatgccttatgccgctctgcagggtcagagtggaaaagggccctttgccctggctggcctgtgccctcacccttgagnnnnnnnnnnnnnactccacccctggcctcnggatgcggctaatttctcagccatggagccagctgcacccagccctcgagggggtaattttggttcccccggcaagtgaaaggattatccctcagtgttgattgtccttttttgtaatccctcctgctgttctgttcctgttgtgctgtgcaacattttgcctacatagactattttatagcagaaagctagaagaatatttattatgaatattaaagcaatagtgcatcaatgaaaaggcggagacattaggaattgtgtaaatgcttagattcacttttggtggattttttgtactttatttataactaataaaaatgaactgcattgctaactaca

SEQ ID NO: 350030 - DNA, 1120 bp, Homo Sapiens
  misc_feature (1052)..(1062): n is a, c, g, or t
agcgggacaggactacgcgcctggagtaggagaaggaggaaaaaagagaccatagacttccatcctggcctagagcggcccttaaagtgccaggagaggagggcgggtggggaccactccagaattggccgctggcggtatcatggcgacccggaacccccctccccaagactatgaaagtgatgacgactcttatgaagtgttggatttaactgagtatgcaagaagacaccagtggtggaatcgagtgtttggccacagttcgggacctatggtagaaaaatactcagtagctacccagattgtaatgggtggcgttactggctggtgtgcaggatttctgttccagaaagttggaaaacttgcagcaactgcagtaggtggtggctttcttcttcttcagattgctagtcatagtggctatgtgcagattgactggaagagagttgaaaaagatgtaaataaagcaaaaagacagattaagaaacgagcgaacaaagcagcacctgaaatcaacaatttaattgaagaagcaacagaatttatcaagcagaacattgtgatatccagtggatttgtgggaggctttttgctcggacttgcatcttaaggacatgaatattctcccataacggattcaactatgagaagagaagtggcagcaataaggcagtctctcaaaagtcatactgccagagtctctagggcaaggagaaacaactagctggacaatactcaattcacaacttagcattttgccatctgaagcttggcaaactagtatctgctgtaaaacaacctatatggtatgtgaaccgtagtattcctgagcaaaacgtggctttcatcgctttgtaaaaatttgcatctgtttagaaactagcctataaaatatcaccattggatgtagatatggagagaaaagaaatatgttgggtttattgcttagcgaaatattctctttttatttaaataaaatgttcttcattgtgttttatggtatgtgtccataatttaaaattcatgttatagtttcagtattaaggctgacnnnnnnnnnnnaagatatgtttgcaattaggttaaaaaactggaattctgaaataaaaaatgcaagaaa

SEQ ID NO: 350031 - DNA, 498 bp, Homo Sapiens
  misc_feature (329)..(364): n is a, c, g, or t
aactgctcaataaggttcaaaattaatgttcaaaattaagaaatgtcaaaacattacctttgggttggcattcagataaacgtggggaaggggaaacttgaaatgcacaagcataaaagtaacctgtacattggttataaggaatgaaattggtgaccctcatttgtcaaaatgggctcctcccagtaaggaatgacagcttcagatgactttctgacatttttccccctaatcaacattcatttacagagtacttttgcagtcaccggggagatacaatgatgtacaagatacagccctgccttctgtagtttcaatctaacaggatnnnnnnnnnnnnnnnnnnnnnnnnnnnnnnnnnnnncttttcagataagatataagtggtataatattgctagaatgttctgggaattcagagacttgagctctcccctgattggggggatcaggactttgacctaggcattggagtacagataagagatacacgtgaaa

SEQ ID NO: 350032 - DNA, 1098 bp, Homo Sapiens
gtatatcatacacacataaagtttactggcttctgcaaacaaattttgagcccattaaccaaccagcctggtcaacgaatgtacatctaaagtaagatatatacgtgctaaaattgtttttaactaaaaatgccatatgtagtgtagaaatgaaaactagacactatttcattcgcatccattgagataatagtggtgagcacttaggataagcaccaggcttgacttgctgctcttgtcacttgtccttggaaatttaggctctattacaccaccaactctcaaatcatttccctgttgtagagctaaacttgacgtcctacagaatttctctaacttaacatgttgagtctctgagagtgcaaaacttgaaacaagagaaagtggcctgcctggcatcctctgcttattgaatggttttatttaattctcctttacattgccaccttaacaatccttccagctacgtatcttaaaggatgtgatggagaagttatcaactggtgttttcagacctcagttggatgaacccattccactgtatgaggcaaaagtttccatggaagctgttcagaaaaatcaaggaaagaaaaaagcaagttggttcaaattttaattttcttctttctcagacctcagtcggatgaacatattccagtatttgaagcccagaattttctttggaaattgttgagaaaaaccaaggaagataaaacaagttgcatttttaagcacgtttctctgctaagacaagatgctcagttgacacatttgaaaagtgtttgaaaaattcttgtgcaaatgatcaagataattctataattaacatcttaagggaatttttctaaaaaccttttcattgtttctatatattttgcccctgctataaaattccttccatgaagaaaactgactgctttcagcaaaagtcacactactcttgataaaagctgttgcaggcctttgctaagctatcaaagtaacgtattaattttgtatcaactcccgttctcaacacctttccttaagtctttgctgtcataatttaagcattttgagtatattttgaagtcttaaaagacttaacccataggcatc

SEQ ID NO: 350033 - DNA, 480 bp, Homo Sapiens
cagtcaaagggaagtgggcaaaaccagctgagaacccgggagctggatgcatatattctggaatcagggcctgcaaactcaaagattggtttgtggctggtgacttctctctgctaagtaaatcaatgaccattcattgagaactgatggggacccagcgtgtggcccaatgagtggcagttttttcctagccagcttctgtggccaaatttggaggattttccaacctgctatggctggacccttgggtgttaaatcactaaattccctttctacctgctctcttcttcctgaaacactcagagctgacttcttccttctttctaatcaacaaagacaaaactccaagccccttttcagccttcacacaatttttctttctagaaaacatccgcttctgcaagcctccttccctaatgaagggacagtaggccccagctaccccaaacatgcacatgctcttctcaccaacgtgcctct

SEQ ID NO: 350034 - DNA, 904 bp, Homo Sapiens
  misc_feature (37)..(37): n is a, c, g, or t
  misc_feature (163)..(163): n is a, c, g, or t
acactgtcaggaggcactggggcctgcagctgttccnttagcccatcctgcctgtccccccacagcttccagcacctcggggtctgggaggacctgccgctccacttcctccatggccccagtctcagactctgagaggccacctgagaagaggaggaccccncaggccaagcagaaccagggccccaaggaggcacatgttgagggagatgcccagctccccgcctgcaccctcacccccagcctggttctccacagccaggggcaccatgggctgaggtgggccggctcccggccccgccgtctccgcagaccctccatgtccacgtcggtgtcatcgtcactgctggagcagcggccctcctccctgatccaagctgctttgggggttgaaggcaggctctgtggagggctctggccttccaggtcctgtgtgtctggtcccaggcctgtcaccacggtggtctcctgcaggtctccctggactactgtgtctcctgggccaggaggctccacaccacaaacatcaccttccagggtgcccttgacctcagtctcctctgttagaatgctgccagactgagggctttcagtctggaagagcgtcccttctccatccatggtcccagctaattctttcccatctgtcttggaggggctgtgaggggcctgcagggctctctcagattctgggtccatcctggatgccgggcccagtgtctccactggcaggctctcggagccagcaagcacccagctattatcagagtctgggcaggaggccatagttgctgaggtccctgaggctgctgtggctgccacctgaaccagctcttgcttcggtcttcagcttaactttgtgcaggcttccctttgttgcagcccatcggaagaattccggacc

SEQ ID NO: 350035 - DNA, 1648 bp, Homo Sapiens
  misc_feature (1591)..(1591): n is a, c, g, or t
ggaattcccgggatcgcttcgctttttgtttgtccctgaccgtgcgccgtccaagggtccattggttgccatagagatcgtcgagcgctgggcctgtgatcgctgaggggcgagcagttgcgaccctgggctcctggggacctgagcgttatgtctttccgcgacctccgcaatttcacagagatgatgagagccctgggataccctcgacatatttctatggaaaatttccgtacacccaattttggacttgtatctgaagtgcttctctggcttgtgaaaagatatgagccccagactgacatcccgcctgacgtggatactgaacaggaccgagttttcttcattaaggcaattgcccagttcatggccaccaaggcacatataaaactcaacactaagaagctttatcaagcagatgggtatgcggtaaaagagctgctgaagatcacatctgtcctttataatgctatgaagaccaaggggatggagggctctgaaatagtagaggaagatgtcaacaagttcaagtttgatcttggctcaaagattgcagatttgaaggcagccaggcagcttgcgtctgaaatcacctccaaaggagcatctctgtatgacttgctcggcatggaagtagagttgagggaaatgagaacagaagccattgccagacctctggaaataaacgagactgaaaaagtgatgagaattgcaataaaagagattttgacacaggttcagaagactaaagacctgctcaataatgtggcctctgatgaagctaatttagaagccaaaatcgaaaagagaaaattagaactggaaagaaatcggaagcgactagagactctgcagagtgtcaggccatgttttatggatgagtatgagaagactgaggaagaattacaaaagcagtatgacacttatctggagaaatttcaaaatctgacttatctggaacaacagcttgaagaccatcataggatggagcaagaaaggtttgaggaagctaaaaacactctctgcctgatacagaacaagctcaaggaggaagagaagcgcctgctcaagagtggaagtaacgatgactcggacatagacatccaggaggacgatgaatccgacagtgagttggaagaaaggcggctgcccaagccacagacagccatggagatgcccaagcaaggaagacctggcaaacgcattgtgggcacgatgcaaggtggagaccccgatgacaatatggaagcagcaccagcccccttaggtaaatgcaagacttccagctccaagaagcaggaggacccggaggagagtgaaattgacatggaagatgatgatgacgaggatgacgatttggaagacgagagcatttctctctcaccaaccaagcccaatcgaagggtccggaaatctgaacccctggatgagagtgacaatgacttctgacccttttgccaagggaccctggcagattaaaaccctcagacttgtaggtaaatgggaacttagaaggttaggaaggtaacccctgttttgtttactaagctggctggacccatgatcactgaaagcatacttatttctgctntagcctcctatgtttgcattccatgaaaagcttaatagaattgaagcaaatccctaa

SEQ ID NO: 350036 - DNA, 1340 bp, Homo Sapiens
gtatttatagtaatagttaataatatgtcgcctcatacatgacgcttcgtgtaaatcggggttattatatatgcgggtctaataacgggcgtttataattgctatcaatctgtcgaagtgctcactaatgttaggagagtgggactatgtggtgggcgaaacttgtggtatgaaggctaaaataaacatatggatgggtataataagctgtacctctcggggtataaccggaaagagaaaatggggcgggagatttatctaaacgccactcgggtcgaataagggtaggctgttatttgtggaaaaaagtgatttagggggggaagtttggttacaagccacgggggtaataagatatcgtaacaaatggcggcgtgcaggaaaaggtgaggttttagtttaattgattataaatggtggtggccacctgttttcccaagcatgtattttaaccattgtgaattcgcgagacaagtgtgccacaggaaccgaagtgtctagcgcccaatctatcgcaggagtctcagaagaaaatgtatagataacaaatagcaccccaagacttgtgtggcgtcgagctcttatttctttctggagtttttgtcccggggatgtgaatcactaagaacacatgcattcctcaagttttagaagataaataaggtggaaaaaaataaatcttagggatttgcttcaattcttatttaagcttcatggaatgcaaacataggaggctaaagcagaaataagtattgcttcagtgatcatgagtccagccagcttagtaaacaaaacaggggttaccttcctaaccttctaagttcccatttacctacaagtctgagggttttaatctgccagggtcccttggcaaaagggtcagaagtcattgtcactctcatccaggggttcagatttccggacccttcgattgggcttggttggtgagagagaaatgctctcgtcttccaaatcgtcatcctcgtcatcatcatcttccatgtcaatttcactctcctccgagtcctcattgtcatcggagtctccaccttgcatcgtgcccacaatgcgtttgccaggtcttccttgcatgagcatctccatggctgtctgtggcttgggcagccgcctttcttccaactcactgtcggattcatcgtcctcctggatgtctatgtccgagccatcgttacctcaaacctttcttgctccatcctatgatggtcttcaagctgttgttccagataagtcagattttgaaatttctccagataagtgtcatactgcttttgtaattcttcctcagtcttctcatactcatccattaacatggcctgacc

SEQ ID NO: 350037 - DNA, 2447 bp, Homo Sapiens
  misc_feature (2081)..(2098): n is a, c, g, or t
agcgggtcgcgcgcacgggccgggcgtctcgactcccgcgcgcgctcggctggtcccagtccccgggagaagaagcggaggagggagagagccagcgaggcggcccaggggagcgggcgcgagtggcggctgccggagccgcctgtgcacgggcggcggcgaggcgagggtggcggtcgcctgagcagctagagccggggcggcgcggaatccgcatccgccgcgagtgtgatgaagctaccctgcctcgctgctccgcttgccgccagctgacaccgcctgcacccagcccgcccgggaggggagacgccgcggggccgtgaccttggcggaggagggcacactgataattcttgtatcttgagtgtggaccaagttttgggtgacatggcccaggggaataattatgggcagaccagcaacggggtggccgatgaatcacccaacatgctggtgtacagaaagatggaagacgtcatagcacggatgcaagatgaaaaaaatggaattcctattcgtacggtcaaaagctttctttccaagatacctagcgtcttctctggttcagacattgttcaatggttgataaagaacttaactatagaagatccagtggaggcgctccatttgggaacattaatggctgcccacggctacttctttccaatctcagatcatgtcctcacactcaaggatgatggcaccttttaccggtttcaaaccccctatttttggccatcaaattgttgggagccggaaaacacagattatgccgtttacctctgcaagagaacaatgcaaaacaaggcacgactggagctcgcagactatgaggctgagagcctggccaggctgcagagagcatttgcccggaagtgggagttcattttcatgcaagcagaagcacaagcaaaagtggacaagaagagagacaagattgaaaggaagatccttgacagccaagagagagcgttctgggacgtgcacaggcccgtgcctggatgtgtaaatacaactgaagtggacattaagaagtcatccagaatgagaaacccccacaaaacacggaagtctgtctatggtttacaaaatgatattagaagtcacagtcctacccacacacccacaccagaaactaaacctccaacagaagatgagttacaacaacagataaaatattggcaaatacagttagatagacatcggttaaaaatgtcaaaagtcgctgacagtctactaagttacacggaacagtatttagaatacgacccgtttcttttgccacctgacccttctaacccatggctgtccgatgacaccactttctgggaacttgaggcaagcaaagaaccgagccagcagagggtaaaacgatggggttttggcatggacgaggcattgaaagacccagttgggagagaacagttccttaaatttctagagtcagaattcagctcggaaaatttaagattctggctggcagtggaggacctgaaaaagaggcctattaaagaagtaccctcaagagttcaggaaatatggcaagagtttctggctcccggagcccccagtgctattaacttggattccaagagttatgacaaaaccacacagaacgtgaaggaacctggacgatacacatttgaagatgctcaggagcacatttacaaactgatgaaaagtgattcatacccacgttttataagatccagtgcctatcaggagcttctacaggcaaagaaaaagggggaaatctctcacgtccaagaggttaacaagccttgctcagtcttactaaacggatcatcttgtagcatgaatgcagactggagtcactgcacacactttgtagctcaatgttgtgacctggagcagaggacattagaacaagatgttgcatgagcaaaggacctaaattgttatttttgtgtgtacattccatctccaatggactcttccgtctcaatgcctccattccaaactgttgtctgctttctttctccttctactatgctggatctgtgtctcttcctttttaacaagttcaagtgaagtaaaaccttttctttttttccttcttnnnnnnnnnnnnnnnnnnaaagcttcagttagacacacagttcactgaaaattcagtcagtcaaaaactggaagaactgtaaaagaaaaaagtatatatcaataagtatacatgtggcttcacatttattaaacaataaattccgcacagaaagtttcatttcaccaatgtgtcacagtcagaaacaaactcatgtcttcgtctgttgtctgtacattctccgttaatgtttctcgcatttatttttataccatatttaaagaagaaacaccttttactccaaatgtattaaagttgatcccttctctgtaaatttgtgtatgtttatattgttgttttatctttcattaaaagatgtcagaatctc

SEQ ID NO: 350038 - DNA, 563 bp, Homo Sapiens
  misc_feature (404)..(404): n is a, c, g, or t
  misc_feature (419)..(419): n is a, c, g, or t
  misc_feature (430)..(430): n is a, c, g, or t
  misc_feature (515)..(515): n is a, c, g, or t
  misc_feature (533)..(533): n is a, c, g, or t
caaaatgatattagaagtcacagtcctacccacacacccacaccagaaactaaacctccaacagaagatgagttacaacaacagataaaatattggcaaatacagttagatagacatcggttaaaaatgtcaaaagtcgctgacagtctactaagttacacggaacagtatttagaatacgacccgtttcttttgccacctgacccttctaacccatggctgtccgatgacaccactttctgggaacttgaggcaagcaaagaaccgagccagcagagggtaaaacgatggggttttgggcatgggacgagggcattggaaagacccagttggggaggaggaacagtttccttaaaatttcctaggagttcaggaattcagcttcgggaaaattttaaggttcntgggctgggccagtngggagggaccntggaaaaaaggagggcctattttaaaggaagttacccttcaaggagtttccaggggaattattgggccagagttttcttgggctncccggggcccccatggtntttttacttgggtttcccagggttttttgg

SEQ ID NO: 350039 - DNA, 1062 bp, Homo Sapiens
  misc_feature (965)..(965): n is a, c, g, or t
agcggtataaattgtaatgttataattattatttatttggagaattaacttccccctctaaagttatttattattgatgcttataccatgattgcaccttagccttttacatactaaaaacatgacttgttagttgtattgcatgctctttgtcctgtaatgtgtgtgcaatgacaacttgtttctgttttatttaaagtaactgacattttggattttcatctaacatagagggcatggcaactctctttgacagtggtaccccgtgatcttcagaaagtaccataatgtcatcctactctacatttcacaagacgaattattttgagatttgtttattatattaaaatgtttttttacgttcccactaaattttgaccccatataaagaaatgtgttatgtatgttgtgcctccttagagacataaatttagtgtcaaaacatgggagatggcttactcagaagcatactccacttaacataccatggcctgagctaagtaccatgtcctgtttgtgtcttatttttaaatattttctttgtccacatgggccgttgaccttagagttaaggcggttgcttttttgaagaaatcaccaaagtttctgggaaactatgttcaaggttgaaatggagagtagatttaattttatttgtcttgtagggaagaaatcttcctttgaaccgcttttcttgctttttccctttttcccaaactaggttacaggttcttatctgcaaggttcaagttgcttagacattgttttccagtattctgcagggccagtcagttgtacagaagttggaatattctgttccagaattaaagaagtttttagattatgaaatattatgataataaagctattattcccccgaaaaccaccccccatgtagatattaaccctggtccgggccccctcgggcccctccgaaaacttttccaaaacctttcctttgggcngccccggggcccccgtagggaaagcggaaccttgggccctaacccggttttcccaagggaaaccccgtgggcaatggactaagaggctctgggaatt

SEQ ID NO: 350040 - DNA, 1432 bp, Homo Sapiens
cccttccctacatctagccgccgcgctttcccgctcccgcagcagcagcctcccgcgtcgctgtcgctgttgcctccgccacctcctccgccgccgcgcgcccctcggagttccgcgccccaccatgcccaacatcgtgctgttcagcggcagctcgcatcaggacctatcccagcgcgtggccgaccgcctgggcctggagctgggcaaggtggtcacgaagaagttcagcaaccaggagaccagcgtggagattggtgaaagcgtgagaggggaagatgtctacatcatccagagcggctgcggggaaattaacgacaacctgatggaactcctcatcatgatcaatgcctgcaagattgcgtcatcatccagagtaactgccgtgatcccgtgtttcccatacgcccgacaagataaaaaggacaagagtcgtgccccaatttctgcaaaacttgtggccaatatgctgtcggtggctggggcggatcacatcatcaccatggacctgcatgcttctcagatacagggattctttgatattcctgtggataatttgtatgcggagcccgcagtcctgcagtggattcgggaaaacattgccgagtggaagaactgtatcattgtttcacctgacgcagggggagccaaaagggttacatcaattgcagacaggttgaatgtggaatttgctttgatccacaaagagaggaagaaggcgaatgaagtggaccggatggtcctggtgggcgacgtgaaggaccgtgtggccatcctcgtggatgacatggctgacacttgcggcaccatctgccatgctgcggacaagctgctgtcagctggagccaccaaagtgtatgctatccttacccatgggatcttctctggaccagctatttccagaataaataatgccgcctttgaggctgttgtcgtcacaaacacaattccgcaagaggacaaaatgaaacactgcaccaagattcaggtcattgacatttccatgatcttggccgaagcaatccgaagacacacaatggggaatccgtgtcctacctgttcagccatgtcccgctataaatccagaatgggaagtgtccagcaagcctactctgacttctgacttgtttttgttttctggatttttagctgtaggtattcagcaatgataggttaatcactggcaaaagcatcagatctttgtatatgctaagatttattgtttccccttctaaagctcaagatcatttctttccagtttttggggaaatggtggtggttatttggtctttaagtgaactgtcttaaatgagaaacgtttttgtcattttgacttttaacaggtacaggtgatctcttcctttgttctttcagtactttgaggcgacaactttcaagtatataatttcattgtgggaagtcataggttata

SEQ ID NO: 350041 - DNA, 1727 bp, Homo Sapiens
  misc_feature (1299)..(1409): n is a, c, g, or t
  misc_feature (1534)..(1543): n is a, c, g, or t
ggagaacatcacagaagtgaaatacaggctgaacaggacagaaagatagaagaagtcagagatgccatggaaaatgaaatgagaacccagcttcgccgacaggcagctgcccacactgatcacttgcgagatgtccttagggtacaagaacaggaattgaagtctgaatttgagcagaacctgtctgagaaactctctgaacaagaattacaatttcgtcgtctcagtcaagagcaagttgacaactttactctggatataaatactgcctatgccagactcagaggaatcgaacaggctgttcagagccatgcagttgctgaagaggaagccagaaaagcccaccaactctggctttcagtggaggcattaaagtacagcatgaagacctcatctgcagaaacacctactatcccgctgggtagtgcggttgaggccatcaaagccaactgttctgataatgaattcacccaagctttaaccgcagctatccctccagagtccctgacccgtggggtgtacagtgaagagacccttagagcccgtttctatgctgttcaaaaactggcccgaagggtagcaatgattgatgaaaccagaaatagcttgtaccagtacttcctctcctacctacagtccctgctcctattcccacctcagcaactgaagccgcccccaaagctttgccctgagggatattaacacatttaaattactgtcatatgcttcctattgcattgagcatggtgatctggagctagcagcaaagtttgtcaatcagctgaagggggaatccagacgagtggcacaggactggctgaaggaagcccgaatgaccctagaaacgaaacagatagtggaaatcctgacagcatatgccagcgccgtaggaataggaaccactcaggtgcagccagagtgaggtttaggaagattttcataaagtcatatttcatgtcaaaggaaatcagcagtgatagatgaagggttcgcagcgagagtcccggacttgtctagaaatgagcaggtttacaagtactgttctaaatgttaacacctgttgcatttatattctttccatttgctatcatgtcagtgaacgccaggagtgctttctttgcaacttgtgtaacattttctgttttttcaggttttactgatgaggcttgtgaggccaatcaaaataatgtttgtgatctctactactgttgattttgccctcggagcaaactgaataaagcaacaagatgaaaactggagagagggggggcggcgcgagcgctcaggtccgggagcccnnnnnnnnnnnnnnnnnnnnnnnnnnnnnnnnnnnnnnnnnnnnnnnnnnnnnnnnnnnnnnnnnnnnnnnnnnnnnnnnnnnnnnnnnnnnnnnnnnnnnnnnnnnnnnnccgctgcgcggcgccggaaaacttctccccgcgccttcgtgggcggccggcggggccgcccggaggcggaggcgccgccggcgaccacgccggcgcacccaaacaagacccacgggggcgcggannnnnnnnnntggcggtcgcccggcacaaaaaaacacgccccggggggggcgagcaccaccgggagtgcgggaagagacgagcgccagagggcggcggccgcgcccggcggatctcttctggggggtccgtccggcggcgggcctgctggcgggcagcgggtgtcgcatgcggtgactggcgcgcgcgcgcgga

SEQ ID NO: 350042 - DNA, 1817 bp, Homo Sapiens
gtgacacacgcaagcacgcctccacttaactcgcgccgccgcggcagctcgagtccaccagcagcgccgtccgcttgaccgagatgctgcgggcctgtcagttatcgggtgtgaccgccgccgcccagagttgtctctgtgggaagtttgtcctccgtccattgcgaccatgccgcagatactctacttcaggcagctctgggttgactactggcaaaattgctggagctggccttttgtttgttggtggaggtattggtggcactatcctatatgccaaatgggattcccatttccgggaaagtgtagagaaaaccataccttactcagacaaactcttcgagatggttcttggtcctgcagcttataatgttccattgccaaagaaatcgattcagtcgggtccactaaaaatctctagtgtatcagaagtaatgaaagaatctaaacagcctgcctcacaactccaaaaacaaaagggagatactccagcttcagcaacagcaggtgataccctgtcggtcccagcccctgcagttcagcctgaggaatctttaaaaactgatcaccctgaaattggtgaaggaaaacccacacctgcactttcagaagaagcatcctcatcttctataagggagcgaccacctgaagaagttgcagctcgccttgcacaacaggaaaaacaagaacaagttaaaattgagtctctagccaagagcttagaagatgctctgaggcaaactgcaagtgtcactctgcaggctattgcagctcagaatgctgcggtccaggctgtcaatgcacactccaacatattgaaagccgccatggacaattctgagattgcaggcgagaagaaatctgctcagtggcgcacagtggagggtgcattgaaggaacgcagaaaggcagtagatgaagctgccgatgcccttctcaaagccaaagaagagttagagaagatgaaaagtgtgattgaaaatgcaaagaaaaaagaggttgctggggccaagcctcatataactgctgcagagggtaaacttcacaacatgatagttgatctggataatgtggtcaaaaaggtccaagcagctcagtctgaggctaaggttgtatctcagtatcatgagctggtggtccaagctcgggatgactttaaacgagagctggacagtattactccagaagtccttcctgggtggaaaggaatgagtgtttcagacttagctgacaagctctctactgatgatctgaactccctcattgctcatgcacatcgtcgtattgatcagctgaacagagagctggcagaacagaaggccaccgaaaagcagcacatcacgttagccttggagaaacaaaagctggaagaaaagcgggcatttgactctgcagtagcaaaagcattagaacatcacagaagtgaaatacaggctgaacaggacagaaagatagaagaagtcagagatgccatgggaaaatgaaatgaggaacccagcttcgccgacaggcagctgcccacactgatcacttgcgagatgtccttagggtacaagaacaggaattgaagtctgaatttgagcagaacctgtctgagaaactctctgaacaagaattacaatttcgtcgtctcagtcaagagcaagttgacaactttactctggatataaatactgcctatgccagactcagaggaatcgaacaggctgttcagagccatgcagttgctgaaagaggaagccagaaaaagccccaccaactcctgggtttttcagttgggaggcatttaaaaggtacagccagtgaagaaacctcca

SEQ ID NO: 350043 - DNA, 910 bp, Homo Sapiens
agcggggctccacttaactcgcgccgccgcggcagctcgagtccaccagcagcgccgtccgcttgaccgagatgctgcgggcctgtcagttatcgggtgtgaccgccgccgcccagagttgtctctgtgggaagtttgtcctccgtccattgcgaccatgccgcagatactctacttcaggcagctctgggttgactactggcaaaattgctggagctggccttttgtttgttggtggaggtattggtggcactatcctatatgccaaatgggattcccatttccgggaaagtgtagagaaaaccataccttactcagacaaactcttcgagatggttcttggtcctgcagcttataatgttccattgccaaagaaatcgattcagtcgggtccactaaaaatctctagtgtatcagaagtaatgaaagaatctaaacagcctgcctcacaactccaaaaacaaaagggagatactccagcttcagcaacagcacctacagaagcggctcaaattatttctgcagcaggtgataccctgtcggtcccagcccctgcagttcagcctgaggaatctttaaaaactgatcaccctgaaattggtgaaggaaaacccacacctgcactttcagaagaagcatcctcatcttctataagggagcgaccacctgaagaactttgcagctcgccttgaacaacaaggaaaaacaagaacaagttaacattgagtctctagccaagagcttagaagatgctctgaggcaaactgcaagtgtcactctgcaggctatggcagctcagaatgctgcggtccaggctgtcaatgcacactccaacatatggaacagccgccatggacaattctgagattgcaggcgagaagaactctgctcagtggcgcacagtggaggc

SEQ ID NO: 350044 - DNA, 1103 bp, Homo Sapiens
tgggtggcgaattcggcacgaggccttcctggggtggaaaggaatgagtgtttcagacttagctgacaagctctctactgatgatctgaactccctcattgctcatgcacatcgtcgtattgatcagctgaacagagagctggcagaacagaaggccaccgaaaagcagcacatcacgttagccttggagaaacaaaagctggaagaaaagcgggcatttgactctgcagtagcaaaagcattagaacatcacagaagtgaaatacaggctgaacaggacagaaagatagaagaagtcagagatgccatggaaaatgaaatgagaacccagcttcgccgacaggcagctgcccacactgatcacttgcgagatgtccttagggtacaagaacaggaattgaagtctgaatttgagcagaacctgtctgagaaactctctgaacaagaattacaatttcgtcgtctcagtcaagagcaagttgacaactttactctggatataaatactgcctatgccagactcagaggaatcgaacaggctgttcagagccatgcagttgctgaagaggaagccagaaaagcccaccaactctggctttcagtggaggcattaaagtacagcatgaagacctcatctgcagaaacacctactatcccgctgggtagtgcggttgaggccatcaaagccaactgttctgataatgaattcacccaagctttaaccgcagctatccctccagagaccctggaaccccgtgggggtggacaggtgaaaaagaccccttagagccccggttcctatggctggtcaaaaaactgggccccaaaggggtaaccaagggattggatgaaaaccagaaaatagctttgtaccaggaactttcctctccctacctaacaggtcccctgccttcctatttccccaccctcaggcaaactgaaaggccgcccccccagaagcctccctggccccctggaaggattataaaaccaccatttttaaaaatttacctgggtccataatggctttccccaatttggccatttggagacaaatgggggggaaacctgtggagaccttaagcccacccaaaaagttttgg

SEQ ID NO: 350045 - DNA, 807 bp, Homo Sapiens
tgtggctcttaagggttcatgaaatgactgaatatgaggatacatgtcctgtagaaagcaaatgcgcctcatatactgccaaaaatagtgttagtttcattaatgtgaattttccagcattcagtagttgtaatgttagaaacaattgctggtcaagttcaacttgttgctatgtttttaatttgcacaggagtagtatcagaaattagtgtcactgcttgtatctagctgaattttaaacaacagaacattagttttttatgttggtgccaccaactgtaaatgacataagttagttattacaaaacacagtaattagactgttgcaaccatctaaaaccttaggcttccagtctgtgctgttagtgttaagatgtaaagtgcaatcctaagctaacattatctgtgcaagcaccatagaaacatttgcatatctgcatagatcttacaactgtactctttacctccttgtgataaagctttgtctacctgcaaacacagtcaaaggctacagctgcaaaccaaagccaactctaaccatggccaagagctcaaggacagaagcagccacatgctttggtcagccttctgtaacttcaattagtacaaaggaaccttttccatgaactacctgctgttttctgatgacctctgggatcttttcatttagccctaaacaaagaaacaaatatgacaaaaacacaataaaaaatgttaattcagtcacagagtaatcttctgaggccaaaagtccatctaaatgcaatgaagattgctttcattaagacagaggtgaggaccaaatcg

SEQ ID NO: 350046 - DNA, 653 bp, Homo Sapiens
  misc_feature (346)..(354): n is a, c, g, or t
ccctctaaattcccctagttttctggtaactaatgcagtatcctagacctttgttctcatatgaatggtcttcagagaacagggctcttatgaggggtggctgtgcacccagaactctgcaggtaactggaaggttgctaaactcacaaataacttcaaagccagagctccatttccctaattcctgtaggcagagggctgaagcagagagatggctgtcctgttgcctgagtgcacctctgaggacctgtctcccagttccaagacagccaccttcatcagtccagtggcaacatcacatctatctatttctgctgctctcccactaactgaaaaaaatacagannnnnnnnncatgtgaaattaaaggagaacattagagggatataaatccaaacagaaaaggagtatgctgattaataaaacacgtgcaaacagaaaagttgcacgtgtggactgcagtctgaggacagagagggggtgtgctgaattcgaaacacttgggtttaattctccacatgcatttttcttggattcctctcttcctctgtcaagataacagttgtgtttcttgtagctgagccgacacaggaaatcaaatattttgtgtttctataaactatacttcccagagagataacacatctagaatt

SEQ ID NO: 350047 - DNA, 1306 bp, Homo Sapiens
cagtgagtcagtgccggtcggtcttgtgggctgaggggcagcggcttaggctccggcgtctgcaggggtcgccgagctaacccgtggctaggcgagtggggcggggcggccggcaccatgtcgaggcaggcgaaccgtggcaccgagagcaagaaaatgagctctgagctcttcaccctgacctatggtgccctggtcacccagctatgtaaggactatgaaaatgatgaagatgtgaataaacagctggacaaaatgggctttaacattggagtccggctgattgaagatttcttggctcggtcaaatgttgggaggtgccatgactttcgggaaactgcggatgtcattgccaaggtggcgttcaagatgtacttgggcatcactccaagcattactaattggagcccagctggtgatgaattctccctcattttggaaaataaccccttggtggactttgtggaacttcctgataaccactcatcccttatttattccaatctcttgtgtggggtgttgcggggagctttggagatggtccagatggctgtggaggccaagtttgtccaggacaccctgaaaggagacggtgtgacagaaatccggatgagattcatcaggcggattgaggacaatcttccagctggagaggaataaccatccctacaactcgaggatagccatcaggagcactgttggaatcagcaggcctctgtgctccctctgccctccagaactcagtgactcttgaacatggatgttatatattcttataacctgtttccattctccattcaaataaagagcagactgcgatatagtccatttaccccatgtgtgcacattcaggagcgacagtctctgcccccattcccttgagaggggctggatgtaatcacctttggttggactagaaagagctcaaaccattttacattcctgtttgaatttttccaaagcaaaactcactttgaccccattaagaggcaagcctggcacatctatccctgggcctttagaaagccatttgcctcaaatggctatagggttgtggggtggagggaggaagggctgggagggagtggggaggaattgctagctgtagtgtgacacattgtagtgtttgccaggaaaggagccagtcatgccggaaacactgacttctgggaagccacccaggtctcattcctccctgctgttggaggcaacatctcctctttttacagagggtacatccttttttcttacaaattcttcaataaagacacattctgagtgggcaaaacagaaaaactctcaggct

SEQ ID NO: 350048 - DNA, 2042 bp, Homo Sapiens
  misc_feature (547)..(596): n is a, c, g, or t
  misc_feature (1702)..(1722): n is a, c, g, or t
gggatacaggggccgctacgggagccgcgccgccgcccatgtcattccacttcaagtgacttcatgtgatgtcagctgaatgtaaaagacagtgatctcacgcggaggggaagatgttagccgatcaaaatgtgacagaagagacacgctgcatggctcggaacgcatctccttggtggtgggggaaagagacttagaggagagaggctgcgccctggcccagcctggctcggctcagctccgcgcgccatggcaagctcggcttccctggagaccatggtgcccccggcctgcccgcgcgccggagcgtcgccggccacttccaagacactggccttttccatcgagcgcatcatggccaagacgtcggagccccgtgcgccctttgagccccggcctggagcgctagaggcggacggcagccagggcaagaaactgctcaacctctgctcgccgctgccctgtatgatccccctccagcccctaggctacgaggtgccgtcaaagacactgctcagttactcggagctctggaaaagcagcctcnnnnnnnnnnnnnnnnnnnnnnnnnnnnnnnnnnnnnnnnnnnnnnnnnngggggccccagtgtgcggcgccacggcttgtgcaaaaccaactgtggcgtgtgctgcaaggccgagctgggcctggcgccgtccgcgctgcccgcgggcagggtcatcaagccgcagtcatcaaccaggctgtggggctgccggccagcggctcgctctactacttcaactacctggactcgaccgcgtacccgccgtctgagctcctcagcggccacctcttcccgtctggcctcctcaatgcgcaggcccccgccgccctggctgctcaccccaagctctttctgctggagaacgccaagctggccggcctggctgcggacaagttcccccacccggctccctatccccataaggagcgcttgccggcgccgctggagcaggtactgaaggaaaactcggccctgactgccgagcgcggaggcgtcaagggccacagcaagctgccaggaggctccgcagatggcaagcccaaaaacttcacctgcgaggtgtgcggcaaggtgtttaacgctcactataatctcacccgccacatgccggtccacaccggagccagaccgttcgtgtgcaaagtctgcggcaaaggctttcgccaggccagcacgctctgcaggcacaaaattatcccacacccaggaaaagccacataaatgcaaccagtgcgggcaaagcgttcaaccgcagctccacgctcaacacgcatatccgcatccacgcgggctacaagcccttcgtctgcgaattttgcggcaaaggctttcaccaaaaagggaactacaagaaccacaagctgacccacagcggcgagaagcagtacaaatgtaccatctgcaacaaggccttccaccaggtctacaacctaaccttccatatgcacacccacaacgacaagaagcctttcacgtgcgccacttgcggcaaagggttttgcagaaacctttgacttaaagaaacatgtgcgcaaactccacgacagcgtgggccctgctgccccctccgcaaaggacctgactaggacagtgcagagctgagagctactgccttgcccttccttccctccctgtaccacctgaaaacagatcacacatataaacttatttctnnnnnnnnnnnnnnnnnnnnnctatagcagagaggctaaaatctatttatcgaaaccagcatatttttggaaagctaaatgtttcctcgatgactggcagcaaactcgtggcccccacctttgtatattcaggaaacttatttaaatccagtgcgccgaaacgtatttaattccaggcctccgcttctcctggggcagccagttttaaccccagcctgtcaccgtgagcgccccagaagagcgcggcgcccctagccatctttatacagccatgtaaatcctcctgtacaagcgaacacggaatatatacatatataactcaataaacagaatcattagtg

SEQ ID NO: 350049 - DNA, 1401 bp, Homo Sapiens
  misc_feature (422)..(499): n is a, c, g, or t
ggtccggattctgcaatgagaacgctgcatggctcggtagcatctccttggtggtgggggaaagagacttagaggagagaggctgcgccctggcccagcctggctcggctcagctccgcgcgccatggcaagctcggcttccctggagaccatggtgcccccggcctgcccgcgcgccggagcgtcgccggccacttccaagacactggccttttccatcgagcgcatcatggccaagacgtcggagccccgtgcgccctttgagccccggcctggagcgctagaggcggacggcagccagggcaagaaactgctcaacctctgctcgccgctgccctgtatgatccccctccagcccctaggctacgaggtgccgtcaaagacactgctcagttactcggagctctggaaaagcagcctcnnnnnnnnnnnnnnnnnnnnnnnnnnnnnnnnnnnnnnnnnnnnnnnnnnnnnnnnnnnnnnnnnnnnnnnnnnnnnnttgtgcaaaaccaactgtggcgtgtgctgcaaggccgagctgggcctggcgccgtccgcgctgcccgcgggcagggtcatcaagccgcaggtcatcaaccaggctgtggggctgccggccagcggctcgctctactacttcaactacctggactcgaccgcgtacccgccgtctgagctcctcagcggccacctcttcccgtctggcctcctcaatgcgcaggcccccgccgccctggctgctcaccccaagctctttctgctggagaacgccaagctggccggcctggctgcggacaagttcccccacccggctccctatccccataaggagcgcttgccggcgccgctggagcaggtactgaaggaaaactcggccctgactgccgagcgcggaggcgtcaagggccacagcaagctgccaggaggctccgcagatggcaagcccaaaaacttcacctgcgaggtgtgcggcaaggtgtttaacgctcactgtaatctcacccgccacatgccggtccacaccggagccagaccgttcgtgtgcaaagtctgcggcaaaggctttcgccagggccagcacgctctgcaggcacaaaattatccacacccaggtgcacccacccactagaatttgaaacatcctaagaacagggtattttgtctctgctttgctgatgtatccctcagcaaccggaactgcctgaccatctgatccctttccgtggagaccaccaggctgttgaaggaagaatctattggcaacattgtatccaattatattacagctttctgttttatcagaaggagtcccactctgtcacccaggatggagtacacgtgggtgactcgggcagttgcaagtccggctccgggttcatggccatctcctgctaaactccg

SEQ ID NO: 350050 - DNA, 1252 bp, Homo Sapiens
  misc_feature (69)..(366): n is a, c, g, or t
tgtttgacttgggtctttcagttttcctttcggtcccttttaaaatgtgattgttaacctgcctcttgnnnnnnnnnnnnnnnnnnnnnnnnnnnnnnnnnnnnnnnnnnnnnnnnnnnnnnnnnnnnnnnnnnnnnnnnnnnnnnnnnnnnnnnnnnnnnnnnnnnnnnnnnnnnnnnnnnnnnnnnnnnnnnnnnnnnnnnnnnnnnnnnnnnnnnnnnnnnnnnnnnnnnnnnnnnnnnnnnnnnnnnnnnnnnnnnnnnnnnnnnnnnnnnnnnnnnnnnnnnnnnnnnnnnnnnnnnnnnnnnnnnnnnnnnnnnnnnnnnnnnnnnnnnnnnnnnnnnnnnnnnnnnnnnnnnnnnnnnngataagattcatgatgctgctgctcccagaaggtttgctggatgtgtttacataggactctaacttgtgtgcactacagttgttcaccagggccagtgattcaccccagtgtgtggccagaccatgactgtgtagcaggaatgttttaatttgtgcttccttagtaaattgaaatatcagctgagagattatttgctgctgttattcaaaaggccatttatgaagttagtatttgagccccataagatctttaaaaagcctccaatcatttaaaggaagaaatcagagttgctataaaattcagtaaaaagctcatagccaaacggctgtgctcagatggaaagtctgagctgaggttggtctcttgccaaaccgtggctgttgtgtgttgttcttcatgtcttcgagttcattttttttcattctgcctattctggcatcagctcacttgaggagtccctcagccttcttgtatttaaggcatcgtcttagactttgtggctctaaagtacctgtctgttgagatttcaagtctcttgtcaccatcctcacacatgacaacaaaacccataatgcataagtggcctttttgaaccaagactttgcaaactgatctctcccccgtgaaggagttgagcacattagcaacaatgtacattaattttggattttcattttcatgttttattttgtaaatattatctgatgtttggagcttgagtatacagactgtaaatatagttcttgtatttgtactaattctgattcttttgctgtatagccttagatgtgcaatgcagacactatctaactgtgtgtggtaaccttgcgtcacggagctgttagtgaacgaggtaaaaataataaaggtacagccagtgcatca

SEQ ID NO: 350051 - DNA, 1939 bp, Homo Sapiens
  misc_feature (1543)..(1544): n is a, c, g, or t
  misc_feature (1546)..(1546): n is a, c, g, or t
  misc_feature (1922)..(1922): n is a, c, g, or t
ggtgtattaggttgaaccatagaaactgctattctcgtaggtcaaaagggtctagtgatggaagttttgtagataagtaccaggcatctcagtaactcctagactttttctcatcccatgccccgttttaaattgtcagttttccctctgactcttctgtgttaaaacatgaaactataaatttagtaattatcatgccttgctctttttaatctatatgactgatgcaagcccctcttcttaaccgtttcttggctttgagcccagaaacacagctctccctgtctccaactccagtaagccctcctcagcctcaccttacgaatccaaagaactggggtttgttaggttctttctctaatgtagaggcccagatcccatcacaaagtttttcattcttccttgtccaccatgatcttcatcacagtctttgatatgtctgcatgcaaagtggaacagagttgggcggcaatgacagaagagcttccttggcctgactcggtgtgcggccacttcggcactgcttaatccagatattcttgttaactaagcattgtgcttcccaggtggtctgaagtcaggtactctctctcctcaacacctgtagttgaatatgatttggccagttgctcgctgtaacttggagaaattcctataaagtaagatctccttgcctcttccatccattggtggccacccccttgcaaaaggaaaagaacagcaaaagtcaggagcagtaatctgagaaagttaactccaggataggtaggtttctattgttatagctagatgtaaatctttagttccaagaagtgatagagtttctgctttaataatttgttgataagtttacataaacagaaataaaagatactatctttaccgtagtagttcaggccaagattatgcttagttttagttctccaggtagttactttgtgccatgtcctattgatcagtgacactgccagaggcccataccggcaagaggaagaggacgtcattttgtaaagtttaacttcttagcgaactgatgtgccacccagtcacagagtggagttgtgaattcatgtagaggtggcaaacctctaccttgtgttgatgagagaataatcttgggcagtctgggaaaataaggaaggcatctccttcttactcatggagattcaactatagagagttgaaacctaaacccgccttccttttatagaagctggactagagacggactgaccatcagctctgaactgtggctttttttgttcacctatgatgccatgtaccaaattcagaagctatcgttaataattcgtttcataattgagtagtacaagcgaggaaaaaatacggaggataaccactatttttgtgcaaataacatgaaagtgaagtaaaagcaatagaagaaatttctataggatctgggtttagagtgtgtatcatcaataaatatacctttgctcttttcagggaaaataacaaccacccttactgatagttgggaaaagaagattgggttattttgccatatcatttagctggnnangtgacatttaaaagcaccctgcatcactagtaatagtgtattttgctattctgcccttgtaatcggtgtccctgtaaaacaatccccacagattactttcagaaatagatgtatttctctacgtaagggccaggtttattttctccttttttgagatttctagaaaaaatgctgcttgcacatgttggttcttgaaaccttagctagaagaatttcaggtcataccaacatgtggatagggctatagctgttcagaggtctcctgggggaggcttaaaacgggggaaacactggttttcacagatgctccacatgggctgtctttaaaagactccaaacttttttttggcccccttggtatgcctgggagcgccancccaccaacagtggggt

SEQ ID NO: 350052 - DNA, 542 bp, Homo Sapiens
  misc_feature (16)..(16): n is a, c, g, or t
  misc_feature (36)..(36): n is a, c, g, or t
  misc_feature (54)..(54): n is a, c, g, or t
  misc_feature (99)..(99): n is a, c, g, or t
  misc_feature (314)..(314): n is a, c, g, or t
aattaaacaagaatanctggaattaaaccagtgccnaaagtggcccgcacaccngagtcaggcccaaggaaacctcctcctggtccattgcccgccccnaaccctgtccccactttgccatggccagaccatatccaaagactgtgatggaaagatccatggtggacaaggaagaatgaaaaaactttgtgatgggatctgggccctcctacatttagagaaagaaccctaacaaacccccagttcctttggattccgtaaggtgaggctgaggagggccttactggagttggagacagggagagctgtgtttnctgggctcaaagccaagaaacggttaagaagaggggcttgcatcagtcatatagattaaaaagagcaaggcatgataattactaaatttatagtttcatgttttaacacagaagagtcagagggaaaactgacaatttaaaacggggcatgggatgagaaaaagtctaggagttactgagatgcctggtacttatctacaaaacttccatcactagacccttttgacc

SEQ ID NO: 350053 - DNA, 2958 bp, Homo Sapiens
  misc_feature (1777)..(1777): n is a, c, g, or t
ccccggttataaagagggcagtatctaacggttctaaggtagcgaggctgggtgggaatcggcacgaggagatggcggcgcccgaggcctggcgcgcccggagttgctggttctgtgaggtagcggcggcaacgaccatggaggccacgtcccgggaggcggcgccagcgaagagctcggcctcgggccccaacgctccccccgccctgttcgagctgtgcgggcgggcggtgagcgcccatatgggggttctggagagcggggtgtgggccctcccaggcccaatacttcaaagcatcctacctctgctcaatatatattacttggagaggattgaggaaactgccctcaagaaaggcctctcaactcaggccatctggcgccgactctgggatgaactgatgaagacaaggccttccagtttggaaagtgtgacatgttggcgagccaagtttatggaggcctttttttcccatgttctacgtgggaccattgatgtgtcttctgacaggcgtctttgtgatcagcggttctcacctcttctgcacagctcccgccatgtccgacagctcaccatctgtaacatgctgcagggtgcaaccgagctggtggctgagcccaaccgcagggttctggagaccctggccagctccctgcacactctcaagttccgccacctgctgttctctgatgtggctgctcagcagtcacttcggcagctgttgcatcagctcattcaccatggggctgtcagtcaagtgtcgctatactcctggcctgtgcctgagtcagcccttttcatccttattctcaccatgagtgctggcttctggcaaccagggcctggtggccaccctgccgcctctgtggagaggcctcccgaggccgggcccatcccgagatgaagggtccctcttattgggctcacgtcggcccgccgggatgctgctgagcgatgtgctgcagccctgatggccagccggcgtaagagtgaagccaagcagatgcccagagctgcacctgccactcgggtaacacgccggagcacacaggagagcctgacagcaggcggaacagaccttaagagggagctgcaccccccagccacctcccatgaggctcctggcaccaagcggtcaccttctgctccagcagccacctcctctgcctcttcttctacatcctcatacaaacgggcaccagctagctcagccccacagcctaagcccctaaagcgtttcaagcgagctgcaggggaagaaaggtgctcccacccgtcaggggcctggtgcagagtctgaagaccctgtatgacttcgtttttattgtggctggcgagaaggaggatggcgaagagatggagattggggaagtggcttgtggagctttggatggatcagatcccagctgcctggggcttccagcactggaagcttcacaaagattccgcagcatctccaccttggagctattcacagttccactctccacagaggcagccctgacactatgccacctgctgagctcctgggtgtcactggagagcctcacactctcctacaatggcctgggctctaacatcttccgcctgctagacagcctgcgggccctgtcaggccaggctggatgtcgcctccgtgccctgcatctcagtgacctgttctcaccactgcccatcctggagctgacacgtgctatcgtgcgagcactgcccctggttacgggtcctctctattcgtgttgaccacccaagccagcggggacaaccctggtgtgnccagggaattgcagggccccctagccacataataggcgatgaggagataccagaaaactgcctggagcagttggagatgggatttccacggggagcccagccagccccactgctgtgctccgttctgaaggcctcgggttctctgcagcagctgtccctggatagtgccacctttgcctctccccaggatttggggcttgttttgcaaacactcaaagagtacaacctagccctgaaaagactgagcttccatgacatgaatctcgctgactgtcagagcgaggtgctctttttgctacagaatctgactctgcaagagattaccttctccttctgccgtctgtttgagaagcgcccagcccaatttctgcctgagatggttgctgctatgaagggcaactccacactgaagggcctccggctgccagggaaccgcctggggaatgctggcctgctggccttggcagatgttttctcagaggattcatcctcctctctctgtcagctggacatcagttccaactgcatcaagccagatgggcttctggagttcgccaagcggctggagcgctggggccgtggagcctttggtcacctgcgcctcttccaaaactggctggaccaggatgcagtcacagccagggaagccatccggcggctccgggctacctgccatgtggttagcgactcatgggactcatcccaggccttcgcagattatgttagcaccatgtgatggggcccgtacctcacagtctcatgctcggtaccatcagcttgcaggggctgaagcatgggctgcccagaaccccaaccaccagttctatctttctctttctgtcaccttttttctcttttttccttcttcccttgcactgaggtcctggaggccttgatgaggcccagcaaacaggcattctcacagctgggtttatagtctttgggccccttactcagtatcctgggaaccctgggccaggaggttacagtggtcatcataattgctgaagagatcccctcccctgcccctgggttcctgccttccctcctcaagcaggcacccaggctttagagaagtatagggggcttcttccatgctgggcttaccacactgctctcaggcctcaaaccctttcatacctttattcttttttttaaccaaaaaagtttttcctataaaa

SEQ ID NO: 350054 - DNA, 438 bp, Homo Sapiens
  misc_feature (236)..(252): n is a, c, g, or t
aaatcaggaagcagcaggaacctttccagagatctaagaatgaggggagaagcaatggtagctaggcaaggaaggatagaaacttgagagaaggagaaacattagtaaaagtaacacagataggaagagaaacataactactgttccaggtaacgtctgtatcatacagttagtgttgccagtgaaacgttcccagatacaaagaattgtgcttttaattccatttcacaatctgnnnnnnnnnnnnnnnnngtcattgtctgaccaaaattccttctgcacatgaggccagtataggcaacgtcacatttgtttgtttcaaatatgcagtgtggtattttgtttactttgcatttaccgtgagcaaagatacttcttggaatggctgcagtgaggccgtgtcattggctcacaaaagtgactcataggtaatttctg

SEQ ID NO: 350055 - DNA, 1560 bp, Homo Sapiens
  misc_feature (528)..(538): n is a, c, g, or t
  misc_feature (630)..(630): n is a, c, g, or t
agcagcatggggctgttaacctgggcaggaaggctgggaggagcatgccacctttgcagtgatgaactgagcgaagtgaggcattctaatgttctactgacatacgtaacaggaagtgtgggtacatccagtgactagaaaaaactgaaaaggaaaaagactcaaagactggaattttgtatgagcaccctctaaggaagcagtctttatttgcatttttagagtgaacacatatatgaaaaacactgcaacaggttgacacaatgctcagtccctttttaagtgaattcctggggagaaagtcaaggaccttagggagcagagcagtggaatgcaaacacagaaattacctatgagtcacttttgtgagccaatgacacggcctcactgcagccattccaagaagtatctttgctcacggtaaatgcaaagtaaacaaaataccacactgcatatttgaaacaaacaaatgtgacgttgcctatactggcctcatgtgcagaaggaattttggtcagacaatgaccnnnnnnnnnnncaaacagattgtgaaatggaattaaaagcacaattctttgtatctgggaacgtttcactggcaacactaactgtatgatacagacgttaccntggaacagtagttatgttctctcttcctatccccaaagaagcacaattagaagaaatagacgcaaaatggaggagggtgttgtttaccaggttatttcagtgcagcctgtgggaatgaatacacgggccacagtgagcagtgcccttggctgtattccccagggttctgtatgttgtgcgatggttatatacaagagggtttgacaaaagagagttaactactaaaggtatccaaaaaaggcctgagaaaatctggttaaaatgtataaccttgtattgctactgatgggagttgtttttatatcttttacaaataataaaaagattgttaaaaaatagatttatccagaaagatgttgatttgaactctaaaaagcaacgtggaatcattattttcccttttgaatgaagagccatggagctccgtggttttcagctccctttctggttgcaaatcaatccttcctctggagtgagtctagggcatgcgggctcttcctaggtgtctacgtggaaatccttcactcatgcaggtgtagaacacacctggtttggttctgtgtgttccaatattttggccagcttgcccacttcaagaacaagcctcaggttcccctagctgctccttcagggacaggattagctgcctttgatttagcctggagaatcctgctctcaaaagaattgcctttacaaattcaaatcagatccttcgatgcgtgcagtgaggtgatgtgaaactattagtaatgtttaaggctaaggcaacatccatggccatttgtgtatcttaatttgatgcaaatagtgaacaataatctaaaatagattctatatgtatctcctctaactttagctgggtgtggaaggaatggaatcagatagatggaggaagaataatgacagatacacgtcgcgacgcgtccggtt

SEQ ID NO: 350056 - DNA, 512 bp, Homo Sapiens
cggaccattaggcgcgtctgcgtgtccaatattttggccagcttgccacttcaagaacaagcctcaggttcccctagctgctccttcagggacaggattagctgcctttgatctagcctggagaatcctgctctcaaaagaattgcctttacaaattcaaatcagatccttcgatgcgtgcagtgaggtgatgtgaaactattagtaatgtttaaggctaaggcaacatccatggccatttgtgtatcttaatttgatgcaaatagttaacaataatctaaaatagattctatatgtatctcctctaactttagctgggtgtggaaggaatggaatcagatagatggaggaagaataatgacaatgtcctagaaaccctgtaaaaaggtaaaaataaggagatcagcacagattacccatctctttggtgaacagtaaagaagtgtctccaattctcatagatcacactttacaaaggcggctgctgctcttatatataaaagcaccctgac

SEQ ID NO: 350057 - DNA, 919 bp, Homo Sapiens
  misc_feature (15)..(15): n is a, c, g, or t
  misc_feature (148)..(148): n is a, c, g, or t
  misc_feature (192)..(192): n is a, c, g, or t
  misc_feature (216)..(216): n is a, c, g, or t
cttcccatcttcttnccctggtaaggtgttgctccagttttccctttgaatcccaaaattttctcttgggtcttctgatgaatcatgtgagtattttcaccctcattcaaaagaggatgtcaactgctccatagaaacgaatcaaatncactattttcttccagaatctgggtgacttcttctggaaggggncatggctcgaacactgagcgtggncaagtttattgggagttgttatggtgattagcccgtcagagtcaacttggattccttcagggattttgctttgatcttctttcatttggtgtatgactgcaactttttgctgtttgcctatttcttcattgaccatgtcaacttttgggggttttgtgattgtttctctgaatggaataataggttcagatacactgatatgaatctttgcaaacctttcttttaagtcatccaggcatcgctgaaggtggacttctcctgctgtgactaaaacgtgctctcccgtttcctgaattaaaatctggacacagggatcagcctggtttaacagtttcattccttttacgagctgaggcatttcacttggatgttttggttcaacagcaactctcacaataggagtggcttcgaagttgagtggtataaatggtgggcaggagggcaggatacacagtgttgcagatttcagcacaaaatcttgaaggcctcctattcctagcacatttcctggaggtacctcctctagatattccagttcccttcccatcagaagatacaggttttccagagcacagtatgccatgtgggggacttgggggaggccatctggtggagctgagaagcctaatggtacccttcgtaaaaactcaagaggactgtatttgggccccaagacaaaaatttctttcttcttcgagccaca

SEQ ID NO: 350058 - DNA, 899 bp, Homo Sapiens
  misc_feature (485)..(495): n is a, c, g, or t
agcggaggtgatggcgcccaccgcggcctagaggtccagcgcccgccgcgagcagcggacagtcctcctgttgtgtccgaccgagagtcctggtgactttgaacatgctggtgccgctagccaagctgtcctgcctgggtgagaggaaacgggcggtggggataagtggaggagttagggcaaaagggacaaggccggtcctgggggctgtaggcacctctcgccccttctctcatcagctttctcaggctatctagggcaaaggtcacgcgctgtcagcctgttgggggaccctggcttcctccctctggggttgccccagttggtagaattaatatctaggctaaaggtcaagggcggggaaaacttgtcaacacgccctcggcatcaccaccacctgtcaacacacacacacctcggtggactcctgaactgaggcttcccaaatcctggttctaatcttcaaacctctgttggaaatggcnnnnnnnnnnntcgtatttgcccagtttttctccctggtcctgacctgactttcgtcttcggagccattctagttcagtctaagagaaattgaagtctgatctgtcacatcagtggttaacattcatatgttggccaagtcacccaagtgtatctggagccagttttctgcgttgtcctaaacattaagggctgggatatagggcgtgaaccaccaatgcctgggccccagggctatagttttaagatatggcgtaagtacaggttcatttcgttgcccactttaaacaaaggtgaccaaaccacagaattttagtggccttttcacgaaagattactctgaaagggcatagatctttagtagacccatgtgtcaagggacgattctaaaattagggtcaacgaatattgtttac

SEQ ID NO: 350059 - DNA, 966 bp, Homo Sapiens
  misc_feature (849)..(849): n is a, c, g, or t
  misc_feature (900)..(900): n is a, c, g, or t
  misc_feature (932)..(932): n is a, c, g, or t
  misc_feature (945)..(945): n is a, c, g, or t
cttcctcttctccacgcaggcttcaacaggagatttatggagaatagcagcataattgcttgctataatgaactgattcaaatagaacatggggaagttcgctcccagttcaaattacgggcctgtaattcagtgtttacagcattagatcactgtcatgaagccatagaaataacaagcgatgaccacgtgattcaggagtggcagggggtttactatgccagacggaaatccggggacagcatccaacagcacgtgaagatcaccccagtgattggccaaggagggaaaattaggcattttgtctcgctcaagaaactgtgttgtaccactgacaataataagcagattcacaagattcatcgtgattcaggagacaattctcagacagagcctcattcattcagatataagaacaggaggaaagagtccattgacgtgaaatcgatatcatctcgaggcagtgatgcaccaagcctgcagaatcgtcgctatccgtccatggcgaggatccactccatgaccatcgaggctcccatcacaaaggttataaatataatcaatgcagcccaagaaaacagcccagtcacagtagcggaagcttggacagagttctagagattttacggaccacagaactgtactcccctcagctgggtaccaaagatgaagatccccacaccagtgatcttgttggaggcctgatgactgacggcttgagaagactgtcaggaaacgagtatgtgtttactaagaatgtgcaccagagtcacagtcaccttggcaatgccaattaaccattcaatggatgtttcccccttgtattcttcttcaattaatttggattantgagggagagttggggactttcaacatctttggaattgggaaggcctttangcattaaaagggcctttggtttattctggggntttaaggtctttntttcggtttgggagtatgttt

SEQ ID NO: 350060 - DNA, 926 bp, Homo Sapiens
tagacaatattaacgggtgaacactatagaaaccgcgttatttgcaggtggtacggtcggcagtttcgggatatcgtcgacccacgctgtcgccaaagatgaagatccccacaccagtgatcttgttggaggcctgatgactgacggcttgagaagactgtcaggaaacgagtatgtgtttactaagaatgtgcaccagagtcacagtcaccttgcaatgccaataaccatcaatgatgttcccccttgtatctctcaattacttgataatgaggagagttgggacttcaacatctttgaattggaagccattacgcataaaaggccattggtttatctgggcttaaaggtcttctctcggtttggagtatgtgagtttttaaactgttctgaaaccactcttcgggcctggttccaagtgatcgaagccaactaccactcttccaatgcctaccacaactccacccatgctgccgacgtcctgcacgccaccgctttctttcttggaaaggaaagagtaaagggaagcctcgatcagttggatgaggtggcagccctcattgctgccacagtccatgacgtggatcacccgggaaggaccaactctttcctctgcaatgcaggcagtgagcttgctgtgctctacaatgacactgctgttctggagagtcaccacaccgccctggccttccagctcacggtcaaggacaccaaaatgcaacattttcaagaatatagaccaggaagccattatcgaacgctgcgccaggctattattgacatggttttggcaacagagatgacaaaacactttgaaccatgtgaactacagttgtgaacagccatcaacaaggccattggcagctgagattgacggcagcgactgtgaatgcaacctgcttggaaagacttcccttgaaaaccag

SEQ ID NO: 350061 - DNA, 965 bp, Homo Sapiens
  misc_feature (454)..(809): n is a, c, g, or t
cttttgggtatgagactaatatcactaattcctcaatagttatcatggctctatcttaattaattagaaaatatgtgtgtttaattctttgagaattaaaatagagaatattaacagagggttaaaaactgcttcaactccaataagataaaggaagctcaaaatctatgagctgagtgttcaattagctttgcctactgagttcaattttatgtcaatacaacagtggatcagacagtacgactttgaactggtgaatgtaaacaattgtttttcacctaagctgctttggaagaactgatgcttgctgctaactaaagttttggatgtatcgatttagagaaccaattaatacctgcaaaataaagcatactgtggtacttctgtttgatctagtatgtgtgattttagattgatggattaaaaattaataaagatcatacattccataccnnnnnnnnnnnnnnnnnnnnnnnnnnnnnnnnnnnnnnnnnnnnnnnnnnnnnnnnnnnnnnnnnnnnnnnnnnnnnnnnnnnnnnnnnnnnnnnnnnnnnnnnnnnnnnnnnnnnnnnnnnnnnnnnnnnnnnnnnnnnnnnnnnnnnnnnnnnnnnnnnnnnnnnnnnnnnnnnnnnnnnnnnnnnnnnnnnnnnnnnnnnnnnnnnnnnnnnnnnnnnnnnnnnnnnnnnnnnnnnnnnnnnnnnnnnnnnnnnnnnnnnnnnnnnnnnnnnnnnnnnnnnnnnnnnnnnnnnnnnnnnnnnnnnnnnnnnnnnnnnnnnnnnnnnnnnnnnnnnnnnnnnnnnnnnnnnnnnagggcgccgtctatagggggatggcccctacgtgaacattcacctaataagttttttgggttcagtgcctaaagcctaaatcgaaccttaaggagcccggtttagacttgccgggaaagccgcgacgtgtcagaatgaaggtatccgtctgccttg

SEQ ID NO: 350062 - DNA, 449 bp, Homo Sapiens
  misc_feature (22)..(22): n is a, c, g, or t
  misc_feature (28)..(28): n is a, c, g, or t
  misc_feature (41)..(41): n is a, c, g, or t
  misc_feature (48)..(48): n is a, c, g, or t
  misc_feature (66)..(66): n is a, c, g, or t
  misc_feature (87)..(87): n is a, c, g, or t
  misc_feature (150)..(150): n is a, c, g, or t
cccctaacccctccaaggtttnccaggnccctaccttaatnaattggncaaatatgtgtgtttaancctttgagaaattaaaatagngaatattaacagagggttaaaaactgccttcaaccccaataagataaaggaaagcctcaaaancctatgaagcctgagtgttccaattagctttgccctactgagttccaattttatgtcaatacaacagtggatcagacagtacgactttgaactggtgaatgtaaacaattgtttttcacctaagctgctttggaagaactgatgcttgctgctaactaaagttttggatgtatcgatttagagaaccaattaatacctgcaaaataaagcatactgtggtacttctgtttgatctagtatgtgtgattttagattgatggattaaaaattaataaagatcatacattccataaaaaaaa

SEQ ID NO: 350063 - DNA, 998 bp, Homo Sapiens
  misc_feature (5)..(5): n is a, c, g, or t
  misc_feature (7)..(7): n is a, c, g, or t
  misc_feature (29)..(29): n is a, c, g, or t
  misc_feature (45)..(45): n is a, c, g, or t
  misc_feature (69)..(69): n is a, c, g, or t
  misc_feature (78)..(78): n is a, c, g, or t
  misc_feature (90)..(90): n is a, c, g, or t
  misc_feature (94)..(94): n is a, c, g, or t
  misc_feature (98)..(98): n is a, c, g, or t
  misc_feature (101)..(101): n is a, c, g, or t
  misc_feature (117)..(117): n is a, c, g, or t
  misc_feature (122)..(122): n is a, c, g, or t
  misc_feature (139)..(139): n is a, c, g, or t
  misc_feature (198)..(198): n is a, c, g, or t
  misc_feature (203)..(203): n is a, c, g, or t
  misc_feature (241)..(241): n is a, c, g, or t
  misc_feature (245)..(245): n is a, c, g, or t
  misc_feature (248)..(248): n is a, c, g, or t
  misc_feature (267)..(267): n is a, c, g, or t
  misc_feature (276)..(276): n is a, c, g, or t
  misc_feature (322)..(322): n is a, c, g, or t
  misc_feature (352)..(352): n is a, c, g, or t
  misc_feature (368)..(368): n is a, c, g, or t
aggtntntcagatgaagacagtcatcaanattactcttcctactngagtccccattcttctggaattgnttgaaagcntgcgtgctgttnggcntcantcngttccttgtgtgaccnaagangcgatccaatgcagccnattaagaaatgtagaatgatcaagggaaaatgtgaaacaaagctaaaaaaatagtcttntctcnaacttgttggctaatgaagaaagtgcaaaaagaatgtngcantanggagtgtgttattgggtgntgaactctnctctcttttttcccccgtattttccatgagctatgtgcttttgtantatgatatttttatatgtgtaacttaggtnacttatttttgcccanttaaggctttaggatgcctcagtgcttatgtcatagccttatgagttagctttcttgctagccccctagtcggtcaccaaactagtaactagtggggcttaatgaaggtccataagtttctgagatgggagagcaacaagtagagatgaagttaaaggtatttatcattcaagaaatcattattgagtcaccattgacaggcactattctaatcagtagttcactttaatatttaataagattttctgggataacagtaagggatattagataatataccgtatgtatttattactagtcttttcctctaggaaaagggatactttgataattaaggccagaggcccattagttgagaaagtcacagatatatttctccaagaaagccaacaaccaccaccacaatgacagaaatgacaacaaggccctttaacttgtcttctagtttagagacatccttcatttgacatttagtagaattcctctttggccacaagaataagcagcaaataaacaactatggctgttgaggttctcattttggtttgttttaattttttgaactttgggtacctgtaattagtttaaaaataaagttcctgataataaagtgactgaaaatggcaaaaa

SEQ ID NO: 350064 - DNA, 749 bp, Homo Sapiens
  misc_feature (49)..(49): n is a, c, g, or t
  misc_feature (60)..(60): n is a, c, g, or t
  misc_feature (287)..(333): n is a, c, g, or t
gcaaaagaagtggcaaagaagtgtgttatggggctgactctctctcttntttcccggatnttccaagagcaaggctggggagtagagtttgtataggtaactaggtaacttatggtgccccagataaggctttaggatgcctcagtgcttatgtcatagccttatgagttagctttctgcctagccccctagtcggtcaccaaactagtaactagtggggcttaatgaaggtcataagtttctgagatgggagagcaacaagtagagatgaagttaaaggtatttannnnnnnnnnnnnnnnnnnnnnnnnnnnnnnnnnnnnnnnnnnnnnnatcagtagttcactttaatatttaataagattttctgggataacagtaagggatattagataatataccgtatgtatttattactagtcttttcctctaggaaaagggatactttgataattaaggccagaggcccattagttgagaaagtcacagatatatttctccaagaaagccaacaaccaccaccacaatgacagaaatgacaacaaggccctttaacttgtcttctagtttagagacatccttcatttgacatttagtagaattcctctttggccacaagaataagcagcaaataaacaactatggctgttgaggttctcattttggtttgttttaattttttgaactttgggtacctgtaattagtttaaaaataaagttcctgataataaagtgactgaaaatggaaa

SEQ ID NO: 350065 - DNA, 1181 bp, Homo Sapiens
  misc_feature (54)..(91): n is a, c, g, or t
  misc_feature (221)..(245): n is a, c, g, or t
agaatgatagactcactatagggcgccctggcattccaccgcggtggcggccgnnnnnnnnnnnnnnnnnnnnnnnnnnnnnnnnnnnnnnatcaggccaaatcggccgagctcgaattcgtcgagagcgggtcaggttcaggggctagaaaagagcgtcgatgccggcggcagtgatgagtcctaggaggcgctggctctttggcggctcggaggagcgnnnnnnnnnnnnnnnnnnnnnnnnngtggcccctttgcagatgtattgctgtccttgaatattagcccatttgaaaacgcctgggaagttcagccatcagtatgtccaagtacaaacttattatgttaagacatggagagggtgcttggaataaggagaaccgtttttgtagctgggtggatcagaaactcaacagcgaaggaatggaggaagctcggaactgtgggaagcaactcaaagcgttaaactttgagtttgatcttgtattcacatctgtccttaatcggtccattcacacagcctggctgatcctggaagagctaggccaggaatgggtgcctgtggaaagctcctggcgtctaaatgagcgtcactatggggccttgatcggtctcaacagggagcagatggctttgaatcatggtgaagaacaagtgaggctctggagaagaagctacaatgtaaccccgcctcccattgaggagtctcatccttactaccaagaaatctacaacgaccggaggtataaagtatgcgatgtgcccttggatcaactgccacggtcggaaagcttaaaggatgttctggagagactccttccctattggaatgaacaggattgctcccgaagtattacgtggcaaaaccattctgatatctgctcatggaaatagcagtagggcactcctaaaacacctggaaggtatctcagatgaagacatcatcaacattactcttcctactggagtccccattcttctggaattggatgaaaacctgcgtgctgttggggctcatcagttccttgcgtgaccaagaggcgatccaagcagccattaagaaagtagaagatcaagggaaagtgaaacaagctaaaaaatagtctttctcaactgttggctaagaagaatgcaaaagaagtggcataggagtgtggtatgggtgctgaactctctctctt

SEQ ID NO: 350066 - DNA, 472 bp, Homo Sapiens
gatgaagtacacagctacatcctcaaaggttaccagctcctgggacttggcctttaggagcgcagccgccaacatctcatcccccaggctgtccttgtcggaaaaggcaggaacttttgaaggaagagcactgtcaagcagggcctgaggttcctgagatacgagatcagcctgagtttccatggaagggcaaggtgctctctggtctcctgggtgcagactcagcgggaagcgggttttaaaagagaatgaggaagcactgcctgattctttccttccttctttgaagtcagtccctagaaggccaaaggagcaattactgggaatttagcagcctctgttcaagttcccgggaattctgacttttgttgatgccaatgcctgggggcagggacgacagatttgggggaccggacacggaccaggccctgttggaccctgtcacagacccacacaccggggacagaacaaa

SEQ ID NO: 350067 - DNA, 1616 bp, Homo Sapiens
  misc_feature (1555)..(1555): n is a, c, g, or t
ggcctgggtggcggtaggccaggcgtgagcctccgcgcccggccgggactgacttcaaagaaggaaggaaagaatcaggcagtgcttcctcattctcttttaaaacccgcttcccgctgagtctgcacccaggagaccagagagcaccttgcccttccatggaaactcaggctgatctcgtatctcaggaacctcaggccctgcttgacagtgctcttccttcaaaagttcctgccttttccgacaaggacagcctgggggatgagatgttggcggctgcgctcctaaaggccaagtcccaggagctggtaacctttgaggatgtagctgtgtacttcatccggaaggagtggaagcgtttggaacctgctcagagggacctctatagagatgtgatgctggagaattacgggaatgtgttctcactggatcgtgagaccaggactgaaaatgatcaagaaatttctgaagacacaagatcacatggggtcctactgggaagatttcaaaaggatatttctcagggtctcaagtttaaagaagcctatgaacgagaagtcagtctgaaaaggccgctggggaactcccctggagaaagactgaacaggaaaatgccagattttggtcaagtgacagttgaggagaagctaacccccaggggagagagaagcgagaaatataatgattttgggaacagcttcactgtgaattccaaccttatctcacatcagagactccccgtgggagacagaccccataagtgtgatgaatgtagcaagagcttttaatcgaacttcagaccttattcaacatcagagaaatccacactggggaaaagccctatgaaatgtaatgagtgtgggaaggcgcttcagccagagctcacaccttattcagcatcagagaagtccacactggggaaaaaccttatgaagtgtacgtgattgtgggaaataccttcagctgtagctctgccctcattctgcatcggaggatccacacgggggagaaaccctatgaatgtaatgagtgtgggaagaccttcagctggagctccaccctcacccaccatcagagaatccacactggtgagaaaccctacgcctgcaatgaatgtgggaaggccttcagcaggagctcaacccttattcaccatcagagaatccacactggagaaaaaccctatgaatgtaatgaatgtgggaaagccttcagccagagctcacacctctatcagcaccagagaatccacactggagagaagccctacgaatgtatggaatgtggaggaaagtttacctacagttcaagccttattcagcatcaaagaatccacaccggggagaacccctatgaatgtagtgagtgtgggaaagccttcaggtacagctcggctcttgttcgccatcagagaattcacactggagagaagcctttgaatgggatcggcatgagcaaaagctccctcagagttacgaccgagttaaatatcagagagtccacgtgaaagagccacacacccattttcctcactttccctgagtctcaagagctnttgccttaccctataaatctcaacagcttaggatgtgtccctttcaactcagacttttcat

SEQ ID NO: 350068 - DNA, 2869 bp, Homo Sapiens
  misc_feature (1493)..(1493): n is a, c, g, or t
  misc_feature (1506)..(1506): n is a, c, g, or t
  misc_feature (1508)..(1508): n is a, c, g, or t
  misc_feature (1511)..(1512): n is a, c, g, or t
  misc_feature (1514)..(1514): n is a, c, g, or t
  misc_feature (1517)..(1517): n is a, c, g, or t
  misc_feature (1566)..(1566): n is a, c, g, or t
  misc_feature (1612)..(1612): n is a, c, g, or t
  misc_feature (1614)..(1614): n is a, c, g, or t
  misc_feature (1638)..(1638): n is a, c, g, or t
  misc_feature (1640)..(1640): n is a, c, g, or t
  misc_feature (1654)..(1654): n is a, c, g, or t
  misc_feature (1999)..(2011): n is a, c, g, or t
  misc_feature (2122)..(2161): n is a, c, g, or t
agttagtgggtaggcctgagagccgaggaaaactgagcgtgggcctcagaaagaagttaaggcacccgcgagccgggcaactgccctccttccgcgccggcggagcgattaaagtgaagaaacaatggccagcaatcacaaatcttcagcagctcgccctgtttcaagaggtggagttgggttaacaggaaggcctccttctgggatacgacccctatcaggaaatattcgagtggcaactgcaatgccacctgggacagcaagaccaggttctcgtggttgtcccatagggactggtggagttctgtcttctcaaatcaaagttgcccatcgccctgtaacacaacaaggtttgactggaatgaaaactgggacgaaaggtccccagaggcaaattttagacaaatcttactatcttgggcttcttagaagtaaaataagtgaacttacaactgaagttaataaacttcagaagggaatagaaatgtacaatcaagagaattcagtatatttgtcatatgaaaagagggctgagactttagctgttgagataaaagagcttcaaggacaactagcagactacaacatgttggtagataaacttaataccaaccctgaaatggaaaaagtaatgaatgattacaatatgcttaaagctcaaaatgatcgagaaacacaaagtttggatgtcatatttactgaaagacaagcgaaagaaaaacaaatcagaagtgtcgaagaagaaattgaacaggaaaaacaagcaacagatgacattatcaaaaatatgtcttttgaaaaccaagtcaagtacctagagatgaaaaccacaaatgagaaactgttacaggaattagatacacttcaacaacaattggattcacagaacatgaaaaaagagagcctggaagcagaaatagctcactcccaggtgaaacaggaggcggtattgctgcatgaaaaactttatgagttggagtcccatcgagatcaaatgattgcagaagacaaaagcataggatctccaatggaagagagagagaaattacttaagcagattaaagatgataatcaggaaatagccagcatggaaagacagttaacagatacaaaagaaaagataaatcagtttattgaagaaattaaacaacttgacatggatttagaggaacaccaaggtgaaatgaaccagaaatacaaggagctaaagaaaagggaggaacatatggacacttttattgagacttttgaggaaacaaagaatcaggaactgaaacgaaaggcacagatagaagccaacattgttgcactcttggagcactgcagttcgaaatataaatcgtataaaacaaatatcctctatcaccaatcaagaactaaagatgatgcaggaatgcccccaatttaaaatctactgaaggggcagaaatcacaaagtacagctcagaatttgacttcagcccttccacgtctgccgttggctctgccgcaantggcgcttctggnangtnngntgnctgaagaaccgcattctcttaaaggcgaatttaggcaaatgacaactgntctggggatttataatgatttgcccgctttaaaatcctcaggtgangnaaaggtaagggaattacatcaggngngaatgatattatcnccccccagaaatgcctttaagaaaataatggagaagcaaaacatagagtatgaggcactaaaaacacaattgcaagaaaatgagacacattctcagcttacaaatttggagagaaagtggcaacaccttgagcaaaataattttgcgatgaaagaattcatagcaaccaagagtcaagagagtgattaccagccaattaagaaaaatgtgaccaagcagattgcagagtacaataaaaccatcgtggatgctttacatagcaccagcggaaactgagtttaagtccactgaaagtctctaaggaagtatcctcttgctgctaaacttggtacaagttgactaccnnnnnnnnnnnnngcttactttgggagtttacctaaaatttctgaatgttataattttggtgggcctcttttaagaatgatattttaaaatagtaaatagttcaataacagggttggcatattnnnnnnnnnnnnnnnnnnnnnnnnnnnnnnnnnnnnnnnngggggggggcgccaaaagaagtactcccagaggggaggcgcccaagtacaccgagaatccccagagatttttgggaaccaagggggcgccccaaaagagagaggcaggaatattaaaacgcgcaacggagcttggcgacgagagtataaaacacgctcagaaagcggggagaaaagcgggaacgcatgagggaaaccttggaggagaagagagacaccactcaatatcgagacggggggggcgagaacaacacatgtgggcaccaaactcccacacagaagagagaaattaaagcgcccaacagggggagaaaaacttaaaaacactttacacgagttgacaacagggcgcagcacaaacaagcgggcgcatatagaacacggcgcaggcgcgtagaaaagattggggaagcaacaggaggaggagaaatgaatcatagaggagcaaatattataaccagggaggagtgctggcgagtaaaaaaataggcggggagagaggaagacgaacacagccagacctcggcgcggccgcaacggcaggacgaagggaaccgagccggaggaggagggagaatgggaaagcgccacgacgcggcgggcggggaagtcaggaggcgacgacaaggtgcagagatgaggacgcggagggaggagacaggagcaggacgcagaaaaccatgaaagagggaacgagagacacagaaga

SEQ ID NO: 350069 - DNA, 570 bp, Homo Sapiens
atgtactttgactaaaacactcacgtaaaaacatggctgcaggatacgtctcaaaatatgacaaacgttatttcacctatactgtgactttacatgtaaacttcaaaaatcacatgctgtacatcaaatttttagattcaaaagatatccctgttttcctaataatgtaaacagtaaaactgagggtttcagttaaagggataattcgtaacaaaatcccattgttgaaacaatggtcaaacataaacatcttataattcagatctgcattcggtaacaggagaattgagagttttgatgctttgctggttttcccacagtgggagatgtagataccattgccccaaactatgcacttttcaggtaagctttacttttattttgtagcattaattcctatattgcaacgtaagggtgaacaatgaagctccaggcaagaaaagagaagtaagcagttttcctggacatattggccgaggtgaaaaatgtatagagaatcatcatcattattataataatcattattattatcttcattattctgaatactgtctcacatctttcaactcc

SEQ ID NO: 350070 - DNA, 1910 bp, Homo Sapiens
ggagttgaaagatgtgagacagtattcagaataatgaagataataataatgattattataataatgatgatgattccaaggaaaaaacctacagcgaatgttccatttctaccccgcacgcagacactctccctaacactgataacctgagcccccagcactggacggaagaatgctggcgtctccgtgtgtactggttcagggttctggccccagccttgtcaggaccccctggtgtccagagcccccacccctcccgcaacaagcagctgatgccccagtgattctctatacatttttcacctcggccaatatgtccaggaaaactgcttacttctcttttcttgcctggagcttcattgttcacccttacgttgcaatataggaattaatgctacaaaataaaagtaaagcttacctgaaaagtgcatagtttggggcaatggtatctacatctcccactgtgggaaaaccagcaaagcatcaaaactctcaattctcctgttaccgaatgcagatctgaattataagatgtttatgtttgaccattgtttcaacaatgggattttgttacgaattatccctttaactgaaaccctcagttttactgtttacattattaggaaaacagggatatcttttgaatctaaaaatttgatgtacagcatgtgatttttgaagtttacatgtaaagtcacagtataggtgaaataacgtttgtcatattttgagacgtatcctgcagccatgtttttacgtgagtgttttagtcaaagtacatggtagacagtctttcacaataaaaggaaaaggattttttttcctccaaatgtacatttatcaacctaatgattgatttttttaaaaagagatttcgccccagtctggtttatgaaagttcattgccctaaactgtgctgattgtttttaatcaagttataaatttccaacctagatcatgtatctaccaactctcctgcattttccaaaaggcattgagcttaaatattagtcttgcttagagtaggttatccacttacatgctgcgctaaagccatgcctttgaaactccttgtttaaaacatgatatgatttttgtgggcagtttcagaaaagaaaacaaacaaacaaaaatcgaccctttaattattacttgcaactcaacagatctccctgccgtactgccttttccaggaactttacttcagggctgtccagattgcagttgtgccccgtgtatgtggatctagttcacagagtctttggaagccagcagtcgtgccctccgtatactgtccactcattttatgtagatttggtatcctcagcagccagtgttaacaccactgtcacgtagtgtacagattcatcttttatgtatttaaagtaatccatactatgatttggtttttccctgcaccattaattctggcatcagatcagtttttgtgttgtgaagttctactgtggtttgacccaagaccacaaccatgagaccctgaagtaaagataaggtacacatacattatttgagtaactgtttccttgggggccaatctgtgtatgcttttagaagtttacagaatgcttttatttttgtctataacaaacagtctgtcatttatttctgttgataaaccatttggacagagtgaggacgtttgccctgttatctcctagtgctaacaatacactccagtcatgagccgggctttacaaataaagcacttttgatgactcacaagatgaatccttttttcctctgtcccaattgtgtgtctctgttccaaacacattttaaatactcggtcctgacagtgtctttagaatgtgtttggaacagagacattctaaagacactgtcaggaccgagtatttagctaatccttgaagaaataaaagtggaattg

SEQ ID NO: 350071 - DNA, 1285 bp, Homo Sapiens
tatttgtagaagcctagattgtgggcgggaatgtgggacggagggctcaaggacttggaggcatatgcctgcctaagccttaggcgggtacatgttatggagcaattttttaccaggaaagtcctggaaaatcttttctgttatccccaccccacctgagagctcttgggctgctgagggcctgtggcaactgcagtgggccaggcatggtagaaaagatgtagatcttgttatgtaggatttgcgttgtaggtggactgaagcagcaggtcaagagttgaattctcactaaggggtcactgacattttgtggtcctgtgtttaccttaatgcctaaggtgagtgtattgttcaagggtccagggacagtcactgcagtacgtgtggggaattttcccacagtaaggtaaatggatccttgggtactatgaatccaacttggggttggatttaccaaaatgtgttgtatgttgttagacatcttgttgtgtattagtcttctaaggatattgtgcatggcactgtgtagtttatagccctacactggaaggatggtgaagggagttgctagattgatagcctaaagaaaaccttctgactgtgggattagcatcaatgataaggaatgtgagcatttgctggggttgttgtcaaatagtatcacagaacagttaggactgagaggtgatttcttcttgacagaatttgatagaggccaaaaagccattacgaggatacctctgcttccagtgacagcagagtggaatcacatttgattgggcattgtcacggaaagcttgactagctggaggacatcaggctgtgctatgcttccctagggaggacatgtgcccttccctccagattagaaaggctagaatcaagagtttcaagtgctcattttcttcaaggtccaaggttgggaactatttccctacagagaaatctgtttgagtttctggtgctccaggaaatgggttggcaggacacagaaatgagaaaccctgaggccaggaagaggccaatcctaggagatgttttccctccagattcattttaaggaatatctgtgcttcctgatgtctgtgcttgagattcgggctctatatccagcatttgaactcacattctcagtggcagagtcatggtctgtggcaccatttcaaggccaaaaatcccatccaatttcccttcacatatatgacagaaaagcaagaaagtagctgccttaactcgaacagttctgggaaaaaaactgggggccttgtcctgaggctgtggagac

SEQ ID NO: 350072 - DNA, 428 bp, Homo Sapiens
aatttaatgttaaatacaaattaacaagaattcaacaaatctgctgtatagattttaagtgggtcacttaggaggagaggacatcttcgaatttctgatataaacacgttgagtaagctataggtgtatataagtaccccaagtgtgtatataatgattctcccactgattttatagagaagaactatatttcccagtaatcttcccctaaatattgtgggaaataattctgttttagtgaataagctaattaaagtctatccagaccaccatgtttttatttacagtgactatatatatccatgattttgacatagagtataattctgatgttacttatttcaatatgccttgtatatattagctgtttataagagagtcgctttttggttgaaaagtatttctaggctgagcaaggtagctcatgc

SEQ ID NO: 350073 - DNA, 640 bp, Homo Sapiens
  misc_feature (182)..(190): n is a, c, g, or t
aaaattcaaggtgcagcgatccacagaacgttgtacatttaagaagtgattccttcaagctaatttaaaatttcattgaacacatggtgaccaggaaaactttttttcaagcactgttggaaagcaccacaaagccctttagaattaatctggatttgtttctcaagttctgctgaagtttnnnnnnnnnctttattatacaaataactcaaaattttcctgtgtaaaactaaacctgtagttttaaaacataatcctgtttgcattagagctcactgtctttttgtgatggaaactgtgttcgtatggaatgactaaaaatcttttatttggtttgtttcaaattacaattgctgatggacaatttgtattgcagcgagaacaacagaatgaaagaaatgtatctctgtgcggctatacatatacatacataaaattgatttttaaatttaaaacatatggaaaacaaaacattgaacagtttgaattttgccaagttggacattaaagtaaaaatgaagtgaaatcatgcattgaaagaaaacattttgtttctaaattagtctaccattgagtgagaataatcaatatcaagaaagaagactatctttctcaactaaacaataatattccaatcagc

SEQ ID NO: 350074 - DNA, 1244 bp, Homo Sapiens
agagtttacaaaggtctaggatgacatctggtgtattgactgtggccagtcttaaagctagtttttgctatgtggaacatgctgctctaattcagatttaaagagtttcttcctgttaattcgaagctcactgtgcctcttgtttccgagggaagaaggactgattaagtcatctaaatggatgcaatactgaattacaggtcagaagatactgaagattactacacattactgggatgtgatgaactatcttcggttgaacaaatcctggcagaatttaaagtcagagctctggaatgtcacccagacaagcatcctgaaaaccccaaagctgtggagacttttcagaaactgcagaaggcaaaggagattctgaccaatgaagagagtcgagcccgctatgaccactggcgaaggagccagatgtcgatgccattccagcagtgggaagctttgaatgactcagtgaagacgtcaatgcactgggttgtcagaggtaaaaaagacctgatgctggaagaatctgacaagactcataccaccaagatggaaaatgaggaatgtaatgagcaaagagaaagaaagaaagaggagctggcttcaaccgcagagaaaacggagcagaaagaacccaagcccctagagaagtcagtctccccgcaaaattcagattcttcaggttttgcagatgtgaatggttggcaccttcgtttccgctggtccaaggatgctccctcagaactcctgaggaagttcagaaactatgaaatatgaaatatctctgcttcaaaaaatgaggaagagcaagactgtcccctatgctgccaacatgcagtctttgtttatgtcttaaaaatgtcatgtttatgtcatgtctgtgaattgctgagtactaattgattcctccatccttgaatcagttctcataatgctttttaaataagaaaaattcagaagatgaatttcttccaatatttgaataaattaaagctcttagatacagagtagattgtattatatgctttttcctattaatactacttatagaaatccattaaaaagcaatctctgtacagtgtatttaaatatttcattgacatactgtgatctctattagtgatggatgtacaaaaaatgttttcttacccttgacttacaatgaaatgtgaaattacttgtctgaaccccgtggggagaaataaataattttcccaaagttcaaaaattcactggcccgtcgtttc

SEQ ID NO: 350075 - DNA, 1056 bp, Homo Sapiens
acccgtagtttgataggattatgggaagagacagggaggtgggtggagattggaagtaggctggtgatcacagtaccttattgatttacagtcattatcaaatctcccaggaaggagtttaattgcaattcaggagaaataatgatgtacaaaccaactagaaagagaaccaaaataggactgactctcaaagcacattgctagcatccaccaaaaagcaaagtggtagagaagcagtgagtgggattaggggtgagagaagatggagaacattaggacaggcaagataggcaatggttagatggaagctaaaaaataagaaaaggaagcagctatggtctaagtggaaagagaactgaaagaggagtcagaagacctggattcttgctgtctacctaccagctaggtttccttataatttagtaaagctacttaacctcagagaccctcagtttcttcttttgtaatgtgacctcacaggaccagttatagagaagaaataaaatagttaagtgaaaatacttcgtaaaccatatagttctaatgaaagtgtcaagaatgagaagaatggagaagttagaaaaaggaagagtggggaagataacctgtcaaggataaataagtgatagataccattcagcttcattaaaagccacgcaagcagcatctgaagttgggtttttttaaaaagaagagaaaaaggcaatcatgcatactgccgggttcaacttagatacacgagctattgggccaccgaggaaaacggtgtggtagtaagcatcttgctactaccgcaagctggtggcatccatgagctatgggactggaaaaatttcacactgaggccaatttttctaactataaagttaaaaaggtctatatcctctcccttatttcagagggattgtgtggaaaattaccaataagaagagtcttgaatttattgcaaatattttcttcaacaaaatcagactctttaatgtgttaacggtctggttttgggccaggcacagttgctcgcctgtatcccagcacttgagagctgagactgggtcc

SEQ ID NO: 350076 - DNA, 361 bp, Homo Sapiens
agttcgacggagactctcaagagcactgctagcatccaccaaaaagcaaagtggtagagaagcagtgagtgggattaggggtgagagaagatggagaacgttaggacaggcaagataggcaatggttagatggaagctaaaaaataagaaaaggaagcagctatggtctaagtggaaagagaactgaaagaggagtcagaagacctggattcttgcggtctacctaccagctaggtttccttataatttagtaaagctacttaacctcagagaccctcagttgcttctttggtaatgtgacctcacaggaccagttatagagaagaaactgagagtctccgtcgaactgggtaccgagctc

SEQ ID NO: 350077 - DNA, 495 bp, Homo Sapiens
  misc_feature (304)..(409): n is a, c, g, or t
agaagacaaccacaaaataagatgcatttaaaaccaaatatattagctatcacatgaattgaatacagaatgcgtgaatagtaatttctaatggattaaaataatccagtagtagttcataaattacacatctaagatataatgtcatagaaatatatgaaatagaagaatgaaatatgtatacttataattactaaacacaaacacacaaaaatgtgtatttgcatctgacaagtaggaataaggaagaaaacaccagtaaaatatactttacagtttatacacttttaaaaattttaatatnnnnnnnnnnnnnnnnnnnnnnnnnnnnnnnnnnnnnnnnnnnnnnnnnnnnnnnnnnnnnnnnnnnnnnnnnnnnnnnnnnnnnnnnnnnnnnnnnnnnnnnnnngagtgagccactgcacccggcctgtatacaatttttaccatcaattcaaattacattaaaaaaatttagtataatgagagtaaaga

SEQ ID NO: 350078 - DNA, 1744 bp, Homo Sapiens
gtacccgactgcatccaacgccgccataaaacagcagctacacccgtctggctgctgttttatggaggagttggaatctgcacaggcctctgggtctgggggagaagagtgatccagaccatggggaaggacctcactcccatcacgccgtccagcggcttcacgatcgagctggcctcagccttcacagtggtgatcgcctccaacatcgggcttccagtcagcaccacgcactgtaaggtgggctcggtggtggccgtgggctggatccgctcccgcaaggctgtggactggcgcctctttcggaacatcttcgtggcctggttcgtgaccgtccctgtggctgggctgttcagcgctgctgtcatggctcttctcatgtatgggatccttccatatgtgtgatttgtcttcttccagctgcaaacagctaaagggatggtctggtgttggcgtgtgggagacatgtgtgctcgtgccgcacatacacatcctggccgtgcacggctctctcatgaccagctctctgcctcccttccaggaggctccatcccacactgttcacccaggctgcggagactcaccttcccgagctaacttaactactgtacataataatatgtattaaactggtatcgtggtgatataatgtggtgcagttacttatatattaaatatctattgtatccatagaataggcagcattatttcaaacatattcaagttgggagtggagatcattgcctagaagtcaatattcaataaatcttgtacataactatttcgatggcaaatgttaagccttctaaaaggaaagtgtagattggaaaatgattttttttccaaatgatgtttttgccttctaatatactgtaaggtaatgagcttcagaacaggcaacctgaccctgcagaggtcgcgtgctgtgggatgacagcgggacgggagctcacaagtgctttcactgaagatttgttcatatactgtgtattgattgttgtgtaatatatcatcattgcttttgtaaatacgtaaaactgtaattttttaatggtgtgcttcccttatacttttttgatcagagaattttggaaagtaccaaagaagcaggggaatcattggccagtgttacgttttcacattgtctgtctcccaccctcactgatcacgcctgccccagagcagtgtgtggcggtgacaccgtcacccagcatgcgccacgccgtggctcccaccagcagtgccaccgccaccacaccccagatcccacccaccttgcagtggcctttccttgtcatcagagtagagaatgcacaggtgttggtgagggcgtgtggctgagcactacatgtcaagtccagagtcagtttctatcccaattctccctgcagcctgaagaacggatccttgtctccaatgtcagcacaaaggaggctttttctgtgctttgacattctagcacttcagggatgagagggagggagaatcctggatgctggatggagtatttctctgaggcccacacaaagctggacacccccaggctctactccatcccattggagtctcttctttttttgatagcgggagggaggaagtacgactaatgttggagcctgaaactatggaaatgctgctaaaatttttatattgacaaacattttcttggtacttcattgtcatttttcattaatcaaccatattaaatttataataaaaaatgcccctcagaagtttgcctttg

SEQ ID NO: 350079 - DNA, 1667 bp, Homo Sapiens
  misc_feature (266)..(294): n is a, c, g, or t
  misc_feature (1436)..(1473): n is a, c, g, or t
  misc_feature (1532)..(1532): n is a, c, g, or t
  misc_feature (1576)..(1576): n is a, c, g, or t
  misc_feature (1612)..(1612): n is a, c, g, or t
aattcccgggatctggatctctaaagctaaagccttgcagaccccctagcccctgccccggccctgaagttgaaaggttaggtaccaataacaagttctccatcatttaaatggatgggaggcctctttagtgtagtcagcttaaactggactgaaggaaaattgattttggactttggggaagctaagatcattttttaccactgcccagaaatacaccagtcagtttggctccactaacatctcatagaaaatgaaaaagaagnnnnnnnnnnnnnnnnnnnnnnnnnnnnnatagacttcattgctccactcacaagcaagaataagatgtgtaacaagaataagatggaagtgagcgttgttgaacacctggataagaagtcaaagagagtagggtcttgagataatctcaccattctacagcttcctataatgttgagttcattaatggtttggttagaaaggggaaattaaagtgtagacttctgccaaaaaccagagggaaagctttatttggcctgctgttttcctacttacaaagctgttcattgcaatgtagggtttactgtattttctctagctgcaaatcatctccctgctgaacacaagaaaggctgatgtcaaatgaagcacaacttggaccctcatttcattatccataggtctgatgaaatgcaagccagcctagggaaatggagaaagatccagcagaccagatttcatttaccttgggcccacttcagaataaatcagaaatacagttatacctagctcttagacagagggaaatcctagaaaatcctggggttgccatggaccagaccttgcctcctagtttccctaggcctgaatccaggctattacacaccaggactactcacctggagcaaattcttatttacaaatccttttttctgagatcaacctctggcattctctgcattgtgattacattgctcatttgatctcttgacaccttctaatttacctcacttaaaaaaaatttaacctgccattggctacatcaactccctctccccctatggagatttcacaacattcattgaaatctttggaaataactgagtttcacaaaatcagggttgaaaatcaaatatacaagttataaaggtatttggctcggggactagtcccagttctcctgaataagagtgcatggatttatcattccatggtgcaaaataagaagctttttgagtgagctcaaatggctcatacctagaacattgctagtagccaggaaaagtcctgggaactgctaacttagctatgtgatgtcccttcatttcctttgcatgtctgcatgtttttgtgtgtgatttgaatttgacttttgtgagctatttttgcatgctattatttgggtttattttataatttaaacattgttttcttcctctgcatctgtgtcnnnnnnnnnnnnnnnnnnnnnnnnnnnnnnnnnnnnnnactaggcgaccccctcctgcagttccaggacgaccatcctaacccccatcattcatctncttttgtttccaacaacatgtctatccatggtatttaaaagctnttcatttgcactatatgtcgtatgtacataaaaacntttatttttcatccatgtgtataataaaaacaaaagttattctaaattaaaaaaa

SEQ ID NO: 350080 - DNA, 926 bp, Homo Sapiens
  misc_feature (836)..(836): n is a, c, g, or t
  misc_feature (844)..(844): n is a, c, g, or t
  misc_feature (852)..(852): n is a, c, g, or t
  misc_feature (861)..(861): n is a, c, g, or t
  misc_feature (868)..(868): n is a, c, g, or t
  misc_feature (871)..(871): n is a, c, g, or t
  misc_feature (873)..(873): n is a, c, g, or t
  misc_feature (880)..(880): n is a, c, g, or t
  misc_feature (887)..(887): n is a, c, g, or t
  misc_feature (891)..(891): n is a, c, g, or t
  misc_feature (895)..(895): n is a, c, g, or t
  misc_feature (904)..(904): n is a, c, g, or t
  misc_feature (907)..(909): n is a, c, g, or t
  misc_feature (917)..(917): n is a, c, g, or t
ccgcttccggaagtgggtctcgtctcctcccaagcggacatttgtgcctgaagctgccgggtctgctacggcaccgcggggctgcagaaacccgggggccaagggcgggctgcttgccgctatggctggcagtcaggacatattcgatgccatcgtgatggcggatgagaggtgggtggtgaggccgggcccgcaccccgccctgtctggtcgtctcccagcggcttcgccgccggctgcggcccagggcggctgctggagcctggcgtcccttgggcgtgcgcattggggagcgcctggtggccgtggacgcagggacaagtgtgggcctgatgctctggtcctcttctcctggcccgctccggcggggcacgtgcccagctgctcttccagacccgccttccctgtcagggctgccccaaacatctgctcagcctggtggttcccctcctccgaggccgcctcgtcctctgggaggacagacctttgccatctgggagctgcctttttttctggttccttaatcataggacatacggcagtattcatggatgtgctgatagatgtacccgaccacaccccttttccctccagagcccctggggagcccctcgtgctgcgacagtgggggagctgtgagttgcctcctggctgacttccagtgcccggcccagaggacgcgtccatagatgttagttaagaaagcggccgaacatttagcagtcaggcgctgacgtttatttagctcgcgctgtgagtcagacactgagctaaacgttccaccctggttatctacttcagccctacttagtaagtggatctattattcttcgganttacaganaggagganagtcacttncagggtnaanantattaantgggagnatgncctnctcatgggngcnnngccactcntgcattttg

SEQ ID NO: 350081 - DNA, 2019 bp, Homo Sapiens
  misc_feature (42)..(42): n is a, c, g, or t
  misc_feature (1138)..(1138): n is a, c, g, or t
taggggaggctgagccagggagaatcacttgaaatccagganggcgaagtttccagtgagcgaggatcgcgccaatacactcccaaactcggcgacagagtgagactccgtctaaaagaaaaaccaaacaaaaacaaagcgagccaccgtggagatccacctgccgctgctcccgcgggggtcacttctctggctcctgcagccggcagcttaggcagcacaacacaatccactaggacattcgggaatggttttaaaaccaaagtggattcatggcgaccccttaataatctcctggactgctttcggacccatgctttctggaaacaggagggggtgtggagagcccagcgtgtggggacttcggtgacccctgggggggtacacaggagggtgtgtgaacacgtgccatcacatatgaccaccactcgcctcgtggggacccaccgaaccatccactctgctcatctgtgcccaccccactgcctctgtatgacgcctcgtaaggacagagacaaaagagctcctaggagaggggagaatgcaggaggctatacgcatggttctcaaagcttctgcaaatataacggcggcctaacatttggtctttggttcaaaatatttccccccttcaccattttttaatgctgcaaagctcatcgcccctctagggacagtgcaaaggatatgtctgggtcccctcaggatcaggttggcctttcttcctctcagccagatgcccaggtaaactggccaccacagactcccccgtgctccgtgaggcttggcaggacctgtgcggcctgggagggagggcagggactcgcctgtgcattccggaggcggctgtgcctggtggcagtgaggcacagccttagggcggaagtcctagctctgctgctgggtgcccttagaccaggcaatcccttcgcgtctcccctccctcctctgtaaaatgagaataacacccatcttgtgggctcctgaagggattaaataacacacgggaggcacgtcccgcaccgcctggcacacaatcggcctcgacatgcggcacagcacccgtccaaacctcccatgagcctcattcggggccaaccatctctctcattgcaaataataataataataaaataanctgccttcagtccaggcctggtgactaaccctatccagagccaactccaacccagaaccagctaggcctgtgctgccggagaggctgtcaagtcaatgcacgagggctctgccagggacggcttcagcccaacaaagggcatgtgtggagaggccccaagacgggcaccaaggtgacacaggcagaaaaccccagggaaggaagccctcccacggccgaaccggaaccctcaccctcccaatgaacaactgccttcccagcaccgtctggcccttcaccgcatttctaaacacgtcacacacacatctgttcctcgacgttcggtctctgttcatccatcctcctcaaaatgaaagtccggaaccttctgcactaattttaaagtctggctgaacattgagtaacgaacaaaactgtttaaattttcctctgatcttgtctaagtcttcatggagtttatcgtaagtagggtcatcataagggaatttctggatcattccaatcaatgattctaagaccttcatctttctgctgtccttctcagtggtgcaactgtgcagtagacatttccatgcaaaagcaaaaccttggtagcacccgatctcagacccgattttggctccatgcagcgtgccatgctgccttccctccatcacacccaaactactgccttcttcatagccttcccgatacccttccccatgaaacctctcagtccgccatcacgatggcatcgaatatgtcctgactgccagccatagcggcaagcagcccgcccttggcccccgggtttctgcagccaccgcggtgccgtagcagacccggcagcttcaggcacaatgtcgcttgggagagacatcctaattcggcggtaccagcct

SEQ ID NO: 350082 - DNA, 1627 bp, Homo Sapiens
  misc_feature (157)..(157): n is a, c, g, or t
  misc_feature (317)..(336): n is a, c, g, or t
  misc_feature (1135)..(1251): n is a, c, g, or t
aaaaaggggttgtggtttttcaacgaaaacccctcacggggttcccacttaccccaggggggcccccagggggccaggtttttcccttcttgggcgggccaaccacgggggcgggaatcccacccaaggtttgggggggcccgccccgaagccccgncgtggtgagaacccgcccggggttcccccaagaccaggctgtgtccttcttctttttccctgcccccgtgatgctgggacttcatctgatgcggggcgtagcatcatagtagtttttacagctgtgttattcttgcggtgtagctatggaagttgcatannnnnnnnnnnnnnnnnnnnaacaagtgtgtcttacgtgccaccacggcgttgtacctgtaggactctcattcgggatgattggaatagcttctggaatttgttcaagttttgggtatgtttaatctgttatgtactagtgttctgtttgttattgttttgttaattacaccataatgctaatttaaagagactccaaatctcaatgaagccagctcacagtgctgtgtgccccggtcacctagcaagctgccgaaccaaaagaatttgcaccccgctgcgggcccacgtggttggggccctgccctggcagggtcatcctgtgctcggaggccatctcgggcacaggcccaccccgccccacccctccagaacacggctcacgcttacctcaaccatcctggctgcggcgtctgtctgaaccacgcgggggccttgagggacgctttgtctgtcgtgatggggcaagggcacaagtcctggatgttgtgtgtatcgagaggccaaaggctggtggcaagtgcacggggcacagcggagtctgtcctgtgacgcgcaagtctgagggtctgggcggcgggcggctgggtctgtgcatttctggttgcaccgcggcgcttcccagcaccaacatgtaaccggcatgtttccagcagaagacaaaaagacaaacatgaaagtctagaaataaaactggtaaaaccccagcgtggtgcctgcctctttgcttcctgggctggccgtgagccagggacgcgtgtcctggtgccctagaaccagggcagggtggcaggcttggcggatgtgggaggccgcagcnnnnnnnnnnnnnnnnnnnnnnnnnnnnnnnnnnnnnnnnnnnnnnnnnnnnnnnnnnnnnnnnnnnnnnnnnnnnnnnnnnnnnnnnnnnnnnnnnnnnnnnnnnnnnnnnnnnnntggggacagaatccagccaggagcaggcacacccctcccaactgggaggaagccctcagcacaggtgtgtgaggtgggaggcggtgtcctgtccccgggaggctccagagaataatttgcaggctgcctggctgggtgagcccacctccaaccacgcgagacaacagctccggcctgggtgacgtgagcggtgcccattgatggggaacatcttccccctcttccttgccccaccagtttgtcttcccgggttatttgcagataggaaaataaataaagccggcattcgttaaccctcttttggcgcaaactgctgtttgctctggatgaatcatggtcctttggcgacgccaggctccgggagagcaaagcaccg

SEQ ID NO: 350083 - DNA, 1674 bp, Homo Sapiens
  misc_feature (21)..(22): n is a, c, g, or t
  misc_feature (521)..(540): n is a, c, g, or t
  misc_feature (879)..(899): n is a, c, g, or t
  misc_feature (1505)..(1541): n is a, c, g, or t
ccgctgtgccccgtgcacttnngccaccagcctttgggcctctcgatacacacaacatccaggacttgtgcccttgccccatcacgacagacaaagcgtccctcaaggcccccgcgtggttcagacagacgccgcagccaggatggttgaggtaagcgtgagccgtgttctggaggggtggggcggggtgggcctgtgcccgagatggcctccgagcacaggatgaccctgccagggcagggccccaaccacgtgggcccgcagcggggtgcaaattcttttggttcggcagcttgctaggtgaccggggcacacagcactgtgagctggcttcattgagatttggagtctctttaaattagcattatggtgtaattaacaaaacaataacaaacagaacactagtacataacagattaaacatacccaaaacttgaacaaattccagaagctattccaatcatcccgaatgagagtcctacaggtacaacgccgtggtggcacgtaagacacacttgttnnnnnnnnnnnnnnnnnnnntatgcaacttccatagctacacgcaaagaataacacagctgtaaaaactactatgatgctacgcccccgatcagatgaagtgcccagcatcacaggcgcagggaagagaagagggacacagcctggtctctggggacaccggcgcggttctcacgcacgcggcctcggggccggcccccgccagcctgtgtgggatcgcgcccgcgtgtctgcccgccaaagcaggcagaacctgcccgctgggtccaccatggctaagtgaagcatgaggtattgtgaaacagcaacctttttggaatagagcagtaatcacattaagtcaaaattgatcacataatnnnnnnnnnnnnnnnnnnnnnggcatctgtaatacaatgttctaagagaaaactaaaactagtacatggcagtatatgacattgtaaaacaaaaaactgatcctccaatagcagcaaacaatgtgaaagagatacacagaagcgatgtgaatatttccaaaccgtgcctggaagtcaacggtagcagcgcaataagaaaatggagctgcggcctgtccccggtgtgggcaccgccccttcccctcgggagcctcctcctcacacctcctcccgcctgtcctccctcacacgtcagcctccacactcttgccacctcccttcaacacttcctaaataaaaattacaagaattacatagccaagatgtgcaaattgtctattttgtcactaagttttttaaaggaaggggcaggggataagaattcatcggaaccgaacttaggttgagtaccctaattttccttgcacccatgcctgtccaatcagatgactctgggaaacgccaaacaggctgaatcaatgtctttgtgtggtttttttcttccagattgtttttttctcacctataaaaggatctatctttaaaaataaactgtattaaatctgtaacatcaaaggcagaaggttnnnnnnnnnnnnnnnnnnnnnnnnnnnnnnnnnnnnnttaaatcaaggggagattgcatttataaatcatactggccttatgaacatcctctgcaataaatatactttttagccttaactataaattatatattttagtgtttaaaaaccttccggtgtgaaacatctaa

SEQ ID NO: 350084 - DNA, 709 bp, Homo Sapiens
  misc_feature (78)..(93): n is a, c, g, or t
  misc_feature (138)..(138): n is a, c, g, or t
gtgaagcatgaggtattgtgaaacagcaccccttttggaatagagcagtaatcacaataagtcaaaattgatcacatnnnnnnnnnnnnnnnnttacaaaaaaggcatctgtaatacaatgttttaagagaaaactanaactagtacatggcagtatatgacattgtaaaacaaaaaaactgatcctccaatagcagcaaacaatgtgaaagagatacacagaagcgatgtgaatatttccaaaccgtgcctggaagtcaacggtagcagcgcaataagaaaatggagctgcggcctgtccccggtgtgggcaccgccccattcccctgggagcctcctcctcacacctcctcccgcctgtcctcccctcacacgtcagccctcccacactcttgcccacctcccttcaacacttccctaaataaaaattacaagaattacatagcccaagatgtgcaaattgtctattttgtcactaagttttttaaaggaaggggcaggggataagaattcatcggaaccgaacttaggttgagtaccctaattttccttgcacccatgcctgtccaatcagatgactctgggaaacgccaaacaggctgaatcaatgtctttgtgtggtttttttcttccagattgtttttttctcacctataaaaggatctatctttaaaaataaactgtattaaatctgtaacatcaaaggcag

SEQ ID NO: 350085 - DNA, 467 bp, Homo Sapiens
  misc_feature (225)..(233): n is a, c, g, or t
gaaatattgaactaatattcaaatatttgaatgctttggtttcagggattggtttaaaattggagtccttttttatgggttagtcttacaaaaatttaagcctttatatttttgactttaaatcaaaacaaatgctattttaaatgtacagaatagattggtagtgcagaagagtgtaagttcttcataggagctttagaaaagagaaatatgtgctaattcagnnnnnnnnnaatctgcactgtacatatatacttggtaattatgagcttgattttgtttttggaaatatgtgttcataatttaggtaatttgctacttaaagcactaagtctctgatacctgaaaagtacatgtaaatggtgatggtgaaataatactgcagttaacttaataaatgtatactggtgatttttgtatgctggattaaaactccagatattaaaatataacctggataaaaagcc

SEQ ID NO: 350086 - DNA, 993 bp, Homo Sapiens
ttaaagttagggaggctcgggcctgacactgccagccccagtgagcatccctggctacctcgggattatgtgcaagctgctttgtcctacatttctttcatctggttcttattgggagtgcttctctctaataaaaattgatttcccacaaaataggcaaagctgaacaaagatgaatgcttttgataagttgggtttcacttcagttgaaacaatgtgatagaatatccaggtgtggcatgatggggcaggaggaggtgcctagaagggaaaagttatttttgtttcttagtgttgtgttgtggggatgggacagataagaataagatgtttattgccctaatcatgctaagagactattattcaatatgcttttcccgcttttctaagaggaataaacttagacaaattacattataaacagttcccctactactatctcccactctagataaagccagtgggtggtatgggtccttttattccttatagtattatgccaaagaatcaacttattttcattgaagattataaataaatgaagcttgttatagccataatgatttgagtcagtataccattttacctataaaatgcaaaattcatccttgcaaccccattcaccaggagccttgaagcattttgtttactccaaaggccttgtcaaggaagcataattttttgttttgccttcttatttagtcagtttggtcatatttacttaaaaaaacaaactgaaaatcacactcctttatatgttgatataactgattttatagaatctgtctgttctttgtttaacaggtctctgtaagcaagcttgcaagtgtattttgtgtacattttatctgaggtggaaatgaaaattctaaagagaaaatattttaaaagatattgtatttatgttgcttgtgttgtagaataaagattcaaatgcattaaaaatctggtacatgaaacaattgtgtttactgaataaatatatataaatac

SEQ ID NO: 350087 - DNA, 972 bp, Homo Sapiens
gggcgaggcctgggtggcgaattcggacgaggactctggtgaaatggcctctgctactgcggcagcagcacgacggggcctcggccgggctctccctctcctctggcgtggctaccagaccgagcggggcgtttacggctaccggccgaggaagcccgagagccgcgagccccagggcgccctggagcgccccccagttgatcatggccttgccaggttggtgacagtatattgtgagcatggtcataaagctgccaaaatcaaccccctcttcaccggacaagccctgctggagaatgtgcctgaaatccaagccctggtgcagacactgcagggacccttccacacggcaggattattgaacatggggaaggaagaggcctcacttgaggaagtgttagtctatctcaatcaaatctactgtgggcagatttctattgaaacctcccaacttcagagccaggatgagaaagactggtttgccaagcggtttgaggaactgcaaaaggagacgtttaccacagaagagcgaaaacatctgtcgaaactaatgctggaatctcagctgatgttccgtaaaatgcgaggcttaagtgaatttccagagaatttctcagccactggagacgtcctgtctcacctgacctcctctgtggacctgtactttggggcgcaccatcccctccatgtgacaatgttgcccaatccctcgcacctggaggccggtcaccccgtggccgtgggcaaaactcgcggcaggcagcagtctccccaagacggcgattactctccagaacactcagcccagccgggggacagggtcatttgcttacaggtccatggtgatgcttccttctgtggtcaagggattgttcctgaaaacttcacgctggtccaatctcccacattttcaaaattggtgggaagggggccttttgattggttataaaccggctggggttacccccctcc

SEQ ID NO: 350088 - DNA, 1931 bp, Homo Sapiens
  misc_feature (1063)..(1063): n is a, c, g, or t
  misc_feature (1085)..(1085): n is a, c, g, or t
  misc_feature (1143)..(1143): n is a, c, g, or t
  misc_feature (1161)..(1161): n is a, c, g, or t
  misc_feature (1188)..(1188): n is a, c, g, or t
  misc_feature (1265)..(1265): n is a, c, g, or t
  misc_feature (1304)..(1304): n is a, c, g, or t
  misc_feature (1405)..(1405): n is a, c, g, or t
  misc_feature (1422)..(1422): n is a, c, g, or t
  misc_feature (1426)..(1426): n is a, c, g, or t
  misc_feature (1553)..(1553): n is a, c, g, or t
  misc_feature (1557)..(1557): n is a, c, g, or t
  misc_feature (1728)..(1728): n is a, c, g, or t
  misc_feature (1788)..(1788): n is a, c, g, or t
  misc_feature (1897)..(1897): n is a, c, g, or t
gcaggtcgatctaaggatccctatttcacgggctgctgaaattgtcggcctacagcgggatcactgaatgtcattattggggatgccccatagagggaggctgaatttattggacaggccttctgcagttccctccagagctgatgttccgtaaaatgcgaggcttaagtgattttccagagaatttctcagccacgggagacgtcctgtctcacctgacctcctctgtggacctgtactttggggcgcaccatcccctccatgtgacaatgctgcccaatccctcgcacctggaggccgtcaaccccgtggccgtgggcaaaactcgcggcaggcagcagtctcgccaagacggcgattactctccagacaactcagcccaaccgggggtacagggtcatttgcttacaggtccatggtgatgcttctttctgtggtcaagggattgttcgtgaaacattcacgctgtccaatctcccacatttcagaattggtgggagtgtgcatttgattgtcaataaccagctgggttacaccactccagcctgaaagacgaaccgcttctttatactggagtgatatatggaaagttctagcaccccgcattatccacgtccatggcgagcgaacagaaataaatggaacatataagaacgagtatataatgtgaaatactaacaggaaaaagaaaatggcaccgccaaaaatagaaggggaagaacgcgacccgctgcatggcaccgggtggctctgagtccccgacgacagagaaaggatttaatagtccaccgagatatcctctcgtcacgaatacattcttgccaaccgcgaccgtctaggtgaacgaggatgaggttgggaaggacaagggaccgacacgaagaagacgaccaactcctactcggacgcaacgtgcgaaccggcgtgccgctatgagctggtcacacttgcatcgatagccggcacgaaattacgcttctgagatgatgagagctcgcagtcgagcactagtgcggctcacattctctgttgcactacgcgtgcagctgatagagtgaagtancgatgacaagacacggacacgnagctaggagagtgtatatgtcagctcactgatggagcctcattaacaatggccaacgnagaggatagtacgcacgngatcaaaacataggtcctgatacacanacccctaatgaacatatcacgtccgagaaatacgacaccacgctacggcgccctaagttgtaacgacatttgatatntagttaccacaactcctaataccatccctcttccatgtnagcaactccatccgactactattcgtaaaaagtcaataactaatcaatacaacgctttaaggttactgaacatatcacaaatagccacaacccaatagtcngctccccacctcatcantgtnaacagtacgcctcatcagtgaagtactaacaccgctgcgaatcaggatggggatagcccgagaactgatacaccatccaacacattgaccagaaattatcacaaagccaacactatctaagccaganaagnagagcactatttaccctcgataacctaaataaatactcgtacctgggcacccggagcagcatagggccgagacgtgatagttagctctggatgccacactcatctcgtcagcactaaaatgatggtgttgagtgaactagcaaaacgactgcgcgctctcgatgccgcctngatcaagcctggcagccgatctgccgacacatgcacaaactacaaacccactgaagaaangagaaatcccagacaacgacgatgactcgtgtcgaccccccttttgtaattttcgtccctccgacctgctccctgatattctgacataagccccttccacttccactcnaaccaacaacaacatgagatcacacccgtcgagc

SEQ ID NO: 350089 - DNA, 1177 bp, Homo Sapiens
  misc_feature (341)..(387): n is a, c, g, or t
  misc_feature (906)..(907): n is a, c, g, or t
  misc_feature (940)..(942): n is a, c, g, or t
  misc_feature (1019)..(1020): n is a, c, g, or t
  misc_feature (1039)..(1039): n is a, c, g, or t
  misc_feature (1042)..(1042): n is a, c, g, or t
  misc_feature (1047)..(1047): n is a, c, g, or t
  misc_feature (1056)..(1056): n is a, c, g, or t
  misc_feature (1108)..(1108): n is a, c, g, or t
ggcctgggtggcgttctcagacgagggacaggccttctgcagttccctccagagctgatgttccgtaaaatgcgaggcttaagtgaatttccagagaatttctcagccactggagacgtcctgtctcacctgacctcctctgtggacctgtactttggggcgcaccatcccctccatgtgacaatgttgcccaatccctcgcacctggaggccgtcaaccccgtggccgtgggcaaaactcgcggcaggcagcagtctcgccaagacggcgattactctccagacaactcagcccagccgggggacagggtcatttgcttacaggtccatggtgatgcttnnnnnnnnnnnnnnnnnnnnnnnnnnnnnnnnnnnnnnnnnnnnnnnctcccacatttcagaattggtgggagtgtgcatttgattgttaataaccagctgggttacaccactccagctgaaagaggaaggtcttctttatactgcagtgatatcgggaagcttgtgggctgtgccatcatccatgtcaatggagacagcccagaggaagtggtccgtgccacacgactggcttttgaataccaacgccagttccgcaaggatgtgattatggatctgttgtgctacaggcagtggggccacaattgagctggatgagccattctacaccaaccccatcatgtacaaaatcatcagagctcgaaagagcattccagacacatatgcagagcacctcattgctggcggactcatgacgcaggaagaggtgtctgaaataaaatcctcctactatgccaagttgaatgatcacttaaataacatggccccactacaggccccctgccctgaacctgcaggcccactggcagggcctggctcagccagaagcgcaaatcaccacctggnnagtacaggtgtgccccctcgacctccctgcggnnnttgttggcatgaaaagtctgtaaaaggtgcccagaagagctgcagaatgcacaagtcacctggctgaagacacatgnntcagtcccaaaaatggagnaanaatgnatggacggnaaatcaagctagactgggggccaccgcggaaaaccctccttgcccttggggntcttttaacttggcctccaaagggttttatattggtccgccccaaaaaagggggccccaaaaatatgtt

SEQ ID NO: 350090 - DNA, 1114 bp, Homo Sapiens
  misc_feature (934)..(934): n is a, c, g, or t
  misc_feature (1013)..(1013): n is a, c, g, or t
  misc_feature (1024)..(1024): n is a, c, g, or t
  misc_feature (1056)..(1056): n is a, c, g, or t
  misc_feature (1064)..(1064): n is a, c, g, or t
  misc_feature (1067)..(1067): n is a, c, g, or t
  misc_feature (1091)..(1091): n is a, c, g, or t
agcgggcaaaacctggccagcagcccgagtgagtaggagccatgtgactctggtgagttggagtgtgcaattgcctcctgcttcagagctacctgatccgaatactaagcagagcgagtgccgggctgagtgtaagacactgaagacactgcagagcaaggtgcttattccagaggcgttacaaaacatggagattaaagaccagggagcccaaatggagccgctgctgcctacgagaaatgatgaagaagcagttgtggatagaggtggaactcgttctattctcaaaacacactttgagaaagaagatttagaaggtcatcgaacactatttattggagtacatgtgcccttgggaggaagaaaaagccatcgacgtcacaggcatcgtggtcataaacacagaaagagagacagagaaagagattcaggattagaggatggaagggagtcaccttcttttgacaccccatcacagagggtacagtttattcttggaaccgaggatgatgacgaggaacacattcctcatgaccttttcacagaactggatgagatttgttggcgtgaaggtgaggacgctgagtggcgagaaacagccaggtggttgaagtttgaagaagatgtggaagatggaggagaaaggtggagcaagccttatgtggctactctttcattgcacagcttgtttgaattgagaagttgtattctgaatggaactgtgttgctggacatgcatgccaacactttagaagaaattgcagatatggttcttgaccaacaagtgagctcaggtcagctgaatgaagatgtacgccatagggtccatgaggcattgatgaaacagcatcatcatcagaatcagaaaaaactcaccaacaggattcccattgttcgttcctttgctgatattggcaagaaacagtcagaaccnaattccatggacaaaaatgcaggtcaggttgtttctcctcagtctgctcagcctgtgttgaaaataaaaatgatgttanagagaaaacanactgttgctttagcaagggctgggaggccacnaaaggggnatnctagtcatgtgggatgaacaaagnatgcaaaaggctccccccaccag

SEQ ID NO: 350091 - DNA, 911 bp, Homo Sapiens
  misc_feature (798)..(798): n is a, c, g, or t
cctcgaagtaacgtcagcacgtcgacgcggggcttttctttagccgggtcccgctaactcggctacggtgtatctgcgtctttggtcaggttgttccttggctaagagggcagtcgtcgcggacccacgcggttagcaaggcttagtgctcgggccggccgccttcacttccctcccggcttttcctcccgacttatccactttaggggcgtctcggagtgccggaggcccccggggaagagcggggtgccggtgtccgctccgggctcggatgggaagtggtgggaggagcgacccgggatgttcagtctgatggccagttgctgcggctggttcaagcggtggcgggagcctgtcagaaaggtgactcttttgatggtgggacttgataatgctggtaaaaccgcaacagcaaagggaatccaaggagaataccctgaagatgtagctcctactgttggattttcaaaaattaaccttagacaaggaaagtttgaagtcaccatctttgacttgggaggtggaataaagaattcggggaatctggaagaattactatgctgaatcctatggggggtaatatttggtgtggattccagtgatgaagagagaatggaagagacaaaagaggctatgtcagaaatgctaagacattcctaggatatcgggaaagcctatattggtgtggcaaataaaccagattacagaaggagctttaggagaaagcggatgtcattgaatgtctatctctgggaaacaattgggtccaggaggcccaggtgcctgtgttcagatagnacccaggtccagcaatacccggcgttgggcaaggaaaattgcgcagtcccttaaaaaaggcctaatgggggcacacgttttggcaagaaattggggccttaatgaaagctcaa

SEQ ID NO: 350092 - DNA, 115 bp, Homo Sapiens
aagtttgagatgcttcctgtgtttttatgttagaattgttgttctccttcttttcttcttcctatacctcatcacgtttgttttaaataaactgtcctttggaccacaaaccctt

SEQ ID NO: 350093 - DNA, 1277 bp, Homo Sapiens
  misc_feature (169)..(181): n is a, c, g, or t
  misc_feature (225)..(283): n is a, c, g, or t
  misc_feature (472)..(491): n is a, c, g, or t
gaagacccctggttaattcccccaagcccctttttgggaaaggttcggggggccagggccaaaattccccttgagaggtccggggagggtccaaaggccccaggccttgggccaaccatgggtgaaacccccccatgttctttttaaaaaataccaaaaccttaagctnnnnnnnnnnnnncccccatgcttttggtaatccccagttacttacccctgaaatcnnnnnnnnnnnnnnnnnnnnnnnnnnnnnnnnnnnnnnnnnnnnnnnnnnnnnnnnnnntcaaacaaccaaaaaaacaattgtgggaaggttcctaggtttactgcactccagtttaatgcttgtatagtactcacacttatatctcaggacttttcaaagggcggacccacccgttttctgccacatgcagtcagccccaaggcctcatcggtacccaaaggcctgtggacaataactgcctcagcnnnnnnnnnnnnnnnnnnnnccttgaagcatctgacagaggaaacgtactccagagccaccgtgagctgcccctgttcctgaccaccaagcccagcctggacagcctgctttcccgccctggcctgaggctggctcagtcctggatctctccccagtcctgctttcccactggtgcctctaagaccccagtgtggagtctgcacctcatgctcctgaacacgaacagatattggtcctcaaacacagaaacacactcttagcttggtttctgctctattttggtatttctacttttgaactttgttcagtgttcctttctaaaacctaaccactggatccaacccagggttgtagagtgtccattctgagtctgctatttccccaagtgtcccctcagcaggcagcaggctctgctttatcctggtgggggatgggtgcgccatcttctccagctacaagacagcagagtgggtctcctggaggttctcctccagcttcagccccaggttgtcaatcccaatgctggtgactggaggcacgcctgctttccagccggctcggccgtgcgagtaggggtggagcagtacaggataaaccccaccatgatgacagtgaaggacaggatgtagagtcctgaaaacttatagccaaacagaaagagtccaacaaaaaggctgtagaggtccgctgtcaggatgcccaggttgacggaagtggcactagtgactttaatcaccaatggcatgaagctgtacaggcaaaacatacacaggcaaatgccacgaaacagcagggctgtggaaaa

SEQ ID NO: 350094 - DNA, 1230 bp, Homo Sapiens
  misc_feature (187)..(187): n is a, c, g, or t
  misc_feature (189)..(194): n is a, c, g, or t
tagggacccggtgaggggtgaattcccaaaggtttatgtgttccctggggtgtgaccccccccgttaaagggttaattgtttttttgtaaagggagccccttttcggattggcccgcccccttaggatggggaatccacccacttttcaggaaaattatacatgtgcatcttttggaggaaagtagntnnnnnntcataattggcagatgtgttagcatgctgttcttccttcattggaatatttgtaatagtagttgaagccaagtcaaaatgttgctgtactaaaatattcaatttggtagcaagatgccgtcctgcacgaacactatgaacttcactggttaaaaccggggacaactcttttttagaacgatcagatacaaggctgtcttcaccaactgggtaggtgtggatcaagaccaactcacatttttgaatctgcatgagatgatctgaatttgcagcaagcttgttatgttcaggaatcgtttcctggacacagtcttcaagcattcgcacatgactatcactttttgcattagtaatacagattattcgtcctctatttccaacacgttctgcattctccatgagtagagtacgagcctcatgttggtattcagtaattttgcggagagtttccactgctgcaacaaggccatgcagaatactgcagcactctggatctgcccgaggattaggaggcccaacagcggctaatgctgccattagctcctgtaaattttggtcttcttgagtccaagaatttaaaaaatgtgctccagagtcactcacaataaaattcaccagctttttgaaaggaaatatatcatacattattctacaatattccatggaagattctactgagcaagtccacaatgatttagatatgggggccaaaggaatgattccttgggttctattcttcaccagcatatcaaactcgacatgctgcctgcaagattctgccatataagggcagtgatccacaacaaacactgttttatgagattcagaaaaaatcttcattttgttttaactttcgtgcctggtcctgcagtgaaaacgaacagaggctatggaccacagcctctctggaaaaggctgctggctgggcggggagagtcagcgcacagtcgggagtgtctggtgccacagacaggggactatgctttccccgatcatctcctagcacaccggtccttcccaggcttcctaagagcccc

SEQ ID NO: 350095 - DNA, 880 bp, Homo Sapiens
  misc_feature (155)..(155): n is a, c, g, or t
  misc_feature (786)..(802): n is a, c, g, or t
gtcttaaaggattctgaagtataaacttaaacacaaattcaggttgctattaatagttctaaaggtgcatcttagaatctctttgagagaataagcaagaattgtccattgtgttacttttacttggataaacagatactttttgtttagtttgntctcgtctaaaaccaacatacaggtattttaatgttttgttttgtttggtcttatccaggaattctatattttctctcctcaaccccagcaagaaaaataaaagtgggcttgaggagggagagctgagtgtggaaagaaaagtaaagcttttcaagaaaaaacacaacaatacaaaacaaaaattgcagtcccaatcgtgcaaaatttgcttctctggataaagcacttcttgacaggttccccaatgtccccatccccctcccaagtcctcccagccacatggtggggggaagaatacagaatgaaagtgaagccattctttttcttaaggctatacagacacacacagaacacatgtcaaggactgtccagcaggtggttctttgctgggctcctacttcaagccctgactgcaacctgcagcccatcctggagtcaggagctctccttccgttgggacgacaatacaacatacaaacaaaagaggtccatggtcccaacaataaaatccgatattgactttacaatcacaggtacaaattgctcaaatcgataatttcatttctccttaagaccttgtcatctaaaactaattagaggccaggttcccgaggaattgtcagtattccnnnnnnnnnnnnnnnnngtactggaggtttcaaaggaaatcattcttctactgcaacagtctgacggaggttggaaacaaggtgtccaattccag

SEQ ID NO: 350096 - DNA, 1433 bp, Homo Sapiens
ggggagaatttccagcaggcaaggcagtggccgctttgactgcttgcttcggagatccgagacgacggagaaggcactcttatttaccgaccaagaaagctcctcccccgtcctccgttagctaattaaaacatttttcagggacgtagccatccagagggatttgcttcctaaggagaagaacttggaaactctgttgaccttggcttttctagaaatagataaagccttttcgagtcatgcccgcctgtctgctgatgcaactcttctgacctctgggactactgcaacagtagccctattgcgagatggtattgaactggttgtagccagtgttggggacagccgggctattttgtgtagaaaaggaaaacccatgaagctgaccattgaccatactccagaaagaaaagatgaaaaagaaaggatcaagaaatgtggtggttttgtagcttggaatagtttggggcagcctcacgtaaatggcaggcttgcaatgacaagaagtattggagatttggaccttaagaccagtggtgtcatagcagaacctgaaactaagaggattaagttacatcatgctgatgacagcttcctggtcctcaccacagatggaattaacttcatggtgaatagtcaagagatttgtgactttgtcaatcagtgccatgatcccaacgaagcagcccatgcggtgactgaacaggcaatacagtacggtactgaggataacagtactgcagtagtagtgccttttggtgcctggggaaaatataagaactctgaaatcaacttctcattcagcagaagctttgcctccagtggacgatgggcctgattaccagctgggacttagagtttctgtgcaacagtttttcactgagcatgtcaagaaactgataagatcaaaaaggtctcctaactcactagatcagcgcacaagtcagtgtaaaccatcttagatagaagttttttcataaatgctcatcatatttatgttccgctgtacatgttcagtataaatatatgtgtagtgaagctactgtgagtctttaaatggaaagagcaaatgagaagtggtttggatacacttgatgagagatgagagtgtcacattaataatttttaagactcttaggcagctatgggtttcttttgatcatttttgttctttattcatttgaacacgtttttgaagttcttcaaaactagtcagtttgaattttgacagctattcaatatgtgatctccaagtttaaaaaaatttttttccagacttccctaatcctaaaatgcgagtttttatttttaataactgtaccaaggaataagtatgaaaacagttctctgttaccatattttgtattctggaccacttactggtgaaagcaaccatgcaaaagaaattaatttggccaggcacagtggctcat

SEQ ID NO: 350097 - DNA, 902 bp, Homo Sapiens
  misc_feature (320)..(320): n is a, c, g, or t
  misc_feature (826)..(862): n is a, c, g, or t
gtagtcccagaggtcagaagagttgcatcagcaggacaggcgggcatgactcgaaaaggctttatctatgttctagaaaagccaaggtcaacagagtttccaagttcttctccttaggaagaaaacccaaaatacatttccccatgtgggtatgaaaaaaatcaactgctgaaggtccaccgtgtccataatacactgaaaagtacaggacctcatctgtaagctgagcaaagtcaaaccgatcttcattctctttccgtttgccaatctgtgaggcgaaccccacattttccaagctgattttgggaattggcttgccnatacgttaatgctgggtggcagcagaattggctcatcaatgcggttatcccagatcccaaaattgtcccaggtagctggactcccactaccatctgggtcaaaccgagaacacctaggctctgaagtggagctgtggcacgtgggtgtcacccgcctgtcgtcctgcagcaggcgggagcttagcagcactctccttctcacctggttcccaccacttctgaccaaagtaattaaggcagctgttgacataactcagctccaaaggactcagtgatgagggaaaggtcaatggaacaataatggaatgtctctggatggctacgtccctgaaaaatgttttaattagctaacggaggacgggggaggagcttgcttggtcggtaaataagagtgccttctccgtcgtctcggatctccgaagcaagcagtcaaagcggccactgccttgcctgctggaaatcctcccgctctcgacgaattcgagctcggccgatttggcctgatnnnnnnnnnnnnnnnnnnnnnnnnnnnnnnnnnnnnncgccgccccgcgtgagcccggtcccgcatatacgtaggtt

SEQ ID NO: 350098 - DNA, 1411 bp, Homo Sapiens
  misc_feature (555)..(555): n is a, c, g, or t
  misc_feature (606)..(606): n is a, c, g, or t
  misc_feature (642)..(642): n is a, c, g, or t
  misc_feature (651)..(651): n is a, c, g, or t
  misc_feature (892)..(902): n is a, c, g, or t
  misc_feature (1180)..(1195): n is a, c, g, or t
ggaacagaaggtgctggaggacctgttaaacaatctctggctattaaaaaacatcaagatgagaattaaaggcatatcctgatatacttgcctgcttgcacatgaggctgggagatcccatgcctgttgaagttaactctagccctgacctctattgatcttttgggaatgagggctgatttgaaggtgctgttgcaggatttcatttagctgctgccagttcaagtgacctgtccccagggctgcagctgtatccacctgattgcagtaggtgagggctaacagcagaatttaaagtggaccctgggctgtggagcaaagtgactatccatttggacttttggataatgtggcaggagtcccagctgtttaatttctagtcacattttccagaaagttgttctaagttgagattactgacaagatttctcaagggcaggaccagatatgtgagagacttctagttcagagctgacccctctaagcctctgacacttaaacacgagtcctgctgtccccagcacacaactgcactgaaccctggtccctctccgnctggtgtagagctccatccggccatgttgtgtgccagatacccagtagccntccctgcttgaaataggccctctcctaggctaggcnaggtgttcnagaggcatgaaggtttgggcaggggaagggcgtcttctgaaaatgggagttacccaggtttttaaatgctgctattgttttatttaccatttaaaggtcttttccatttatatctgagtaactagtcagtttttcttacagtgctcatagcagttgtatttgaattgtattttcagtgaaatttgttttacattgccatttaaaattggcctttaacagcttcccaactggcttataagannnnnnnnnnnaatgaaaacataacccatgaggctcagatgctgttgaagaaataaatggtatgttgctgctgacagtagtgcttgcctattgtaacagcattggttctgctgtagcctcggtgaccatttaagttgaataaatctgtcattttcacccacaaacagttgttgagcccctggatttgggttgtcactgtggttctcctgccagtgctataatccagtgtcgtaggtgcagggtatgaatcagctcagcctcttaggagagaggggctctcagcgaggannnnnnnnnnnnnnnntcactatttatcttccagaggcagggttcatggattcctgatgtttagaggcggaagggaccttaggtcacctacttccacggttttcatactgttctctggggcctcgtggagagggagcctccaggcccattcaaagctttattagatttaaaagtaagatctggtatgaagaaaggttttgtttgtttcttaaaataaaaagtctgaaaatca

SEQ ID NO: 350099 - DNA, 349 bp, Homo Sapiens
atggagcaggaaagattgcatccttcttagcaacaatttggactacttcattgcttcactgagctatggacctaaggcagcgagtggatacattagtcctctttcagctgaatgcatgctacagtataagaaaaaagctgctgcctatatgaagtctttgagaaagcccctcttggactctgtgccttatgaagaagcactggcaaaccgccgcatccttctcagctctactgaaagtcgagaaggccttgcacagcaagttcaacagagtttggaaaagatttctaaactggagcaggaaaaagaacattggatgttggaagcacaattagccaaaatcaagctagag

SEQ ID NO: 350100 - DNA, 1011 bp, Homo Sapiens
  misc_feature (200)..(255): n is a, c, g, or t
ggattcaaatttgtggtgttcaaggttcaactgtaatttcctagcagcattttgtgtgtttgagaatctcttgacactcttcaagtaaatccctaaattacaactttgacatcaaaaaagctagacattcctacatttttgcactacaatacataaaaactcccatgctgatcggttgtgggatcgtgcctgtgaataannnnnnnnnnnnnnnnnnnnnnnnnnnnnnnnnnnnnnnnnnnnnnnnnnnnnnnntacattctgaagaaagttctacttatgaatacattttatttataacaaactggtgaaaattttagaccaaaccatgtctttctgggttgtagtgattaaaaaatggttaagagaatgttccctatacaaggcatatgttattaaacatgaaatttaggattagttttctctttgaaaattcttttgatatgctgaggttacagtttggaggttacattagagaaagaatatagggaagatggcagtggtaaaacatttccctgctttacatttttatattggcagtatcttggtttcaacttttccattttcagcaagatatttgcaagtttttactttgaagatgtttggtttatagtagtcccatgctatactaatgctgttgctgagataattaagttagatactaatatgaaaaagaatatttgtgtaaaatattttgaagttgtaattagtgtatatacaagttgttaatacttacgaaaaaaggaagcattcccacctgtaataattttgttaacactagactatcagtaaattatcaagaataaaaaccttggtttttctgtaatatttgccactgagcaatttttattaaaaaccaaacagaagtatttacacaagaacaagtgaaattacacaaaatgataatggggagaaatttctcatctggtgataaagggaaaaagataatgtaaaagcagattgctgctatttgcataataagcacttgttgaagaataaatgattaagttc

SEQ ID NO: 350101 - DNA, 1588 bp, Homo Sapiens
  misc_feature (805)..(805): n is a, c, g, or t
  misc_feature (1311)..(1366): n is a, c, g, or t
atcaggccaaatcggccgagctcgaattcgtcgagagcggggctctgctggccggtctaaagcggcagccgccggggcgcaatgcgagcggctggcgtaggcttggtggactgtcactgccacctctccgccccggactttgaccgcgatttggatgatgtgttggagaaagccaagaaggccaatgttgtggcccttgtggcagttgccgaacattcaggagaatttgaaaagattatgcaactttcagaaaggtataatgggtttgtcctgccatgcttgggtgttcatccagttcaaggacttccaccagaagaccaaagaagtgtcacactaaaggatttggatgtagctttgcccattattgagaattataaggatcggttgttggcaattggagaggttggactagatttctcccccagatttgctggcactggtgaacagaaggaagagcaaagacaagtcctaatcagacagatccagttagccaaaagactaaatttgcctgtaaatgtgcactcacgctctgctggaagacctaccatcaaccttttacaagagcaaggtgctgagaaggtactgctgcatgcatttgatggtcggccatctgtagccatggaaggagtaagagctgggtacttcttctcaattcccccttctatcataagaagtggacagcagaaacttgtgaaacaattgcctttaacttctatatgcttagaaacagattcacctgcactaggaccagaaaaacaggtacggaatgagccctggaacatttctattttcagcagaatatatntgccaaggtgaaagggatctcagtggaagaagttatagaagtgacgacacagaatgcattaaaactgtttcctaagctccgacacttgctccagaaatagcttcaaaaccatccattacaaaatcgaatcaactgcagggggcagcatttgaaaaatagaaatgttctgatgaagaatctgaactgaagaagctgttttatagggttatagaagattgtaattgtagagaagtatttctcttagaaataaaactgggcttggatcctgaaaccctgggttctgattctagccttgtgctgcttttcaattagccgagttctggcaggatatcgggaaaatactgctacttcttacattgcccttttatatagaaccaccacctgaactgaaaccatcgctactgggaacgggtggctcccacaggaagagtataagcactactgtgatgacggatggagtaagctaaagtatacttttgattcggagggagttaccctgttgttgnnnnnnnnnnnnnnnnnnnnnnnnnnnnnnnnnnnnnnnnnnnnnnnnnnnnnnnngttctagcgagttctctccctaagctcacaagtaggtgggaataacgggccatgtgcgccacactgctcaaactaattggggacttcaggtagagaaaggggttctcgaaggtggcaagcatggaatccaaagcccgacccagggtaactgccgccatggccccaaaggacggataacaggctagacacgggcccactaagggggtaaccaccaatccccat

SEQ ID NO: 350102 - DNA, 521 bp, Homo Sapiens
cattgcactagatggtttgaatactgcataagtcagtatattaacacttgaggaataatgaatggcctggtccgttttatgatcaggctcattcacaacagtttccactcctccaagctcagcaaactccctacaggtaattactttccctggcagttttacacaggatcactgcaaatggggtaaaatgtccatgaagctgatgaccacaatgccatcacaaaagctgatatcgatataaccctactatttacaatacctaataagagccaaagctagaaaatcactcactgctaaatcatggaaaaaattatagtttgtaggaaattttgaatatctataaaatattcaatagactacaaaagagcttgcaacagcttgttctcattatttttcttaggtcagaattagaaaaaagtaaatcctattttttaataagttttgatggcatcaaaaagcttcacatttataaataagatttttatacaaagcaacatgttactgacatagttttctcttgc

SEQ ID NO: 350103 - DNA, 1036 bp, Homo Sapiens
cggtctgagggcgaggagacatccgagtcaatgaccctgggtgctccgaggctcttcttagcagccgcgcagcagccgcggcgacgtcactgtcctctcggcctggcacacagcgctccggccgccgaatgcccgtggacgcgcatctcttcccagagttcctgcttcctgggccagaccaaagccgcgaggagaacgcctcagggatcttgacctgctgtgagtgccttgaagaggtgagcagcgggcacgatcaaagagacacctaggctcaaggaccaatcaaggagtatggctgcccctcccaaaagctacccaaccgtgtcaggaacccgaccaccaagagcaggagccctacactgggaaggagaaccaacatgcagcagaccacgaaaaacccacatctgacaacaggagcccccgaggacaggaggaggcatcccaagggggagcatccagacatggcctatagggcccagagggccacatgacccaatagcccagcctgcacacatgatacaccccaggctagaccataggcagaccaagcaaacacgtagcgcaacatacacataacataggcggcatccgccaaacaaacggagcccactagcaccgctgggcccaagcattcattgcgtcgagacaccctggatgcgcatccaaggaccctagctgcccgacccagatgaacgccacttaactacctcgcagcccgacacagagctccctgcggcccacagctcccggcgcgcccacccagcaaaccccctaggagaatggagccaggcacccgaccacgcaggccaggcgagccagcaacgccgcacaaggcgcgatgacgatgcgacggcagcggagacgaaagcaacgccatgacccacgaaaccacgaggcgggaacgaccatgaggcgacacacgagccggcaatagggcgccaagcagggaggccagccaccccgcaagcgcccaacaaaggcgagcggtgcccacagtacgcccaaccacacgacccccacccggataccacaagcc

SEQ ID NO: 350104 - DNA, 963 bp, Homo Sapiens
agcgggtcactgtcctctcggcctggcacacagcgctccggccgccgaatgcccgtggacgcgcatctcttcccagagttcctgcttcctgggccagccaaagccgcaggtgagaacgtccgcggtagaggtgacacccagggcctgcgggtctcagaggcccggtggccagctcctctcctccttgcccaagaaacccccacgggggcgcctgcagctggggacaccaagtgctccccggagccctgggagcacttcttctgaggcatggagcccctgctcaggtgcttctgaaagttcctttgtggaccccagaaacccctaggcaaacttggttcctggccccccggttctccagattgaccacccatgatgacaggtggtcacacagtatatcatgtactcttacagactacaaggatataacaccaacgagacaaacacaccaccgaactccgacgcacagaaacatgagcatcgacgagtactcacgcggctcggcatatcaaagccacatatactcactaacctcacgtcacaccacacatatcataccgcacctcaaaaccccactatccaacctctccccccaagtcacaaacacagcccgccacacccacttctatataacaaaacaacgtcttccctacctcagcgaccccagaccccaccaaacacttctccccaccacatacagccaaacctatcaaccgccctcataagaaaacagcggagtgacagtgcgacacaacgttacgaaacagatggcgcgaaccacagagaatcgcacatcgaggtcgccgcagcgcataagagtatacgacccacagaaacaaccaccaccagatgccatagcgaccccctacacagagaccatgctaagcaaggccgcgcggagagcccccgatcgagccccaccttggatgtgggggagcgacccgactgtagcgatcaacgactcca

SEQ ID NO: 350105 - DNA, 2039 bp, Homo Sapiens
  misc_feature (1536)..(1556): n is a, c, g, or t
  misc_feature (1968)..(1998): n is a, c, g, or t
tgatcaacttaattcctctcacgtcctcgtgctgatgctcacaggccgtttctctcaccggatctatgtggcctactgtactgtttactgcctgggcactatactttctatgcagatctcctttgtgggtttccagcctgtcctttcatcagagcacatggcagcctttggggtctttggtctctgccagatccatgcctttgtggattacctgcgcagcaagttgaatccacaacaatttgaagttcttttccggagcgtcatctctctggtaggctttgtccttctcaccgtgggagctctcctcatgctgacaggaaaaatatctccctggacggggcgtttctactcactgctggatccctcttatgctaagaacaacatccccatcattgcttctgtgtctgagcatcagcccacaacctggtcctcatactattttgacctgcagctcctcgtcttcatgtttccagttggcctctattactgctttagcaacctgtctgatgcccggatttttatcatcatgtatggtgtgaccagcatgtacttttcagctgtaatggtgcgtctaatgctagtgttggcacctgttatgtgcattctctctggcattggagtctcccaggtgctgtccacatacatgaagaatctggacataagtcgtccagacaagaagagcaagaagcaacaggattccacctaccctattaagaatgaagtggcaagtgggatgatactgggtcatggctttctttctcatcacctacacctttcattcaacctgggtgaccagtgaggcctactcttctccgtccattgtactatctgcccgtggtggggatggcagtaggatcatatttgatgacttccgagaagcatattattggcttcgtcataatactccagaggatgcgaaggtcatgtcctggtgggattatggctatcagattacagctatggcaaaccgaacaattttagtggacaataacacatggaataatacccatatttctcgagtagggcaggcaatggcgtccacagaggaaaaagcctatgagatcatgagggagctcgatgtcagctatgtgctggtcatttttggaggcctcactgggtattcctctgatgatatcaacaagtttctttggatggtccggattggagggagcacagatacaggcaaacatatcaaggagaatgactattatactccaactggggagttccgtgtggaccgtgaaggttctccagtgctgctcaactgcctcatgtacaagatgtgttactatcgctttggacaggtttacacagaagccaagcgtcctccaggctttgaccgtgtccgaaatgctgagattgggaataaagactttgagcttgatgtcctggaggaagcatataccacagaacattggctggtcaggatatacaaggtaaaggacctggataatcgaggcttgtcaaggacataaatgtcacgtccagctctgatatgcttcgcactgagcacatcacatttaggacgttgaagannnnnnnnnnnnnnnnnnnnnaaatatgcagtttgtaagaacaaaactggatggcatcagaattgtctggaagttttgtcttgggcagtatgggctgggccaaatgaaatgatttttataattctaaacaggttaccaaatgaaatgtcatggctttactttggtcaattaaaggggggaatttttttaaaaaatgtgccttatttgttttgacttataactgatttgagggaggcaaaagctatgctaggctgccagaaagacataagcaaacctttggccattctcctagctccctaaattagccaaatagagacttctttctcaaatcaggaaaactatcaaagaccaattcagatcctacatttacagacagttttgtcataaccctttgcattgcagcacctagtacaattccttggaaacagcgtgnnnnnnnnnnnnnnnnnnnnnnnnnnnnnnntgggaccagaagagtgctagaagagtgcctttctgggctac

SEQ ID NO: 350106 - DNA, 1100 bp, Homo Sapiens
acgggagaatttttttccttcccccctaaggaggagttcccccggtggaaaggcccaaaccctacccagaggaaagccgcctcccgaaaaaaaacttccaaattgtgggggattcaactttgtggcgcaggtaatcccccaaaggacaggatttggcacgagcaccaagggccccaaaggctgcccatgtcttcggagaaaagaccaggctggaaacccacaaaaggagatctgcatagaaagtataggtgcccaggcagtaaaccagtacagtagggccacatagatcccggtgagagaaacggcctgtgagcatcagcacgaggacgtggagaggaaattaagttgatcaggaacacataacctccccatgacgagaccatgtagaaataagcaagggcacacttagctgcccaacagatggaaccagtctttactgccttgatccacatgtagtaggtgagtagcatgcaaaagatggcaatcccttcattatcataggagccagccacagatcgggagatatatccaggaactacagcaatcatggcagcagcaagaagcccagcccctgcatccttgagctctttggtaaggtggtacgtgacgatggtggtgaaggaggagaagagaggggccaggaacacacagacattccgaatgtcgatggtgatgtggaaaaaatggagtacatggtagattgcagcagaggtgatcattaaacctgggtaaattgttcctccaatgattcgtcccaaagggtaccaggctcggtcatcaaaccagttatggaatttataaaacccctcctcagccaggaacctggtagtccgataattaaagtacggatcaaactcatggataacactttcaaatctcaggacagcaaacagacgagtggagaaggataatacagcagccattgacagaatgagaagcttcaaaagtgtgtcctgcttctcataggacaatcgcaaaaatccaaacttagtcatcttgacatgaatgggtggcaacacacgacgatcagctggccggctttcctaaacgatccgcggggctccctcagccatccgttcagcggcgcacccaaccctccc

SEQ ID NO: 350107 - DNA, 855 bp, Homo Sapiens
  misc_feature (160)..(176): n is a, c, g, or t
atcttgtttgaagcaatgtctgttcaaatcttttctcaatttttcagttgggttatttgtctttttattgttgaattgtatcagttctttacatattctagacacatgtcccttatcagatatatgatttgcaaatattttctcccggtgtgtgagttgnnnnnnnnnnnnnnnnncactcacattatgtatgttgatgttatgatttgaagcacaaaagtttcattttggttaagtctaatttcttttgttgaactactgattgttttttaagaaataaatgccctgtacatcaagctgtatacagagtgtactctgaaataggtcaaattaaaagaagtcctgattatggagattttcagtgagctgttaggtcaactcgtgattaatactctaggaatgaacctttttgggcttcaaatctgttcttttctctccagtggctgctaagctctactttccacaactactataaatgtgaagctattgagtttcaaggcttccatggaactggggagaggtgtataggattagagcaagttaaaacactataggctttccgttcttactgagattcagctgtttttcttaggtaaacattccttggaatgtggcaagcttttgttaatttccacaattctaataagtttatgtcaacagcttttgctaatgtcctcattgcttttatggaggagcagattttcggtgtgacattactgtaccatttggaatgtctactgatatacacgataacttggataaatctcaagagaattatgctgagtgaaaacatgatctcaaaagattaaatacagtatgattccatttatataacttttttttctttgagatagg

SEQ ID NO: 350108 - DNA, 238 bp, Homo Sapiens
tgtaaaggggtctgtcctagagcccacatcagtttgttgtgaatctggaaaaagggtcggtgagggccgggagatgttgaccctggtgggagcaggctgaggctgccccgttctccacatcctctgttttgcccagtctctgattccattagagggagtggcttagaggtgtctgcctatgcttaaagccaactgtggaagttttgttttcccttttttgtataataaagtgaaaacc

SEQ ID NO: 350109 - DNA, 1497 bp, Homo Sapiens
  misc_feature (58)..(106): n is a, c, g, or t
cctgggtggcgaattcggcacgaggtatgtgtgttcctgtactagcatgggtgcagcnnnnnnnnnnnnnnnnnnnnnnnnnnnnnnnnnnnnnnnnnnnnnnnnnaaaggggtctgtcctagagcccacatcagtttgttgtgaatctggaaaaagggtcggtgagggccgggagatgttgaccctggtgggagcaggctgaggctgccccgttctccacatcctctgttttgcccagtctctgattccattagggggagtgtgctgaagccattctcggatgcttcccagaccaggctccctctgccaagagtcacatgcatccgagctgctggtctccattgtccagcaggaaggcggaaaggcaggcaagatggtgtgaagcttaaagcttgtatttgatggaaaaggtctcccctgttcatctgagaggccaagcctggccaccccaggctcagaacctgggcttcaagaaatgtgctgggagctcctaacttacacatccctccagccttccttgaatcctcccaccaccccctatttcctttaatttctcaggtctgctccctcctcccccaaccccacagctgggcaagaagtctgcaaaagctgcatctgcagctgtctctaactcttcccagccatctcccgtattttttggtaccttgattccttgactcttaataagccaagccaccttatctctgtagttcttatttttttgttgactaaatttgggggggtcttttttatggtcatgtcactgacctattaaattggggcttggtgctttttcaccttccccctctgaatgaaagccaagaaatgggggaagagcgggaactctgccgcgggaggtggagcaaagaacggtgaagggccctggtcccagagaggctggtgggtccctctcccaaaggaaggcagacagtctctgctttgccttggaccttggtgctgggggtggggaggcctgggggggacactccccactcccattccccttcctttgtcctaatcctggaattaagtacaggggtttataggttctatttcttcccaagagccctgcaaagaaccccagtttcctatttggatgcccctacactgttgtgtttccagtggaatgtattttcatttaaaaacaactttgaatggggcactttttctttcctgttttaaaaattgaaaaattcttacagtacaaacaggactgtcagggtgggggtgttggtgctgtaagaggtcactcttgagtgcattttggcactgggatgggatggctggggtgggaagacccccatccccacccccaacttcttttctaatatttaaggagtgttttgtaggattcaacaaccaccacaacttgaatttgtatcatgggaggtgggagggagtggcttagaggtgtctgcctatgcttaaagccaactgtggaagttttgttttcccttttttgtataataaagtgaaaaacaaaggtttgaaaaaaa

SEQ ID NO: 350110 - DNA, 397 bp, Homo Sapiens
  misc_feature (79)..(79): n is a, c, g, or t
  misc_feature (165)..(165): n is a, c, g, or t
cctatgggaagcccccccctacacgttgtgtttccagtggaaatgtaatttccatttaaaaaaacaacttgaaaggggncaccttttccttcccgttttaaaaaattgaaaaaatcctacagtacaaacaggactgtcagggtgggggtgttggtgcctgtaaanaggtcactcttgaagtgcattttggcactgggatgggagggctggggtgggaagacccccatccccacccccaacttcttttctaatatttaaggagtgttttgtaggattcaacaaccaccacaacttgaatttgtatcatgggaggtgggagggagtggcttagaggtgtctgcctatgcttaaagccaactgtggaagttttgttttcccttttttgtataataaagtg

SEQ ID NO: 350111 - DNA, 1000 bp, Homo Sapiens
  misc_feature (20)..(20): n is a, c, g, or t
  misc_feature (24)..(24): n is a, c, g, or t
  misc_feature (27)..(28): n is a, c, g, or t
  misc_feature (32)..(32): n is a, c, g, or t
  misc_feature (34)..(34): n is a, c, g, or t
  misc_feature (38)..(39): n is a, c, g, or t
  misc_feature (42)..(42): n is a, c, g, or t
  misc_feature (50)..(52): n is a, c, g, or t
  misc_feature (55)..(55): n is a, c, g, or t
  misc_feature (68)..(68): n is a, c, g, or t
  misc_feature (71)..(71): n is a, c, g, or t
  misc_feature (73)..(73): n is a, c, g, or t
  misc_feature (77)..(77): n is a, c, g, or t
  misc_feature (81)..(81): n is a, c, g, or t
  misc_feature (88)..(88): n is a, c, g, or t
  misc_feature (107)..(108): n is a, c, g, or t
  misc_feature (110)..(110): n is a, c, g, or t
  misc_feature (113)..(113): n is a, c, g, or t
  misc_feature (116)..(116): n is a, c, g, or t
  misc_feature (123)..(123): n is a, c, g, or t
  misc_feature (148)..(148): n is a, c, g, or t
  misc_feature (158)..(158): n is a, c, g, or t
  misc_feature (160)..(160): n is a, c, g, or t
  misc_feature (163)..(164): n is a, c, g, or t
  misc_feature (169)..(169): n is a, c, g, or t
  misc_feature (171)..(171): n is a, c, g, or t
  misc_feature (173)..(173): n is a, c, g, or t
  misc_feature (176)..(176): n is a, c, g, or t
  misc_feature (181)..(181): n is a, c, g, or t
  misc_feature (236)..(236): n is a, c, g, or t
  misc_feature (255)..(255): n is a, c, g, or t
aagggcaagttactaatttnaaantannttcntngccnnaanggcccccnnngtnatccaccagttgnacnantggnggtntgtgccnccacagccaggcatcccanncnaanaangaatganacccccaatgccacctcatggtcantatggtggtnancannaaagnangncangatancttcctggtgctatgcccccgtatgggcagggaacgccaatgggtgcccccttancaagggtgggcctcctcgnacctccgatgggaatgagacctcctgtaatgtcgcaaggtggccgttactgatcttacttcatccagtctaataggtttggagattaaaccttttctcaacttgtgctgtttatatagccaagcttccgtcaataaggcttcattgtgactttaacaaacattatcttcccacataccaggaactattggacatttattttacatgggaaaaattatttggaataataaagcaggaacttttcctgaagttgcaatttatactgtatggcttctttttcatgtttcatctaggtttttagaagtgaagtatagtaaatttggttcgttaaattgtgaaggcgctggaattacatgaacataccaccctagtaaaggcaagttctgtaagcttacattgctatttgtaaagtttgccttcacagcatttcagatgctgttggacttcatgtccccaacctagcttggtgagggctgtaactgtttccaagtacttgtacattggaagtctgaatgtgtaacaatatttaatgtatttagagttcctcatgttgcagggtttaagaaatctgacccaccaaggtcatgtgacttttctgtactgttaaacttcattgtaataaaatgagagaaaaatttatgcctttttattcataacccagctgtggaccactgcctgaaaggtttgtacagatgcatgccacagtagatgtccacataataaaattcatagttaccaatgcagtt

SEQ ID NO: 350112 - DNA, 1247 bp, Homo Sapiens
  misc_feature (671)..(680): n is a, c, g, or t
cctaaggtagcgaggcctgggtggcgaattcggcacgaggtccagaccgagatgaagatctcatgcggcagactgaaggacgggtgcctgttttcagccatgaggtagtccctgaccatctgagaaccaagcctgaccctgaagtggaagaacaggagaagcaactgacgacagatgctgcccgcattggtgcagatgcagcccagaagcagatccagagcttgaataaaatgtgttcaaaccttctggagaaaatcagcaaagaggagcgagaatcagagagtggaggtctccggccgaacaagcagacctttaaccctacagacactaatgccttggtggcagctgttgcctttgggaaaggactatctaattggagaccttcaggcagcagtggtcctggccaggcaggccagccaggagctgggacgatccttgcaggaacctcaggattacagcaggtgcagatggcaggagctccaagccagcagcagccaatgctcagtggggtacaaatggctcaggcaggtcaaccagggaaaatgccaagtggaataaaaaccaacatcaagtcggcttccatgcatccctaccagcggccctcctgcctgggtttcattctggctatccctctaaggcgcaaggtgaagaagcttctgggccaggaaggnnnnnnnnnntgcccacctgcagctctggtgaagcttgggcctgctctcctttccatcctctaaggagccaacttggcttttacctgtcaaatagtcataaagtcccctatcctttaccccaccttatacacacgaggctttctcaggaagtggctctgccaggcaggactatgtgggaaagggtttttccttagcacacgaaaaagccccttcccctggattcatgtttcttattttggagggagaagggaattgcacttcacactgccatcagggtttagttgacctcataatggtgcccactttctcgactttggccaggatttccttcaaagaaaacgactttccttcatttccctaagcctgtggcccaaatggtggaccagaatgatggtgggagggggcaacccccagtagctttgcctgcttttataaagttgaacaaattgaatttagacattcaggctaacctgcctttcttagtactcctttgttggcatgggcaggggttgagtcagcagaagtggaccaaaggattcctctgaataaagttatttaaattgatgttcactgaaa

SEQ ID NO: 350113 - DNA, 1877 bp, Homo Sapiens
atcaggccaaatcggccgagctcgaattcgtcgagagcgggtggaacgaggccgtcggccattttgtgtctgcttcctgtgggacgtggtggtagccgttgggttgggaaagtgagggatttttggcctcgtttctcctgcttcttttctcctcccttttactttgccggtagaacacagttatgggtcgcaagaagaagaagcagctgaagccgtggtgctggtattgtaatagagattttgatgatgagaagatccttattcagcaccaaaaagcaaagcattttaaatgccatatatgtcacaagaaattgtatacaggacctggcttagctattcattgcatgcaggtacataaagaaacaatagatgccgtaccaaatgcaatacctggaagaacagacatagagttggaaatatatggtatggaaggtattccagaaaaagacatggatgaaagacgacgacttcttgaacagaaaacacaagaaagtcaaaaaaagaagcaacaagatgattctgatgaatatgatgatgacgactctgcagcctcaacttcatttcagccacagcctgttcaacctcagcaaggttatattcctccaatggcacagccaggactgccaccagtaccaggagcaccaggaatgcctccaggcatacctccattaatgccaggtgttcctcctctgatgccaggaatgccaccagttatgccaggcatgccacctggattgcatcatcagagaaaatacacccagtcattttgcggtgaaaacataatgatgccaatgggtggaatgatgccacctggaccaggaataccacctctgatgcctggaatgccaccaggtatgcccccacctgttccacgtcctggaattcctccaatgactcaagcacaggctgtttcagcgccaggtattcttaatagaccacctgcaccaacagcaactgtacctgccccacagcctccagttactaagcctcttttccccagtgctggacagatggggacacctgtcacaagctcaagtacagcttcatccaattcagaaagtctgtctgcatcttctaaagctctgtttcctagcacagcacaagctcaggcagctgtccaaggacctgttggtacagatttcaaacccttaaatagtacccctgcaacaactacagaacccccaaagcctacattccctgcttatacacagtctacagcttcaacaactagtacaacaaatagtactgcagctaaaccagcggcttcaataacaagtaagcctgctacacttacaacaactagtgcaaccagtaagttgatccatccagatgaggatatatccctggaagagagaagggcacagttacctaagtatcaacgtaatcttcctcggccaggacaggcccccatcggtaatccaccagttggaccaattggaggtatgatgccaccacagccaggcatcccacagcaacaaggaatgagacccccaatgccacctcatggtcagtatggtggtcatcatcaaggcatgccaggataccttcctggtgctatgcccccgtatgggcagggaccgccaatggtgcccccttaccagggtgggcctcctcgacctccgatgggaatgagacctcctgtaatgtcgcaaggtggccgttactgatcttacttcatccagtctaataggtttggagattaaaccttttctcaacttgtgctgtttatatagccaagcttccgtcaataaggcttcattgtgactttaacaaacattatcttcccacataccaggaactattggacatttattttacatgggaaaaattatttggaataataaagcaggaacttttcctgaagttgcaatttaaaa

SEQ ID NO: 350114 - DNA, 1163 bp, Homo Sapiens
  misc_feature (879)..(879): n is a, c, g, or t
  misc_feature (929)..(929): n is a, c, g, or t
  misc_feature (1011)..(1011): n is a, c, g, or t
  misc_feature (1052)..(1052): n is a, c, g, or t
  misc_feature (1118)..(1118): n is a, c, g, or t
ggagcgaggcctgggtggcgaattcggcacgaggggtagccgttgggttgggaaagtgagggatttttggcctcgtttctcctgcttcttttctcctcccttttactttgccggtagaacacagttatgggtcgcaagaagaagaagcagctgaagccgtggtgctggtattgtaatagagattttgatgatgagaagatccttattcagcaccaaaaagcaaagcattttaaatgccatatatgtcacaagaaattgtatacaggacctggcttagctattcattgcatgcaggtacataaagaaacaatagatgccgtaccaaatgcaatacctggaagaacagacatagagttggaaatatatggtatggaaggtattccagaaaaagacatggatgaaagacgacgacttcttgaacagaaaacacaagaaagtcaaaaaaagaagcaacaagatgattctgatgaatatgatgatgacgactctgcagcctcaacttcatttcagccacagcctgttcaacctcagcaaggttatattcctccaatggcacagccaggactgccaccagtaccaggagcaccaggaatgcctccaggcatacctccattaatgccaggtgttcctcctctgatgccaggaatgccaccagttatgccaggcatgccacctggattgcatcatcagagaaaatacacccagtcattttgcggtgaaaacataatgatgccaatgggtggaatgatgccacctggaccaggaataccacctctgatgcctgggatgccaaccaggtatgcccccacctggttccacgtcctggaattccctccaatgactcaagcacaggctggttcagcgccaggtattcttaantaaaccacctgcacccacagcaactgttacctgccccacagccctccagntaactaaccctccttttccccagtgctggacagatggggacacctgttcacaagctcaagtacagctttcatccaatttcanaaagtctgttctgcatctttctaaagctctgttttcctagnacagcacaaagctccagcagcttgtcccaagaaccctggttggtaccaaaatttcaaacccccttnaattagtaacccctgcaaacaacttacggaaccccccaaaggctt

SEQ ID NO: 350115 - DNA, 379 bp, Homo Sapiens
ctctcattttattacaatgaagtttaacagtacagaaaagtcacatgaccttggtgggtcagatttcttaaaccctgcaacatgaggaactctaaatacattaaatattgttacacattcagacttccaatgtacaagtacttggaaacagttacagccctcaccaagctaggttggggacatgaagtccaacagcatctgaaatgctgtgaagggcaaactttacaaatagcaatgtaagcttacagaacttgcctttactagggtggtatgttcatgtaattccagcgccttcacaatttaacgaaccaaatttactatacttcacttcttaaaaacctaggatggaaacatggaaaaagaggccatacagttttaa

SEQ ID NO: 350116 - DNA, 1319 bp, Homo Sapiens
  misc_feature (1005)..(1124): n is a, c, g, or t
atcaggccaaatcggccgagctcgaattcgtcgagagcggaagtgaaatcgtggcagccgcctcggccgccgcaatgcagagagaggagaagcagcttgaggcatcattagatgcactgctgagtcaagtggctgatctgaagaactctctggggagtttcatttgcaagttggagaacgagtatggccggctgacctggccatctgtcctggacagctttgccttgctttctggacagctgaacactctgaacaaggtcttgaagcatgaaaaaacaccgctgttccgtaaccaggtcatcattcctctggtgttgtctccagaccgagatgaagatctcatgcggcagactgaaggacgggtgcctgttttcagccatgaggtagtccctgaccatctgagaaccaagcctgaccctgaagtggaagaacaggagaagcaactgacgacagatgctgcccgcattggtgcagatgcagcccagaagcagatccagagcttgaataaaatgtgttcaaaccttctggagaaaatcagcaaagaggagcgagaatcagagagtggaggtctccggccgaacaagcagacctttaaccctacagacactaatgccttggtggcagctgttgcctttgggaaaggactatctaattggagaccttcaggcagcagtggtcctggccaggcaggccagccaggagctgggacgatccttgcaggaacctcaggattacagcaggtgcagatggcaggagctccaagccagcagcagccaatgctcagtggggtacaaatggctcaggcaggtcaaccagggaaaatgccaagtggaataaaaaccaacatcaagtcggcttccatgcatccctaccagcggtgagtgtggctggcaacctcgactccctggtgctctttgcagagttgggcagtgaaattaccttttgctcaaggctcacctagatgggtacaataaaaagaacatgggctttcagcagcagacaaannnnnnnnnnnnnnnnnnnnnnnnnnnnnnnnnnnnnnnnnnnnnnnnnnnnnnnnnnnnnnnnnnnnnnnnnnnnnnnnnnnnnnnnnnnnnnnnnnnnnnnnnnnnnnnnnnnnnnnnatcgcgagatgaaggtttaagaaatctgacccaccaaggtcatgtgacttttctgtactgttaaacttcattgtaataaaatgagagaaaaatttatgcctttttattcataacccagctgtggaccactgcctgaaaggtttgtacagatgcatgccacagtagatgtccacataataaaattcatagttacca

SEQ ID NO: 350117 - DNA, 431 bp, Homo Sapiens
tggctccgccccggcaggaactatgtgggaaaagggtttaccccttaaacacacgaaaaaaacccccttccccccggattccatgttcccttaatttggaagggagaagggaattgcaccttcaaactgcccatccagggtttagttgaccctcataatggtgccccactttcctcgactttggcccaggatttccttcaaagaaaacgactttcccttcatttccctaagcctgtggcccaaatggtggaccagaatgatggtgggaggggcaacccccagtagctttgcctgcttttataaagttgaacaaattgaatttagacattcaggctaacctgcctttcttagtactcctttgttggcatgggcaggggttgagtcagcagaagtggaccaaaggattcctctgaataaagttatttaaattg

SEQ ID NO: 350118 - DNA, 1015 bp, Homo Sapiens
  misc_feature (765)..(784): n is a, c, g, or t
agcggcgtcttattgctggcggcctgaggtaaaggccgcgcttgggtgtccctgggtggtcgggtccccgagttgggaggggcggaaggctgaaccccagcttgagccggacaagccgattcccagcgttgagagggtagagatgaactgtgtgtgaggccaaactggatcggtcaacatggtcttccccctccccactccccaggagcccatcatggcgacgccccctaagcggcgggcggtggaggccacgggggagaaagtgctgcgctacgagaccttcatcagtgacgtgctgcagcgggacttgcgaaaggtgctggaccatcgagacaaggtatatgagcagctggccaaataccttcaactgagaaatgtcattgagcgactccaggaagctaagcactcggagttatatatgcaggtggatttgggctgtaacttcttcgttgacacagtggtcccagatacttcacgcatctatgtggccctgggatatggttttttcctggagttgacactggcagaagctctcaagttcattgatcgtaagagctctctcctcacagagctcagcaacagcctcaccaaggactccatgaatatcaaagcccatatccacatgttgctagaggggcttagagaactacaaggcctgcagaatttcccagagaagcctcaccattgacttcttccccccatcctcagacattaaagagcctgaatgccaaaaaaacaaaacgcagaaaggaagatataacattnnnnnnnnnnnnnnnnnnnncacttgaagccatacgaatacccatgtttaaacaaccatcacgccatgatataattcaaaagtgtggggcgccctctgggcccctccaaaaaaatttccataaacccatttcctttgggcgccccggggccccccctagtggaaaggggaaccaggggcccatatatttgttttcccaaagaaaaaaccccgggacaccaggaaaaaggggtctgtgagtattcccccccc

SEQ ID NO: 350119 - DNA, 818 bp, Homo Sapiens; identical to SEQ ID NO: 15367
  misc_feature (676)..(722): n is a, c, g, or t
  misc_feature (770)..(770): n is a, c, g, or t

SEQ ID NO: 350120 - DNA, 831 bp, Homo Sapiens
  misc_feature (624)..(624): n is a, c, g, or t
  misc_feature (626)..(627): n is a, c, g, or t
  misc_feature (733)..(749): n is a, c, g, or t
  misc_feature (810)..(810): n is a, c, g, or t
gggacgtcattcacccgcgccacccggaagccgcggttcctaccaaccgttcttattgctggcggcctgaggagcccatcatggcgacgccccctaagcggcgggcggtggaggccacgggggagaaagtgctgcgctacgagaccttcatcagtgacgtgctgcagcgggacttgcgaaaggtgctggaccatcgagacaaggtatatgagcagctggccaaataccttcaactgagaaatgtcattgagcgactccaggaagctaagcactcggagttatatatgcaggtggatttgggctgtaacttcttcgttgacacagtggtcccagatacttcacgcatctatgtggccctgggatatggttttttcctggagttgacactggcagaagctctcaagttcattgatcgtaagagctctctcctcacagagctcagcaacagcctcaccaaggactccatgaatatcaaagcccatatccacatgtttgctagagggggcttagagaactacaagggcctgccagaattttcccccaggagaagcccctccaccattggacttctttccccccccatccctccggaccattaaaagagccctgaaatgcccttttccnannaaaaaacaaataacccactaacaaataaactaccttggtttgggcccggcccttcggggccccttcgaagaaagacctttttccaaaaaaccaatttccgcctttnnnnnnnnnnnnnnnnncccccaaggtaaagggttaaagggggaaaaaccaatgggggcccattaaagccgcgggttnttccccccaaaaggggaaaaa

SEQ ID NO: 350121 - DNA, 1224 bp, Homo Sapiens
  misc_feature (49)..(85): n is a, c, g, or t
gatgatacgactcactatagggcgactggagttaccgcggtggcggcgnnnnnnnnnnnnnnnnnnnnnnnnnnnnnnnnnnnnnatcaggccaaatcggccgagctcgaattcgtcgagagcggggggaggagcgcgcggccgcgcagagcaagctgagccgagccgagccgagctgggggcgcagagcgcgggaggcggcggcggcgcggagcccaggtggctccgctgccggatgggagtgccccagtgtgctggatgaagctggcgcatgcaccatgtcatcatgtgtctctagccagcccagcagcaaccgggccgccccccaggatgagctggggggcaggggcagcagcagcagcgaaagccagaagccctgtgaggccctgcggggcctctcatccttgagcatccacctgggcatggagtccttcattgtggtcaccgagtgtgagccgggctgtgctgtggacctcggcttggcgcgggaccggcccctggaggccgatggccaagaggtcccccttgacacctccgggtcccaggcccggccccacctctccggtcgcaagctgtctctgcaagagcggtcccagggtgggctggcagccggtggcagcctggacatgaacggacgctgcatctgcccgtccctgccctactcacccgtcagctccccgcagtcctcgcctcggctgccccggcggccgacagtggagtctcaccacgtctccatcacgggtatgcaggactgtgtgcagctgaatcagtataccctgaaggatgaaattggaaagggctcctatggtgtcgtcaagttggcctacaatgaaaatgacaatacctactatgcaatgaaggtgctgtccaaaaagaagctgatccggcagccgactttccacgtcgccctccaccccgaggcacccggccagctcctggaggctgcatccagcccaggggccccattgaggcaggtgtaccaggaaattgccatcctcaagaagctggaccaccccaatgtggtgaagctggtggaggtcctggatgaccccaatgaggaccatctgtacatggtgttcgaactggtcaaccaagggcccgtgatggaaagtgcccaccctcaaaccactctctgaagaccaggcccgtttctacttccaggatctgatcaaaggcatcgagtacttacactaccagaagatcatccaccgtgacatcaaacct

SEQ ID NO: 350122 - DNA, 1312 bp, Homo Sapiens
  misc_feature (742)..(742): n is a, c, g, or t
  misc_feature (744)..(744): n is a, c, g, or t
  misc_feature (746)..(786): n is a, c, g, or t
  misc_feature (847)..(856): n is a, c, g, or t
  misc_feature (997)..(1007): n is a, c, g, or t
  misc_feature (1061)..(1070): n is a, c, g, or t
  misc_feature (1192)..(1227): n is a, c, g, or t
  misc_feature (1243)..(1254): n is a, c, g, or t
aattactctcttccatattggttaacagtagaaggctcagtttctctgctcatcacacggccttcggcactgtagctttgggtggtgggctgcagattaattttgtaaccaccttaagaaaaatacggaactctaactccttgccactcaagaaatgtcctccctttcagaatatgccttccgcatgtctcgtctcagtgcccggctatttggtgaagtcaccaggcctactaattccaagtctatgaaagtggtgaaactgtttagtgaactgcccttggccaagaagaaggagacttatgattggtatccaaatcaccacacttacgctgaactcatgcagacgctccgatttcttggactctacagagatgagcatcaggattttatggatgagcaaaaacgactaaagaagcttcgtggaaaggagaaaccaaagaaaggagaagggaaaagagcagcaaaaaggaaatagtgttggtccctcaagagggagactttcttcctcagtggcggagagaagaaagtgcatttattgtctttccacatattggaggaatgtcatcttcctaaatgaagtttatttggaggaacacagtcatctccttggtgaaatctaatccggttacattgtggctggtttcttgaacacattctaactgtgcaaaattatcttggccttggccgtgtaatgtgaggtttacctgattctctaatgaaataaatacctaagttataaaanancnnnnnnnnnnnnnnnnnnnnnnnnnnnnnnnnnnnnnnnnncgccagaaagaaaaaagggggggccgttaaaaaatttcctctgggggggcccaagtcttannnnnnnnnnttttttttttgaacagaggggcgcccttatggggagcctataaataaaacctagggccggggcccgtttttattcccacccttctgggtggggaaaaactgctacggtggggcatttttggggaagcacccttttcttttnnnnnnnnnnnaataatttggggccacaccccccccccacaaaaatttccaccccctctgggggnnnnnnnnnncaaatttttttaaggggaaaagggggggaaaaacccaccccctcacatattccttcgctgctttgaaaaatttttcccttccgtggaggtttgtttttttggaaaaattatttttccccccnnnnnnnnnnnnnnnnnnnnnnnnnnnnnnnnnnnncgatataacacacaannnnnnnnnnnnggggttttattttggggggcgccctcactatctccccaagaggtggtggtcggggggg

SEQ ID NO: 350123 - DNA, 789 bp, Homo Sapiens
  misc_feature (675)..(702): n is a, c, g, or t
  misc_feature (708)..(708): n is a, c, g, or t
  misc_feature (767)..(767): n is a, c, g, or t
ggggggcgggccttccgggacgagggcgcgtgggtgaggaaggtcaggtctaggaactctaactccttgccactcaagaaatgtcctccctttcagaatatgccttccgcatgtctcgtctcagtgcccggctatttggtgaagtcaccaggcctactaattccaagtctatgaaagtggtgaaactgtttagtgaactgcccttggccaagaagaaggagacttatgattggtatccaaatcaccacacttacgctgaactcatgcagacgctccgatttcttggactctacagagatgagcatcaggattttatggatgagcaaaaacgactaaagaagcttcgtggaaaggagaaaccaaagaaaggagaagggaaaagagcagcaaaaaggaaatagtgttggtccctcaagagggagactttcttcctcagtggcggagagaagaaagtgcatttattgtctttccacatattggaggaatgtcatcttcctaaatgaagtttatttggaggaacacagtcatctccttggtgaaatctaatccggttacattgtggctggtttcttgaacacattctaactgtgcaaaattatcttggccttggccgtgtaatgtgaggtttacctgattctctaaatgaaataaatacctaagttattgtttgacaannnnnnnnnnnnnnnnnnnnnnnnnnnnctgttnggcgcgcttggccctttaaaaacttttccaaaccttttcttttggccccccggcccccntaagggaagtgaactgggcctt

SEQ ID NO: 350124 - DNA, 1843 bp, Homo Sapiens
  misc_feature (52)..(88): n is a, c, g, or t
ggaaatgatagatcactatagggcgaaccggagctctacgcggtggcggcgnnnnnnnnnnnnnnnnnnnnnnnnnnnnnnnnnnnnnatcaggccaaatcggccgagctcgaattcgtcgagagcggctcatcctcttacccaaattttccagccgatcactggagctgacttccgcaatcccgatggaataaatctagcacccctgatggtgtgcccacactttgctgccgaaacgaagccagacaacagatttccatcagcaggatgtgggggctcaaggttctgctgctacctgtggtgagctttgctctgtaccctgaggagatactggacacccactgggagctatggaagaagacccacaggaagcaatataacaacaaggtggatgaaatctctcggcgtttaatttgggaaaaaaacctgaagtatatttccatccataaccttgaggcttctcttggtgtccatacatatgaactggctatgaaccacctgggggacatgaccagtgaagaggtggttcagaagatgactggactcaaagtacccctgtctcattcccgcagtaatgacaccctttatatcccagaatgggaaggtagagccccagactctgtcgactatcgaaagaaaggatatgttactcctgtcaaaaatcagggtcagtgtggttcctgttgggcttttagctctgtgggtgccctggagggccaactcaagaagaaaactggcaaactcttaaatctgagtccccagaacctagtggattgtgtgtctgagaatgatggctgtggagggggctacatgaccaatgccttccaatatgtgcagaagaaccggggtattgactctgaagatgcctacccatatgtgggacaggaagagagttgtatgtacaacccaacaggcaaggcagctaaatgcagagggtacagagagatccccgaggggaatgagaaagccctgaagagggcagtggcccgagtgggacctgtctctgtggccattgatgcaagcctgacctccttccagttttacagcaaaggtgtgtattatgatgaaagctgcaatagcgataatctgaaccatgcggttttggcagtgggatatggaatccagaagggaaacaagcactggataattaaaaacagctggggagaaaactggggaaacaaaggatatatcctcatggctcgaaataagaacaacgcctgtggcattgccaacctggccagcttccccaagatgtgactccagccagccaaatccatcctgctcttccatttcttccacgatggtgcagtgtaacgatgcactttggaagggagttggtgtgctatttttgaagcagatgtggtgatactgagattgtctgttcagtttccccatttgtttgtgcttcaaatgatccttcctactttgcttctctccacccatgacctttttcactgtggccatcaggactttccctgacagctgtgtactcttaggctaagagatgtgactacagcctgcccctgactgtgttgtcccagggctgatgctgtacaggtacaggctggagattttcacataggttagattctcattcacgggactagttagctttaagcaccctagaggactagggtaatctgacttctcacttcctaagttcccttctatatcctcaaggtagaaatgtctatgttttctactccaattcataaatctattcataagtctttggtacaagtttacatgataaaaagaaatgtgatttgtcttcccttctttgcacttttgaaataaagtatttatctcctgtctacagtttaataaatagcatctagtacga

SEQ ID NO: 350125 - DNA, 1386 bp, Homo Sapiens
taggatgagtccacctagtttccacatgcgtgggcagtagctgtcacacgggcctgtcgtggcactcagcccatggcacagacatatgtggctcagggcaagaaccagtggatggggctctgcacaggaacgctggcctcgggatgggagacccggcctgcccaacactgctcagagcccctcccaactctgacaacaggctcgggtcaggactccccgaaatcaggcaccctcctgccccactgctgagatccccaacgggccagacctagcttggaaactttcttccacctggctggccaggaaggcagcaaacagagatgatgactcggaatgatgggctattcggaaatggctagggaaacaactgtttccctactgtccttgcgggacccaccctgggctaacgggcttcccaaggaagtcctagtggctctggggtcctgaagtccccaaatgggaacctaggctgagagaagcaaggctgtgagggcatccaaagggctgcctcaggttttgttcctgagaacgaagccgtggccccggaggctcaggcgtgctcaatgggggccagggccaacagcatgggagtgggcaggggctgccacctgtaggggccagcactgggctccggggacgccagcagagggccgagaggccatcagcagagtctgtgtcgaggtccagcctcccgtaagcttcgcacagaggcaggtcattagcttcgcaaaggcttgagctggacgagtaatactcctcctccagctcgtagaggtcaatggagatctcgtctcgcagcgtgatgagcttccggtcgcactcctcctgcagtgtgcgcagctgctggttgcgctggtcaatggcctcgttcacggaggggaagtcattgaggatcaggaactgcttgaggtcggacaccagcttcatcagggactcgccggctcggacgatgttggcggctcgcacatgcatctcgtaattgtcctgttcaccctgagtggcccgtgacacctgcgtctcgtcctcaatcttggcggtcttgatgatctcggtgaagttgtccatgatggacttaatgtcgtccttcagccgcttgttgtaggactgcagcagcgtctccttgctctggggcagggctctctgctgggccatggccgagcctcaagcagcgcagcggggagacctgggacccgccccagcgcccgcacaccagacgccgcgtccgccgggtcggcctagggcggggtggtcaagtgcctctgcgacccgcactttcccgcgtctctcccacggcctggccctcccgccgcagtctctcttccccgccgcgccgcggtccgaaaacctagtcagccgccgcagcctctcggccccgcctcgattttt

SEQ ID NO: 350126 - DNA, 1464 bp, Homo Sapiens
gacatggacttcgcatcggctgggacggaatcctggttttcgaagctattggcggcagagtggaaggccatgcccggttctccaagcataaggtttccccctaagtaaaatgaatacgtagacctctggtgttctcagggccccctccagctcaaacggtcgaaggtttcagcttcttacggagccccacaagggtcaggatgatgggctttgacccttctgcatccctgggacccagcacggggcctggcacgtaggttggctccagctccgtggataaggctgagtgggtcacgaattggagctccaatggctttcaaggccattccctgcctgggcttcatcccccacattcccatgactgtccctgcctccacactggggtttggtgacatccacatggaattgcatccctggtgccctggacataggtgtggacctgactgcccaaaaaaggctggcccagccttggctgaaatctctacatatggattcagaaggtaacaggagcagcacagccccagaacgcactgcccgaggaggaaggctctcggaagagggcctgcgggggatacagccaggcgcctcccttctccagactcggcctatccgactggcgtgagtcctgtggttttcatcacattgcactgtgggaaaggcccagggccctggcatatggatgtgaattgtctgtcggtcaaacgctctggccaggagctctgctctgaaacccaggcatggctccactgctaagaccagcaagaatttgaaaaagcagaaggcagccctgcctgctggccaggcccaggtaggcaggctcccgctctgcatggggagtccagcgctatttatacctggacgagtaatactcctcctccagctcgtagaggtcaatggagatctcgtctcgcagcgtgatgagcttccggtcgcactcctcctgcagtgtgcgcagctgctggttgcgctggtcaatggcctcgttcacggaggggaagtcattgaggatcaggaactgcttgaggtcggacaccagcttcatcagggactcgccggctcggacgatgttggcggctcgcacatgcatctcgtaattgtcctgttcaccctgagtggcccgtgacacctgcgtctcgtcctcaatcttggcggtcttgatgatctcggtgaagttgtccatgatggacttaatgtcgtccttcagccgcttgttgtaggactgcagcagcgtctccttgctctggggcagggctctctgctgggccatggccgagcctcaagcagcgcagcggggagacctgggacccgccccagcgcccgcacaccagacgccgcgtccgccgggtcggcctagggcggggtggtcaagtgcctctgcgacccgcactttcccgcgtctctcccacggcctggccctcccgccgcagtctccctcgtgccgaattcgccacccaggcctcgctc

SEQ ID NO: 350127 - DNA, 1359 bp, Homo Sapiens
  misc_feature (53)..(53): n is a, c, g, or t
gtacacggtggggacgcctgctggaggccgctctggctgactgtagggctatncgggaagtgccagggcctgtgttcccaactgtcgcccccttcaggctaagtctcaggcagggacagacccagaaagaacacagtctgccctcagagagctctttgcagtgtagtgacactggggtttctgcagtcagggaggagggagggtggccaggctgacagctttttgcaagaggagggggaccagcaccagctgggaggcataggctaggacaggcccacgtggaggctgggcaggaagggcctgctgaggtcacacagctgttggtggttgggccagggcggcttcctcctttcagaatgctagggtggctctcaccactggccgcctctccttgccaggcctgccaactcaggggacagatggagcaggagtggagaaagggaaaggcaggtctggggtgtggtcgtgttttcttaactctgcttctgtcttgctctcccctcccctggctttcctctctgcctgctcctgtctctccctggggtttctggtggtggaaaagctcaagcctttgcgaagctaatgacctgcctctgtgcgaagcttacgggaggctggacctcgacacagactctgctgatggcctctcggcccctctgctggcgtccccggagcccagtgctggccccctacaggtggcagcccctgcccactcccatgctggtggccctggccccactgagcacgcctgagcctccggggccacgcttcgttctcaggaacaaaacctgaggcagccctttggatgccctcacagccttgcttctctcagcctaggttcccatttggggacttcaggaccccagagccactaggacttccttgggaagcccgttagcccagggtgggtcccgccaggacagtagggaaacagttgtttccctagccatttccgaatagcccatcattccgagtcatcatctctgtttgctgccttcctggccagccaggtggaagaaagtttccaagctaggtctggcccgttggggatctcagcagtggggcaggagggtgcctgatttcggggagtcctgacccgagcctgttgtcagagttgggaggggctctgagcagtgttgggcaggccgggtctcccatcccgaggccagcgttcctgtgcagagccccatccactggttcttgccctgagccacatatgtctgtgccatgggctgagtgccacgacaggcccgtgtgacagctgctgcccacgcatgtggaagctaggtgggactcattcctaattctgccgttgtaatgagacttgattaaaacaccgccacttttttgcaaaaaaaa

SEQ ID NO: 350128 - DNA, 630 bp, Homo Sapiens
gaggagcagcttatcacctaaagggggaccccattggggtacagtcgctggagctctgagggaaagaagccatccaatatgtctcggaggcagcgctgtgtggagggatcgtagaagggctggaagggcccgtcgaacatcatgatgccattccggtagagcttcagcgggatgggctcgagggtacgcagccgtgccccgccgggcactggtgtcacttgggtgtcaccctctaccaccagctcactaagatcctgcaggctggccagcagcctgtcaaagtccacctcagggggcgccaatgagtcccctccatctccctgacctgccgctgcagctgcacacacatcgtctccagttcctcctgccgctgcagggttgcctcggctgggtgtggccggagggtctgcaccaggtcctctagggccgctatcttctgatccttggacagtatctcatcagtctgggccttcacctgctgctccaggtcccacaacttcctcgtcatgaaggccatcagctccgagtcatgggatgcagggacatctccatagatgcggattcctcgcctccacgcagggccgctagccgtcccgcagcgccgccatcttgttgtcacgcggttttcct

SEQ ID NO: 350129 - DNA, 920 bp, Homo Sapiens
cggcgctgcgggacggctagcggccctgcgtgtactttcccaagcaccaccaggccaaaggtctctcagttcagagcagaaagccgtatacccagaggagcaggcagataacagaaacttccagaaacctctgtggagacagtggaagaggcaaaagggagttcctgacagctggattctagaagtagaactatgagctcacctttggcctcccttagcaagacccgaaaagtgcccctgccctcggagcctatgaatcctgggaggcgaggaatccgcatctatggagatgaagatgaggtggacatgttgagtgatgggtgtggctcagaagaaaagatctcagtcccttcctgctatggcggcataggtgcccctgtgagtcggcaagtccctgcatcccatgactcggagctgatggccttcatgacgaggaagttgtgggacctggagcagcaggtgaaggcccagactgatgagatactgtccaaggatcagaagatagcggccctagaggacctggtgcagaccctccggccacacccagccgaggcaaccctgcagcggcaggaggaactggagacgatgtgtgtgcagctgcagcggcaggtcagggagatggagcggttcctcagtgactatggcctgcagtgggtgggcgagcccatggaccaggaggactcagagagcaagacagtctcagagcatggcgagagggactggatgacagccaagaagttctggaagccaggggactcattggcgccccctgaggtggactttgacaggctgctggccagcctgcaggaatcttagtgagctggtggtagagggtgacacccaaggtgacaaccagtggcccggcgaggacacggctgcgtaccctcgaggcccatccggctgaagctctaccggaatgc

SEQ ID NO: 350130 - DNA, 840 bp, Homo Sapiens
gggctggtactggcccggaagtttgggataacaagatggcggcgctgcgggacggctagcggccctgcgtgtactttcccaagcaccagcaggccaaatggtctctcagttcagagtcagaaagccgtatacccagaggagcaggcagataacagaaacttccagaaacctctgtggagacagtggaagaggcaaaagggagttcctgacagctggattctagaagtagaactatgagctcacctttggcctcccttagcaagacccgaaaagtgcccctgccctcggagcctatgaatcctgggaggcgaggaatccgcatctatggagatgagcggtgacctaggcatccctgtctgcagaagatgaggtggacatgttgagtgatgggtgtggctcagaagaaaagatctcacgtcccttcctgctatggcggcataggtgcccctgtgagtcggcaagtccctgcatcccatgactcggagctgatggccttcatgacgaggaagttgtgggacctggagcagcaggtgaaggcccagactgatgagatactgtccaaggatcagaagatagcggccctagaggacctggtgcagaccctccgtgcacacccagccgaggcaaccctgcagcggcaggaggaactggagacgatgtgtgtgcagctgcagcggcaggtcagggagatggagcggttcctcagtgactatggcctgcagcgggtgggcgaagcccatggaccaggaggactcagagagcaagacagtctcagagcatggcgagagggactggatgacagcccagaagttctggaaagcaggggactccatggggccc

SEQ ID NO: 350131 - DNA, 2355 bp, Homo Sapiens
  misc_feature (1409)..(1481): n is a, c, g, or t
  misc_feature (1665)..(1682): n is a, c, g, or t
  misc_feature (1961)..(1961): n is a, c, g, or t
  misc_feature (2213)..(2239): n is a, c, g, or t
  misc_feature (2297)..(2297): n is a, c, g, or t
agaagtgcacgggtcctggtcgcctaggaaacgcgtgacaacaagatggcggcgctgcgggacggctagcggcctgcgtgtccctgcatcccatgactcggagctgatggccttcatgacgaggaagttgtgggacctggagcagcaggtgaaggcccagactgatgagatactgtccaaggatcagaagatagcggccctagaggacctggtgcagaccctccggccacacccagccgaggcaaccctgcagcggcaggaggaactggagacgatgtgtgtgcagctgcagcggcagggtcagggagatggagcggttcctcagtgactatggcctgcagtgggtgggcgagcccatggaccaggaggactcagagagcaagacagtctcagagcatggcgagagggactggatgacagccaagaagttctggaagccagggactcattggcgccccctgaggtggactttgacaggctgctggccagcctgcaggatcttagtgagctggtggtagagggtgacacccaagtgacaccagtgcccggcggggcacggctgcgtaccctcgagcccatcccgctgaagctctaccggaatggcatcatgatgttcgacgggcccttccagcccttctacgatccctccacacagcgctgcctccgagacatattggatggcttctttccctcagagctccagcgactgtaccccaatggggtcccctttaaggtgagtgacttgcgcaatcaggtctacctggaggatggactggaccccttcccaggcgagggccgtgtggtggggcaggcagcggatgcaacaaggccctggacagggctggaggagcaccaggctccaggatgactgctgagaaatttctgaacaggctccccaagtttgtgatccggcaaggcgaggtgattgacatccggggccccatcagggacaccttgcagaactgctgcccattgcctgcccggatccaggagattgtggtggagacgcccaccttggccgctgagcgagagaggagccaggagtcacccaacacgccggcacccccgctctccatgctgcgcatcaagtctgagaatggggaacaggccttcctactgatgatgcagcctgacaacaccattggggacgtgcgagctctgctagcgcaggccagggtcatggatgcctctgcctttgagatcttcagcacattcccgcccaccctctaccaggacgatacactcacgctgcaggctgcaggccttgtgcccaaagcgagcactgctgctgcgggcacgccgagccccgaagtccagcctgaaattcagtcctggtccctgtcccggtcccggtcccagccccagtcccggccccggccctcgtccctctacccgacccacaccaccgnnnnnnnnnnnnnnnnnnnnnnnnnnnnnnnnnnnnnnnnnnnnnnnnnnnnnnnnnnnnnnnnnnnnnnnnnggtgagttcttttacccacccacgacaagcgcccccatttcccctccaacccactcatcattacccgcctctcaccctcccattcacaccattaccaaaaaatcccaccccgagcctcacaaccaccccacgaacctttctccgaccctcactcacccctttacctttccccacccttactaannnnnnnnnnnnnnnnnntttccgttctctccatcaacttttccatccgcacttattttccctcccctacatcccccccttttccctcaccacatccacccgcccagcatttccttctcaatctctcgacctctccgttcttaaaaaataaaacgcccccgcattcacattcgaccgcccttcgttacactctatcctagcgctaaccccctttattctactctatattatccgctccctctcctcccccttaacctattcgcgtttcctctcgcttctttattcacttacccgctnttccttcccgtacatactcctcccatatacttcgctacaccttcgcgcctctaccagaatatccacactctaccttaagaaatcctctcctgtatgtattctccgactctatttcctattccatatccgcaccccatagcgcacgccgtaatgattctcccaacaaactcgatctccgctaatccccattcccccgcttatccgcgcgcgcgatcatttccacagccccatatcccgacttttatacacctnnnnnnnnnnnnnnnnnnnnnnnnnnnacgcggcgtctctaccataccactatctgattaaaccccctccccaacccgtaatccncacgtcctcctcgctcaactcgtttcgacacaccatcacattctttcccatctctgac

SEQ ID NO: 350132 - DNA, 925 bp, Homo Sapiens
ggaaaagaggggtgtgttcaatgttcaaatggagcccaaagtggtcacagatacagatgagactgaacttgcgaggcagatggagaggcttgaaagagaaaatgccgaagtggctgtaaatcctagacttgaaagttttccagtattgaaaacttcaaagctgaatattttttatttctaagtatttaaatgttctaacagatcagaacatgaaatgccctcctaaatgtcagctgttgtcacacagtagctccaacactttgagcatttttaagggagtggcctcatttcactagagacgaaatcttaaagaatagtgctaaaatcgggcgtgtgatttccatcgctgatgtctccagatgggcaccccgtttctagttcaatgcctcacgagattggccaggggcatccaaggcaaacaatcccaatctttctatataaaatgtattcaagcaaacatcaaataaatttctgggatatttaactataggcttcttccttctagtcaccagttaaaagcatttgaaaagggatagtttctcaggtaatactagttagggaatgtgtatctcaaaggcatagagaagtaatgtaaattttcacaaaaaaacagagtttggggggcttatttgcctactagaggcctagggtaattattatttcggcttttccttcttaagtgcaggacagtactgatttcaatgtcctgatgttgaacagcatttgctggcatcctgagatgaataggtgagatttggggttagttagaataagtgggctttgaattgcttttagaggcacgtcctatttgtgtaaacatttgccagaccaggagagttgtttttaattcctcagagagtttgggttgcgtctgcatatccatggactgacttgtttatctgattgcacttatctctaacctgtg

SEQ ID NO: 350133 - DNA, 1859 bp, Homo Sapiens
agcgggcgcggtggagtgagcgaagcgcacgctgaggaggatcggcggccggtgagggggaagcaagtctggtctctgtgattgaagaagtcggctctgggctccagtgcgggaatcacacacatacctcagaatgccgggtctaagttgtagattttatcaacacaaatttcctgaggtggaagatgtagtgatggtgaatgtcagatccattgctgaaatgggggcttatgtcagcttgctggaatacaacaacattgaaggcatgattcttcttagtgaattatccagaaggcgtatccgttctatcaacaaactcatccgaattggcaggaatgagtgtgtggttgtcattagggtggacaaagaaaaaggatatattgatttgtcaaaaagaagagtttctccagaggaagcaatcaaatgtgaagacaaattcacaaaatccaaaactgtttatagcattcttcgtcatgttgctgaggtgttagaatacaccaaggatgagcagctggaaagcctattccagaggactgcctgggtctttgatgacaagtacaagagacctggatatggtgcctatgatgcatttaagcatgcagtctcagacccatctattttggatagtttagatttgaatgaagatgaacgggaagtactcattaataatattaataggcgcttgaccccacaggctgtcaaaattcgagcagatattgaagtggcttgttatggttatgaaggcattgatgctgtaaaagaagccctaagagcaggtttgaattgttctacagaaaacatgcccattaagattaatctaatagctcctcctcggtatgtaatgactacgacaaccctggagagaacagaaggcctttctgtcctcagtcaagctatggctgttatcaaagagaagattgaggaaaagaggggtgtgttcaatgttcaaatggagcccaaagtggtcacagatacagatgagactgaacttgcgaggcagatggagaggcttgaaagagaaaatgccgaagtggatggagatgatgatgcagaagaaatggaagccaaagctgaagattaactttgtgggaaacagagtccaatttaaggaacacagagcagcgcttcctggctgtaaatcctagacttgaaagttttccagtattgaaaacttcaaagctgaatattttttatttctaagtatttaaatgttctaacagatcagaacatgaaatgccctcctaaatgtcagctgttgtcacacagtagctccaacactttgagcatttttaagggagtggcctcatttcactagagacaaatctttaagaatagttctaaaattgggcttgtgatttccatttctgatgtctccagattggcacccctttctagttcaatgcctcacgagatttgccaggggcatccaaggcaaacaatcccaatctttctatataaaatgtattcaagcaaacatcaaataaatttctgggatatttaactataggcttcttccttcttgtcaccagttaaaagcattttaatactaagaccataattcttttatctttattttagtcttgatgtggaactgtaggagcaggtgaatacaaggatctctataacagatcctttcaaaagaagagttttagagaaaataaatttaactttaaccacagtgaacagttgacccttagcgggacaaagccttaaaatgcattgaaagaattagatcgggtctgtgccttttatctatttgagattgatgacaacctgtgtgagagaatttatcacaccacgtccttattggaataataagctacttgccttgagtttataattcagggtggtaaagtatg

SEQ ID NO: 350134 - DNA, 460 bp, Homo Sapiens
cggacataaggcgcgtcggtataggcgcgtctggtataggcgcgtctgcgtataggcgcgtctgcgtattaggcgcgttctgctcgaattgtgacagcctgtggggtcaagggcctattaatattattaatgagtacttcccgttcatcttcattcaaatctaaactatccaaaatagatgggtctgagactgcatgcttaaatgcatcataggcaccatatccaggtctcttgtacttgtcatcaaagacccaggcggtcctctggaataggctttctagctgctcatccttggtgtattctaacacctcagcaacatgacgaagaatgctataaacagtttcggattttgtgaatttgtcttcacatttgattgcttcctctggagaaactcttctttttgacaaatcaatatatcctttttctttgtccaccctaatgacaaccacacactcattcc

SEQ ID NO: 350135 - DNA, 600 bp, Homo Sapiens
  misc_feature (49)..(50): n is a, c, g, or t
  misc_feature (556)..(556): n is a, c, g, or t
  misc_feature (561)..(561): n is a, c, g, or t
  misc_feature (580)..(580): n is a, c, g, or t
ccaaaatactgagagcactttaaaaaagagtaacactttcttctatcgnntacacatacaagttttatgaggtttgatcagaatctttcattagtgataaaattaactggatggctgtaactcagaaggattcttccatcagtttagttcagagacaaattatccattatactgatgataattgcagttagtttagccaccaaagatacacggaaatgataattctttctattcagtatcgcagtgaactgtttaatactattggcattagatccctggtgttgatttgttaatacagcagattaataaaatctcaagcatcctaatagttgtgggttctgtaggtacattcataaatgaatttttgtctttctcttttagattaatctaatagctcctcctcggtatgtaatgactacgacaaccctggagagaacagaaggccctttctgtcctcagtccaagctatggctgttatcaaagagaagattgaggaaaagaggggtgtgttcaatgtccaatggagccccaaagtggtcacagattccagatgagncctgnacttgcgaggcagatgganaggctttgaaagagaaaatg

SEQ ID NO: 350136 - DNA, 854 bp, Homo Sapiens
cccccttgtgtgtcccgttgcaataggcacgtcatcaaggccaatgcttgtgcgccaaaagcgatcattcagctggtcacctccagtcggggttccaatgggccctgtggaaccaagactctctgaggtcgtccccagcggtggaatctctgggacctagacaggggtgtctttgcgtctggtgtgtgataaggaagcaagcgatgctacaccccgtcgggctgcacccccatctacccggctgcaaagcagtggcaatgagcgccagtgcgcccgtaagtccggtctgcgatatttggggtccgcagccctatgctaccaggaagataagccgtaccaggcgtgccttgttctggggatcgtcgtagcgggcccgaacaggctgtccattagcggcagtctccccctgcggcatcaccactcattcacgtaggcagcctcactccagaagcaaacagggccaagcgtagcttaccctgacccaccgcccgaagaagagctgtggccctcggtgtgcaacatagctgcggctgggagcgagggcacagatggaaccgggactgagacctgccgaggatgactaggggtatggcgacgtgggaatggactgcgcaagaggcctgacggtctcagtgacgaagcccgatctcctgaatcgtccgtcagaatctccagcctggtccaggatatggggccgtggaccaacggggcaaccgagctgcgctggagccagtttaccatagggggcccgcatggcttcggcggggggggcacccggattcccttggtgtcagtatctgcgccccggcgccggatcctggtccctcctcccggagcgccccgggcacagcgcc

SEQ ID NO: 350137 - DNA, 730 bp, Homo Sapiens
actgtgagatggccaatgacggtctgacccgttgggccgggccaggtcgcggacaacgtcgaccgtttgtttaagaagcgtggactcttgtcctgagtgcaccgaggctttcagcctgcgggacagtggtgcgatttgcattagagaaagggagatgccatgtgctggcccagcactccaacaggggcctgacctctaggaacgggacactggaggaagcctagacatctgaacaaatcaagtcatccagatccacggtcagctcctgccccgacttggccttcctcctgctgggctggcccacggacctcgggaacctgccctggctgtgggtgacctgcagcctatctcccaggactatggaagccccatgcaggaacatggttctgacactttggggattataccctaagcttaaaggactggaaaagcccctgaagtcccgagaccacaaccctccaccttctaaagataagacaagtcactgaaggtctcagaactgtggcccattcaccccttccctcaagacaagagtgtggccaagcatcaatctcacccccagagaccagacggtgtccaggtcttgggcagacgaaacctgctccttggggatggtcttcctggctgtgcttccaaagggctggcctgcaatcagctggttttcacttgatcctttcggggtttgcattatatctgactgaaggaatgaactgggagagaacagcagagc

SEQ ID NO: 350138 - DNA, 1933 bp, Homo Sapiens
  misc_feature (1208)..(1208): n is a, c, g, or t
ctttgaatctgattccgggaagatgcccagtcgattccagcgcctcggcagagatgccagagtcagtcccctcagacactgcctctaccccaaagtcgccccagtcaatcgcatcttctgccacctgctcaggaagctcctcgaggtggggtcgttccaccacagagggctctgtccctgtcctccactcgtacaccgttgagtttccccgcttctgcacgaaccgcaagcaatggcaacacctgctctgtggggctcaaacagagcacacaactgactctcctgccgaccatgcgtaaggccaacactgggctttggcctgggccacatggtcaaatgggcaaggcccccacaggttcaggtgtgtaaagagttcaaatgttatatgggaacaagacaactggagaagggtcatgagctggggaacacaggcaaagcacccccaccaggagaagctgaggcctctctacctctcacacacaaaccccacagacgcctggtacacgtcaatggcttcccccagggactgctgagccgctgccccaatctcagccagctgactcggcaggtccttcaccagggccagcagttctcctcggacattttcgcccgtgatgccatactgcttgcaggagtggtagaactgctcccgcatctcggcagcccctgcctggcactcctcctccttgcggctgtattcttgctgcagctgctggcacttggcaatctgcttcttcagtgaggggatctcatagttgacattccgaaccaggaggctagagagttccactgagaagtgcccaggaaattcagcccaggacacccccacatgaggcaggcatgccccaggatgcacacacatcctttgtggtggtgaagagcacgaagtcagcttcccagccccacttgttcccagctgtggagcctaagacaagttgtttaacccctctaatccaaccctcatcggtaaaacagcgacaataacatttatcatgaagatgcaagagagaatccacatgacacaccaagcacaattccttgcatttagtagatgctcaggaaatattagccattattattatttatactacacccaacccaaacacagttagtcctgtagttgctctcaggcacttgatattcgctcccaggaaaacccgtgcctcttctgccttgtgtagaatgggggtgcgggggtgggggtgggngcagcacactcccgctaaccaagaggtgagtggtggaggacccacacacacctgctcgctgaggcacggcgaatggccactaccggcctggacctcctccttcccccagcactccactcagggaaaatcaattccatcaaaaacaattgattttaccacctacaaatgggcaacatctacactccagtctcttcccactcacagactgtgcctcctataagcctggtatctcagaactctgagagtgggcttccccatggataccagggctcccaggccgggccactttacctaagtaggtgttgtccttctcatacagagctataatctcctgccaatccttcatccgctgtgaagagtatcggccaaaaatattcttcgtggaggcctctgtgcctttgagaaggtccaggattcttaggcagtgaaagtagtgaatgtaggacccagacagcagctgggcgatctcttcgctctctggcatgtcctggatggcagcattgatcttctcgcggatcgtcagcaccagactctgccatttcaggctgcagtgccttctgtccaccagccaatcgagcagcttgctggtctggatgtcgatgggcacgtgctgatggtcctccatctttcctccacttccgcttcaggctggagactccgccccgccccgccctaccaccaatccagtggcgttgtggccgagcctccgatcccgggaattccgg

SEQ ID NO: 350139 - DNA, 922 bp, Homo Sapiens
  misc_feature (13)..(13): n is a, c, g, or t
  misc_feature (23)..(23): n is a, c, g, or t
  misc_feature (30)..(30): n is a, c, g, or t
  misc_feature (33)..(33): n is a, c, g, or t
  misc_feature (61)..(61): n is a, c, g, or t
  misc_feature (63)..(63): n is a, c, g, or t
  misc_feature (69)..(69): n is a, c, g, or t
  misc_feature (74)..(74): n is a, c, g, or t
  misc_feature (76)..(76): n is a, c, g, or t
  misc_feature (87)..(90): n is a, c, g, or t
  misc_feature (92)..(93): n is a, c, g, or t
ttatcctttattnctctcagcanttatatnccncccagaaaacccgtccctcttctccctntncccccnggggngngggggtggggnnnnannagcacactcccgctaaccaagaggtgagtggtggaggacccacacacacctgctcgctgaggcacggcgaatggccactaccggcctgaacctcctccttcccccagcactccactcagggaaaatcaattccatcaaaaacaattgattttaccacctacaaatgggcaacatctacactccagtctcttcccactcacagactgtgcctcctataagcctggtatctcagaactctgagagtgggcttccccatggataccagggctcccaggccgggccactttacctaagtaggtgttgtccttctcatacagagctataatctcctgccaatccttcatccgctgtgaagagtatcggccaaaaatattcttcgtggaggcctctgtgcctttgagaaggtccaggattcttaggcagtgaaagtagtgaatgtaggacccagacagcagctgggcgatctcttcgctctctggcatgtcctggatggcagcattgatcttctcgcggatcgtcagcaccagactctgccatttcaggctgcagtgccttctgtccaccagccaatcgagcagcttgctggtctggatgtcgatgggcacgtgctgatggtcctggcggaaaacacggtgaggaggggggcgtgagcgcggagagaggacgtacaactcgcgcgctcatttcaacgtcccaaccaccaccctgcagggccagaacgggaccagaacgatgggctgggttgagccgctcccggagggagaccggagacacaggttaggggtccgcggccagtccccagcacacccagctcctgtccccacacctc

SEQ ID NO: 350140 - DNA, 1938 bp, Homo Sapiens
tggaccggtccggaattctcgggatggccgaaggatgcccgtttgtgtctaaacggaggctcggccacaacgccactggattggtggtagggcggggcgggccacagtctccagcctgaagcggaagtggaggaaagatggaggaccatcagcacgtgcccatcgacatccagaccagcaagctgctcgattggctggtggacagaaggcactgcagcctgaaatggcagagtctggtgctgacgatccgcgagaagatcaatgctgccatccaggacatgccagagagcgaagagatcgcccagctgctgtctgggtcctacattcactactttcactgcctaagaatcctggaccttctcaaaggcacagaggcctccacgaagaatatttttggccgatactcttcacagcggatgaaggattggcaggagattatagctctgtatgagaaggacaacacctacttagtggaactctctagcctcctggttcggaatgtcaactatgagatcccctcactgaagaagcagattgccaagtgccagcagctgcagcaagaatacagccgcaaggaggaggagtgccaggcaggggctgccgagatgcgggagcagttctaccactcctgcaagcagtatggcatcacgggcgaaaatgtccgaggagaactgctggccctggtgaaggacctgccgagtcagctggctgagattggggcagcggctcagcagtccctgggggaagccattgacgtgtaccaggcgtctgtggggtttgtgtgtgagagccccacagagcaggtgttgccaatgctgcggttcgtgcagaagcggggaaactcaacggtgtacgagtggaggacagggacagagccctctgtggtggaacgaccccacctcgaggagcttcctgagcaggtggcagaagatgcgattgactggggcgactttggggtagaggcagtgtctgaggggactgactctggcatctctgccgaggctgctggaatcgactggggcatcttcccggaatcagattcaaaggatcctggaggtgatgggatagactggggagacgatgctgttgctttgcagatcacagtgctggaagcaggaacccaggctccagaaggtgttgccaggggcccagatgccctgacactgcttgaatacactgagacccggaatcagttccttgatgagctcatggagcttgagatcttcttagcccagagagcagtggagttgagtgaggaggcagatgtcctgtctgtgagccagttccagctggctccagccatcctgcagggccagaccaaagagaagatggttaccatggtgtcagtgctggaggatctgattggcaagcttaccagtcttcagctgcaacacctgtttatgatcctggcctcaccaaggtatgtggaccgagtgactgaattcctccagcaaaagctgaagcagtcccagctgctggctttgaagaaagagctgatggtgcagaagcagcaggaggcacttgaggagcaggcggctctggagcctaagctggacctgctactggagaagaccaaggagctgcagaagctgattgaagctgacatctccaagaggtacagcgggcgccctgtgaacctgatgggaacctctctgtgacaccctccgtgttcttgcctgcccatcttctccgcttttgggatgaagatgatagccagggctgttgttttggggcccttcaaggcaaaagaccaggctgactggaagatggaaagccacaggaaggaagcggcacctgatggtgatcttggcactctccatgttctctacaagaagctgtggtgattggccctgtggtctatcaggcgaaaaccacagattctccttctagttagtatagcggacttaataaaagaggaaaaaactcttgcttcaaaaa

SEQ ID NO: 350141 - DNA, 871 bp, Homo Sapiens
  misc_feature (675)..(699): n is a, c, g, or t
ggaaagatggaggaccatcagcacgtgcccatcgacatccagaccagcaagctgctcgattggctggtggacagaaggcactgcagcctgaaatggcagagtctggtgctgacgatccgcgagaagatcaatgctgccatccaggacatgccagagagcgaagagatcgcccagctgctgtctgggtcctgtgagtgcttaggggctgtcactggagtcccctctttgctgagacattcactactttcactgcctaagaatcctggaccttctcaaaggcacagaggcctccacgaagaatatttttggccgatactcttcacagcggatgaaggattggcaggagattatagctctgtatgagaaggacaacacctacttaggtaaagtggcccggcctgggagccctggtatccatggggaagcccactctcagagttctgagataccaggcttataggaggcacagtctgtgagtgggaagagactggagtgtagatgttgcccatttgtaggtggtaaaatcaattgtttttgatggaattgattttccctgagtggagtgctgggggaaggaggaggtccaggccggtagtggccattcgccgtgcctcagcgagcaggtgtgtgtgggtcctccaccactcacctcttggttaagcgggagtgtgctgnnnnnnnnnnnnnnnnnnnnnnnnnattctacacaaggcagaagaggcacggggttttcctggggagcgaatatcaagtgccctgagaagcaactacagggactaaactgtgtttggggtttggggttggtaggtataaataataaataatgggctaaatattttccctggaggcattctacctaaattggccaggg

SEQ ID NO: 350142 - DNA, 697 bp, Homo Sapiens
ccccacccccccagacgccgggaacacggtcaatggcttccccccagggactgctgagccgctgccccaatctcagccagctgactcggcaggtccttcaccagggccagcagttctcctcggacattttcgcccgtgatgccatactgcttgcaggagtggtagaactgctcccgcatctcggcagcccctgcctggcactcctcctccttgcggctgtattcttgctgcagctgctggcacttggcaatctgcttcttcagtgaggggatctcatagttgacattccgaaccaggaggctagagagttccactaagtaggtgttgtccttctcatacagagctataatctcctgccaatccttcatccgctgtgaagagtatcggccaaaaatattcttcgtggaggcctctgtgcctttgagaaggtccaggattcttaggcagtgaaagtagtgaatgtaggacccagacagcagctgggcgatctcttcgctctctggcatgtcctggatggcagcattgatcttctcgcggatcgtcagcaccagactctgccatttcaggctgcagtgccttctgtccaccagccaatcgagcagcttgctggtctggatgtcgatgggcacgtgctgataggtcctccatctttccctcgtgccgattcaacacccagcctcgtacctagcctatcgtt

SEQ ID NO: 350143 - DNA, 546 bp, Homo Sapiens
ggagcctcggccaggtcatcaggcaggggccgctgcagccgggactcaaggacctggcgcagctgagtcattaagtccttctcatctggaacctgggggtaccgccgaggtctcaggacagagtctggtgaggaagggcctgagccactctgagaggaggaacggaagaggaagctgtttggtctctgaatggagccaagtggccgtggagcaggtgctgtcgctggggccggaaccagggacacagcgacaggggcaggtgagacaggcatcccctctgtgtccctctctcccaaccagccctcaccaacacaggccccatcctcctcccaaaatccctgtcccacctggtccagctatgggaaggggctcttgggaggcaggggcaggggcgggggctccctgccccgctgcagcccctgcttgggaggcactggacttaggcgagccgttgtggagagacagaagggaattagagggatgatggtcataggaagaggagtggggaggggatgctggcaggaaacctacttgtgcatggcttga

SEQ ID NO: 350144 - DNA, 434 bp, Homo Sapiens
  misc_feature (13)..(13): n is a, c, g, or t
  misc_feature (21)..(21): n is a, c, g, or t
  misc_feature (84)..(120): n is a, c, g, or t
  misc_feature (348)..(348): n is a, c, g, or t
ggaccggcttggngcccgaanccctataaatatagatcctctctacaaaatagagataatttagcccccccatagcagctgttnnnnnnnnnnnnnnnnnnnnnnnnnnnnnnnnnnnnnactccagctcctgccacacctcacggggtacagagggcaggggcagggccggcggggacatgaaggcaccgtcagcactgagaggtggggactcgtggggctactggagggaggccagaggctgggggcccagggtctgggggcaccagagtggggcctctgaggtcagtgtctgtgaagggggtgcactagtgtctttggttggggctgaaggcaccgcaggtgggngtcgggtggagcagggaccttataaatagagaggaagggaaaggggtgagggagggccgattttggatcccgggaattccggaccg

SEQ ID NO: 350145 - DNA, 1095 bp, Homo Sapiens
  misc_feature (3)..(3): n is a, c, g, or t
  misc_feature (6)..(6): n is a, c, g, or t
  misc_feature (8)..(8): n is a, c, g, or t
  misc_feature (18)..(18): n is a, c, g, or t
  misc_feature (22)..(22): n is a, c, g, or t
  misc_feature (24)..(24): n is a, c, g, or t
  misc_feature (31)..(31): n is a, c, g, or t
  misc_feature (95)..(95): n is a, c, g, or t
ggnaananaggagacccnattncnatgaaanaaaaaaaacccaacaacaagagaggcaggaggtgtaggtgccaggccactgggacccagctacnagagtcagtggtgagcagtggaggcagccccatgcccccctttttctcctaggcccttcctcaccagactctgtcctgagacctcggcggtacccccaggttccagatgagaaggacttaatgacgtcagtgcgccaggtccttgagtcccggctgcagcggcccctgcctgaggacctggccgaggctctggccagtggggtcatcctgtgccagctggccaaccagctacggccgcgctccgtgcccttcatccatgtgccctcccctgctgtgccaaaactcagtgccctcaaggctcggaagaatgtggagagttttctagaagcctgtcgaaaaatgggggtgcctgaggctgacctgtgctcgccctcggatctcctccagggcactgcccgggggctgcggaccgcgctggaggccgtgaagcgggtggggggcaaggccctaccgcccctctggcccccctctggtctgggcggcttcgtcgtcttctacgtggtcctcatgctgctgctctatgtcacctacactcggctcctgggttcctaggccccaaaatcggccctccctcacccctttcccttcctctctatttataaggtccctgctccacccgaccccacctgcggtgccttcagccccaaccaaagacactagtgcacccccttcacagacactgacctcagaggccccactctggtgcccccagaccctgggcccccagcctctggcctccctccagtagccccacgagtccccacctctcagtgctgacggtgccttcatgtccccgccggccctgcccctgccctctgtaccccgtgaggggtggcaggagctggagtctcccccttcctcctgtgccctccccctcccaccacccaaaagctgctatgggaggcgataaattatctctattttgtagagaggatctatattagtaggggtacggggcccaagccgggccctatctctgtgtataactgtacagaccgtg

SEQ ID NO: 350146 - DNA, 2514 bp, Homo Sapiens
  misc_feature (2443)..(2443): n is a, c, g, or t
  misc_feature (2482)..(2482): n is a, c, g, or t
  misc_feature (2489)..(2489): n is a, c, g, or t
agcttcctttgtatgagggctgttgcgcacttccggtggaatgcgctgaagcgagtgggtggagtttacggagccggtgggcggtaggcggtgctacgggtagctgggtgctgtccaaaggcgacagggcgtcgttaggggagcgagtcgtgaccggttgggccacactcaacgtgggacgaagcttcgcctactgtttgactacgtgcgtgcagcctcccctcgatgtcggccctcgaaaagagcatgcacctcggccgccttccctctcgcccacctctacccggcagcgggggcagtcagagcggagccaagatgcgaatgggccctggaagaaagcgggacttttcccctgttccttggagtcagtattttgagtccatggaagatgtagaagtagagaatgaaactggcaaggatacttttcgagtctacaagagtggttcagagggtccagtcctgctccttctgcatggaggaggtcattctgccctttcttgggctgtgttcacggcagcgattattagtagagttcagtgtaggattgtagctttggatctgcgaagtcatggtgaaacaaaggtcaagaatcctgaagatctgtctgcagaaacaatggcaaaagacgttggcaatgtggttgaagccatgtatggggaccttcctcctccaattatgctgattggacatagcatgggtggtgctattgcagtccacacagcatcatccaacctggtaccaagcctcttgggtctgtgcatgattgatgttgtagaaggtacagctatggatgcacttaatagcatgcagaatttcttacggggtcgtcctaaaaccttcaagtctctggagaatgctattgaatggagtgtgaagagtggccagattcgaaatctggagtctgcccgtgtctcaatggttggccaagtcaaacagtgtgaaggaattacaagtccagaaggctcaaaatctatagtggaaggaatcatagaggaagaagaagaagatgaggaaggaagtgagtctataagcaagaggaaaaaggaagatgacatggagaccaagaaagaccatccatacacctggagaattgaactggcaaaaacagaaaaatactgggacggctggttccgaggcttatccaatctctttcttagttgtcccattcctaaattgctgctcttggctggtgttgatagattggataaagatctgaccattggccagatgcaagggaagttccagatgcaggtcctaccccagtgtggccatgcagtccatgaggatgcccctgacaaggtagctgaagctgttgccactttcctgatccggcacaggtttgcagaacccatcggtggattccagtgtgtgtttcctggctgttagtgacctgctgtccacccctcctcaacatcgagctctgttgtaaatacgtcgcaccagaggccactgtgatgccactgtctcctctccatcccgcccagccatgtgacactggctcccggtagacgggcaccccgagatgtaccaaccttttcatgtattctgccaaaagcattgttttccagggcccttgaccaacatcggcttccccagtccagggctcccctgctcctttcccttccctgtactggggtagctcctgcctgctctccctgcgttgcctagggtaaagcctccagatttgccatactgagcccctcttcctagcatcaggcgatacatctgagttcaaatgtcttcccaggctcagggacctcccattccttgagattgtcttggcatggcccagccctgcctcatgggatggacaatgcatggggtggtctttatttttccctttcaaataaaacactagtcaggtaccgttttatcccagtcgtactcttccaggtttggaagacccagagaggccaagatcccatccttagccatagcgagcggtggtggtggatagcatcacaagaaacgagcctgaaaatcaggtccagccggtccaagcacatggcctcccatctgggagagcccactgtcccactcccacatgtctgggcacctgccctgggctgaggccaggctgctccaggggcctcctgcgccctcacctgccacagagcaacccaggttaaatacagcccatgcacaaagccacaggcaaagcctatggaattgtttttaatcatcaaatttaaccattttcataactggttcctggaggtgtgcagtgcccccttgcctcttcaaacctacagcttctctttgccatttgtggatttcacatcactccacacagaaacattacagcctgggcatccccagtctttgccttcttccagctgcctcgacacagcactgtgggcctgtccctattggcccaggcacgccatttccaaggggcaggaaaggggcagtgttcctggaaggcccatctttttttgtgaantgtctttagggtgatgtgtaaggccccttccaccttttnccatttnaacaaccttcccacccttgttcctg

SEQ ID NO: 350147 - DNA, 495 bp, Homo Sapiens
cctgcgccctcacctgccacagagcaacccaggttaaatacagcccatgcacaaagccacaggccaaagcctatggaattgtttttaatcatcaaatttaaccattttcataactggttcctggaggtgtgcagtgcccccttgcctcttcaaacctacagcttctctttgccatttgtggatttcacatcactccacacagaaacattacagcctggcatccccagtctttgccttcttccagctgcctcgacacagcactgtggcctgtccctattgcccaggcacgccatttccaagggcaggaaggggcagtgtcctgaagcccatcttttctgtgactgtcttaggtgatgtgtagccccctccacctttccactcaacaacctcccacccctgtcctgctgcatggtccggagtctgggacctactttgttttttgttatttatgaccttgtttaaagaaaataaatatctcccaacctttaaaaaaaa

SEQ ID NO: 350148 - DNA, 870 bp, Homo Sapiens
  misc_feature (594)..(649): n is a, c, g, or t
  misc_feature (809)..(809): n is a, c, g, or t
tttagatatttagttatactcaataactaaatatcaatactcaatatctgtttcttctgaatttcagagtagttagaatgtttttcttaagactttgctagaaaggagctggtttgttagtaattctgccatcaactcatggagttataattgccaaatgagttaatttttatataccttaagctatcttgcctacaaaaagtaaaataaggcaggattcataaatgttacttgtaaattgagtgtttcacatgaggccaagtatgattttaacataatgaatatcattgctcctcatctgtaaatttgctgctgctttcatatgtgtatctgtacatagagttatgaatgaaaatccagtaatgccctaaagcaactttcttccatagggtcaaagctcacttaaggtaaacgtgtgaaaaaagtgactgcagtgtgtttgaaaccacaagctgtttctatgtcataaattaacatcagcttgcaagtctctgaaagaaccactcatttgtaattggtatatatgtcacaacctcccacattcctttagcccatctcagggaattattgaaacgctggcagggttagtttcannnnnnnnnnnnnnnnnnnnnnnnnnnnnnnnnnnnnnnnnnnnnnnnnnnnnnnnatcatttgtttgctcctgtgtaagcttaatatataatggcagtttggcatctgttcttcgcacatgtctaacccaggcagagttatgcaaaaatgatgacttcattttagggtcaaattgggctttgttcccagttcctcattgttgggtcactttgttncagttctgggtggactcatgggtgatgttggatggaaactgctcagcctgccagcgggggg

SEQ ID NO: 350149 - DNA, 1159 bp, Homo Sapiens
  misc_feature (767)..(767): n is a, c, g, or t
  misc_feature (910)..(955): n is a, c, g, or t
  misc_feature (1043)..(1062): n is a, c, g, or t
  misc_feature (1068)..(1113): n is a, c, g, or t
cacacccctgccccttccttgtgatcacacccctgccccttccttgtgatcacacccctgcccccttccttgtgaaagacctcagcggggaaacgctccgggccacgcccactccccttatcccaattccgcgtgctggtcccgcacacggtcatccggtttctgtcctgtggtctccagtcctggggcaccctagaggcagagcaggggattccatcaaaggacccactgagaccccagcatggccctgcccgagatgccctgctgcccacggagtcctggcttcccctggtgtggccgggcagggccgagatcgcaggagggggctgccctgacctttcccagtgttcaatgtgtgtgtcttgcgttctactccggggttggtggcggcaggtctgtccccagcattctcgctctgggcagaaccctcgggaccctccgctgtcgtgtgtctgagccacccctgcagcttcacagggcccctgcacacctctgcccactcagtgtgccctgtcagccctgtccttgtcgtagccccagccctgcagggctgagagcaccacagatgctgggggctgctctggactttggggatggctgtcagcctcagagggccaatggggggctttcacgggcccaaggcttgggaaaatgcccagacatcctttagtgaagactcgacttccaaaaccagccaccgctgggactggattccactccagtataggcacttagcaacacgaaggtttattcccaaaagaaagggngctgacagacgggagattctcatggacaaaatccttttccctttttctcgcctccatgaacatctgggtaccaagcccctgactcaaaggacagatgtgggatgacagcaagacttctgtggaaagcaaggggcccgtccctnnnnnnnnnnnnnnnnnnnnnnnnnnnnnnnnnnnnnnnnnnnnnncacagcttttccttccctccctttttccccctggccgggggaccctggggcacccccccaaaaacacgaaaaacccttggggcttatnnnnnnnnnnnnnnnnnnnnaacacnnnnnnnnnnnnnnnnnnnnnnnnnnnnnnnnnnnnnnnnnnnnnnttcaccacctggccacccccacaaaaacgggggttataccccccct

SEQ ID NO: 350150 - DNA, 2331 bp, Homo Sapiens
  misc_feature (972)..(972): n is a, c, g, or t
  misc_feature (980)..(980): n is a, c, g, or t
  misc_feature (996)..(996): n is a, c, g, or t
  misc_feature (2250)..(2250): n is a, c, g, or t
  misc_feature (2264)..(2264): n is a, c, g, or t
  misc_feature (2276)..(2276): n is a, c, g, or t
  misc_feature (2294)..(2294): n is a, c, g, or t
  misc_feature (2301)..(2301): n is a, c, g, or t
  misc_feature (2316)..(2316): n is a, c, g, or t
tgaagaggcatttgagaccccggagtcaacgacccctgtcaaagctccgccagctccacccccaccaccccccgaagtcatcccataacccgaggtcagcacacagccacccccggaagaaccaggatgtggttctgagacagtccctgtccctgatggcccacggagcgactcggtggaaggaagtcccttccgtcccccgtcacactccttctctgccgtcttcgatgaagacaaaccgatagccagcagtgggacttacaacttggactttgacaacattgagcttgtggatacctttcagaccttggagcctcctgcctcagacgctaagaatcaggagggcaaagtgaacacacggaggaagtccacggattccgtccccatctctaagtctacactgtcccggtcgctcagcctgcaagccagtgactttgatggtgcttcttcctcaggcaatcccgaggccgtggcccttgccccagatgcatatagcacgggttccagcagtgcttctagtacccttaagcgaactaaaaaaccgaggccgccttccttaaaaaagaaacagaccaccaagaaacccacagagacccccccagtgaaggagacgcaacaggagccagatgaagagagccttgtccccagtggggagaatctagcatctgagacgaaaacggaatctgccaagacggaaggtcctagcccagccttattggaggagacgccccttgagcccgctgtggggcccaaagctgcctgccctctggactcagagagtgcagaaggggttgtccccccggcttctggaggtggcagagtgcagaactcaccccctgtcgggaggaaaacgctgcctcttaccacggccccggagcaggggaggtaacccatcggatagcggggggcaagaggactctccagccaaagggctctccgtaaggctgagagtttgactattctgaggacaanagtagttngggacaaccagcaggnaaaacccccctcctaccaaaaagataggcaaaaagccagttgccaaaatgcccctgaggagggccaaagatgaaaaagacacccgagaaacttgacaacactcctgcctcacctcccagatcccctgctgaacccaatgacatccccattgctaaaggtacttacacctttgatattgacaagtgggatgaccccaattttaaccctttttcttccacctcaaaaatgcaggagtctcccaaactgccccaacaatcatacaactttgacccagacacctgtgatgagtccgttgacccctttaagacatcctctaagacccccagctcaccttctaaatccccagcctcctttgagatcccagccagtgctatggaagccaatggagtggacggggatgggctaaacaagcccgccaagaagaagaagacgcccctaaagacggtgaaaaagtcgccaaaacggtctcctctctctgatccaccttcccaggaccccaccccagctgctacaccagaaacaccaccagtgatctctgcggtggtccacgccacagatgaggaaaagctggcggtcaccaaccagaagtggacgtgcatgacagtggacctagaggctgacaaacaggactacccgcagccctcggacctgtccacctttgtaaacgagaccaaattcagttcacccactgaggagttggattacagaaactcctatgaaattgaatatatggagaaaattggctcctccttacctcaggacgacgatgccccgaagaagcaggccttgtaccttatgtttgacacttctcaggagagccctgtcaagtcatctcccgtccgcatgtcagagtccccgacgccgtgttcagggtcaagttttgaagagactgaagcccttgtgaacactgctgcgaaaaaccagcatcctgtcccacgaggactggcccctaaccaagagtcacacttgcaggtgccagagaaatcctcccagaaggagctggaggccatgggcttgggcaccccttcagaagcgattgaaattacagctcccgagggctcctttgcctctgctgacgccctcctcagcaggctagctcaccccgtctcttctctgtggtgcacttgactatctggagcccgactttaggcagaaaaggaaccccccactatttcgctcagaaactccagagagaggctggttcacccaacagacgttttcattttcaaaaacaggctttttatttccggattnggaccgtttaggtnggagaaacttgnaggcttttttttcagagnccgaatngggtttgccttcagnttgcagaggagggtt

SEQ ID NO: 350151 - DNA, 1028 bp, Homo Sapiens
  misc_feature (46)..(82): n is a, c, g, or t
atgtatagactcactatagggcgacccgggtcacgcggggcggcgnnnnnnnnnnnnnnnnnnnnnnnnnnnnnnnnnnnnnatcaggccaaatcggccgagctcgaattcgtcgagagcggatttttcggggcgaccatcttcttggcgtagagttttcagattgctcttgggaaccatgccgaaagtagtgtctcggtcagtagtctgctctgacactcgggaccgggaggaatatgacgacggcgagaagcccctccatgtttactactgtttgtgcggccagatggtcctagtgctggactgccagttagagaaattgcccatgaggccccgggaccggtcccgtgtgattgatgctgccaaacatgcccataagttttgtaacacagaagatgaggagactatgtatctgcggagacctgaaggcattgaacgacagtacaggaagaaatgtgcaaagtgtggactgccgctcttctaccaatcccagccaaagaatgctcctgttaccttcattgtggatggagcagtagtcaagtttggccagggttttgggaaaacgaacatatatactcagaaacaagagcctcctaagaaggtgatgatgaccaaacggaccaaagacatgggcaagttcagttctgtcaccgtgtctaccattgatgaagaggaagaggagattgaggctagggaagttgctgactcatatgcacagaatgccaaagtgattgaaaaacagctggagcgcaaaggcatgagcaagaggcgactgcaagagctggctgaattggaagccaagaaagcgaaaatgaaggggaccttgattgacaaccagttcaaataaccaggcctttttctaagccctagactagaggcaagcatttagatcaggaggcaaagtaatttcttgattacatagacggattcctatttatgccctagcagaaggctttacgttgtttcccattgattctcctacattcagtgaggtctttaactgagtccgtttactctttgggtaccga

SEQ ID NO: 350152 - DNA, 517 bp, Homo Sapiens
  misc_feature (398)..(452): n is a, c, g, or t
cctgagtagtccggccttgtcaatgagtgcttgttttcctttaaacagtctgacatatttactcgtcactttcaaaccagaagcatgagaggaaggagatattgtggggtccgtttaactcgaatagaaagcgcagggggatggcccccggcgcgggctcttgacccgctcagcgctgaccccaccgccctggccgaggcacttgcccttgctgagctggacttcccctctcctcctcctcatgaccggggtgaattagaacgtttttaaagacacccccttccaaattctgtaacacattgtaattggagaagaaggaaactctgcaaggctaaactgtcattcacaacttggctacacatagactctagtcagttttgtctccagaaccttaggcnnnnnnnnnnnnnnnnnnnnnnnnnnnnnnnnnnnnnnnnnnnnnnnnnnnnnnngatgttggaaaagcaggaggtagttgtgcctcaattattgcaaaaatgtaacaataaagttcctc

SEQ ID NO: 350153 - DNA, 2893 bp, Homo Sapiens
  misc_feature (1583)..(1583): n is a, c, g, or t
  misc_feature (2653)..(2662): n is a, c, g, or t
actgtcccgttagctactgaatcctgggggcgagtgaaactactgaaaatccgagtgatgatgttgtaaatacggaacacctaatcacacagcttgctttgcttttacagaaacgttcctctttttctgacgcagtttgaggaccgtgttgtgtgtgtatgtgtgtacacacgctctgtctttaatgacagaaacacaaaaaccagctggccttgcagacggcttttctaactcacaagtcttccctgagacagactaacctgaaagctttgcctaacagtagcttgtagagatccagtgcacgccgatgctgctaaactcagtgcctgagcccggccctgcagccccagccgcagtgtctgaaggccacctcccaaagggagcacgttgccttttcaaactcccgtgccgatttcctaagagcccctagtccaagcctctcagatgaagctgaggagccgtgcctaggatcccttcccagctctgaggacgggctgcagagctctgcaggtgtggattcaccttacgcccctacagcaggctcagcccttcccaccctgccccatgcccagcagcacaacacggagtgagacaggatgcccacggtgactgccgctccgtccgtgcacacacagcggtgctcttctccccttagccacccactgcccaacccaacggcaaagacacagaaaccaggtccccttgcagacggctctcccatcttcctgcaagtcatctgctcacacacagttggcagcacatagcgtttccttctttcagaaacattcctcttctggggcttcagaaagctggcaaggccactagcagagcttttgttaatgccccagctgcttggcgagctaacagctgacctttcgggaagcccacagacgctggaggaatcttgagtttctccaaactgccgctccaccagtgcctttggacagccgtgcctgttcgccgctctccctaagtctgattctcatcgaggcccctcgcttctatgactgtgcttgcagaagagtaaacactctcggatgccgctgtcctgggggagcccgcgggagcctgtgaatgttgatacgagctggccagtcctgggcccagctcacttgtccagctacctgccaggtggctttcactgtgtttaaaatacattgcattccaagctggtcccctctgtgtatcactctactgagaaatcctgcctagtgtgttttgggatgtgtcctagcatttacaagaaaatgaaaagcgtcctcttaattggcacccgaatgttgctgtggctcagtcacatatcccagggccctcgtcccgaggccgtgctgccccgagccccgagcccctctgcagctcacccttggcttgttttccgcaaacccggtaaacgcaagcccttggggcagatgcagaagcagaagagggaggggaaacctgcctctgggtcaccctgttagcacagcgttctcatcgggagacagcatggaactctctctcgcagtgctcgaggctgtgtgtcagtgtttgctgggcttgtggctccttttttgggctggataaagaagttcgctgtttttgtnactgcttctgtggctcttcacagacctcacggatgtgaccggagatgagtgccgatgaccacgttttaaaggagaaagagagctcctggtggggccctcggggtggtctcaggtcacatttgcagtctgcaacagtgacgcgcagcccggtccggagcgtggtgagctttgtttgccttctgggtcggctttcgctgtgtctcctgtgtgtgttagaatccagagcccagaggaagtgcaagcgggtcctccgccaacggggagagcctcttcgcggcgctgttggcgacagcagcgctgtgattcgcgtagcaggggagttgtttgaaacaccttcctgagtagtccggccttgtcaatgagtgcttgttttcctttaaacagtctgacatatttactcgtcactttcaaaccagaagcatgaaaggaaggagatattgtggggtccgtttaactcgatagaaagcgcagggggatggcccccggcgcaggctcttgacccgctcagcgctgaccccaccgccctggccgaggcacttggccttgctgagctggacttcctcctcctcctcctcatgaccggggtgaattagaacgtttttaaagacacccccttccaaattctgtaacacattgtaattggagaagaaggaaactctgcaaggctaaactgtcattcacaacttggctacacacatagactctagtcagttttgtctccagaaccttaggcttttgtattttttaattttaatttcactgttaatccttattgtcttttttattaagatgttggaaaagcaggaggtagttgtgcctcaattattgcaaaaatgtaacaataaagttcctcaaaataagatctgttcctcatagctatactgtgtacacataagacgcatatagggttttactgaaatctatttttaactcttatgttcgtagagaaattgtttcaaggattttgagtcataggtctgtaatttatagagatctctagaattcttattgtaattttcctacttctttgataaaagaaaaataagtcagattgttaactccaagattgnnnnnnnnnnctcttgaaagaagattattagttgtaactaatttgggggttctgggcacagacatctaacctggtattgtaaggcagaggctcccattggaatggtagtggtccgggtcagttgttcatggtgtaagctttgcacagtgtattaacattgggagggtctggcttgaaaatttggccaccctcagcctctgaatgtttattaaaataaatttagtctttctttgcttaatat

SEQ ID NO: 350154 - DNA, 601 bp, Homo Sapiens
  misc_feature (100)..(100): n is a, c, g, or t
tcaatgagccaatatatccaagatacttacgtgccacaatttaataaatgttagctattcctgttgaagcataactttggagaaaggttactttacaggngggtgaggagtggggaagtgagagctgagctcattcttgatggatgaggagttagtcatgtgaggcgcttaggttaaaactacattcactataactcagtaaagcagtcccgcccactctccgacccatgcagaaataggcctagagagtcacatctctcagttcagaaatctatcaaagtggcagagctggaattcaaacgcaagcagccgttctctgctattccaccctggtgtccaagcaacatggtagaggcagaaggaagaggatcttacaaagagtaagagaaagggagaggggcagaggctgcttctcagagccaacaaaggacaaaacaagacaggtgtgagcccagtggaggaggcacggggcagagaccagccactgttgctggcacactggtgcacgcagcaccgtggcagatggacctggagagaaagcaggagggacagcacaatggaaccaagaaaggacttagcatggccgggcgcggtggttcat

SEQ ID NO: 350155 - DNA, 3489 bp, Homo Sapiens
  misc_feature (2419)..(2601): n is a, c, g, or t
ggcctgggtggcgaattcggcacgaggacttactgctttgtgaggttgtgagtggccaccactgaaggtctttgagaagaggccagacgccgctgtagccaggcctgttttaagaggacttgtgcttccagggacccaggcaggatgatggcgcagctcttcctactccaagccaacgctgtccttcccctttcccatgaaatcaaggtcaagaggcaaataagactccctgctccactctaccccccagagagaaatgattctcgctcctttcagatcccccaggatctgagggagaaaggatgggaggaggggcagcagcatttcgctggaaaggcagcagatgcttttccagccccggttcagctggaaggcttggaggccggccagaccactctggcgtctcctgaagtgggtccctggagaccgaagaggctcagtggagtctgtctgttgtcagcactgctgcctgatccctgcaagacaaatggcactttccttcttcagaagcatcatctgccttcattattagcagtaatattattcccagttattattcttaccggtgccagttttgcacatctttttgttgctctatttgtgtctcatttacttctcaaattgcccctgggggcaggaatgaggatgcagagagatgcacgttaattactgtcgcatttttctgtggagaaaactgaggccagggctgaacgctcacagctaaagagctgtgattcagacccagttctgtcagctctagaggcaccctgcatcatgcccaccagggtgatccccctgggatggaccatctcgggatatgaggcctcggaggctggggttgagatttggtcctgaagagcttatagccagattgccacattcaagtgtaagtccaggaaaggggcaggcggcagtgcacagggatttatcagttccagaacctcacagtgataagaggctttagagagcatctaatcgagacctttaatttttcggggagagcagctgaggccgtgtggaaaattagtggagagctgacaagtgtctgggctcctggcccaggggtccgtggtccagcacgttgtgcgttcagtgggaagcaaagggcttgcccgggattacctgccccagcccctaggtgggttgtgctccctgcagctgccatcggcccgctttgcttcgtcctggcagatgcccagtgattgtccccgagcaagtgccagggttgggctgagctgctatgacagggaggcccagggagttctgctcagggagccaaagggaacagccagatcctgaatgttctatgttcacctgccccagccccacccaccctggcccactccacaggcccctgaccatggtcactcacggagagggatggaggagaaggtggttgaactgagtactgagaacccagaggacagagcccacagcttccaagcaggaaaagggacctctctgaaaaatctggataaccagaattatcacagcaccttctcattcccagcgcgtccttctgagctcagaccttgagcatttactgggtttctttttgaggaagagggaaagtgacaaaggacaaaacaatgcaaatcttcatgactgaagacgatcaaagactccctggagcgagaaaacagttactgccagaagcagaatggaagagccaaaaagtacacaaaatggacgccataaattctgaaataaaagtgtatgatgtgttctgagtcactgtagaagtcatgcatttattatcaagatagaaaagagcagagaatgacgtggacattggtcctcggagaggctgcgtaggtggtgcggtccccgggggattctggatgctggtcttttgaccgtggcggcagcctcgcgcctgcccggatggctccatccagacatttggcaaggctgtcatctgctcttgggtcctttttcaagctgatttcctgcctccccaagaggaggtttgagccccattctgccttggaaataaatcctgacagatgtgcacagcatatttgcagggaatttgcaggcctcgattattgggggaatcagagcccattccacaccgagccccatccacgtggctgagcaacacccctgtgtcccctgtatctgtctcactggctgtctttctgccagtttcttaaagaaccacaccattactgcgtttgccgttcgaagcgttgtcccaacaatgcagatggttctgacaagggctctatatgctggcagaagggagcttccaaccttttaacttgaggaaaatgaatctctgagaggcttgagagtgttgccaggtggagcttttcaggagacaggggtcttgagcccaggacacctaactatcgagttttcactaggagacttagtggtggctttcatgaggccagtcgttctcaaggaagggctnnnnnnnnnnnnnnnnnnnnnnnnnnnnnnnnnnnnnnnnnnnnnnnnnnnnnnnnnnnnnnnnnnnnnnnnnnnnnnnnnnnnnnnnnnnnnnnnnnnnnnnnnnnnnnnnnnnnnnnnnnnnnnnnnnnnnnnnnnnnnnnnnnnnnnnnnnnnnnnnnnnnnnnnnnnnnnnnnnnnnnntgctggccatcctatctctgattctgaaactatgcatgctttccacttttccccatttgtgagtcattgagtaaattaaagctcttctgagcagcagcagtgatcatggtcactgccctgcgttcaaataatgcgagctgaggacagtgatctgcaactcccagcatgtcatgtggtctcttagaaatccatgtgactgtttccaccatcttgggcatttgtggggacccccagactggagggagaaagccctacaaagtggatgggagtgtggggctgaacttttccctacccttaactttgtgtctctgggacctccagggacctggcccctcaccaatgcatatgaagagtatgcttggggaagagcttaggaatggggtgggcatgggactgctgggtagcagcctttgagcaaatctgcatcttctcttatttctgacctttttccacgtgcccagtcctatttctgccagttgaaggcatactaatattctttatactatttaatcttttgcagaaaccttactattataacttgctactctccagataccaattcttcatgccgagagcatcggaaatgtttttgtgtcttactgatgttttcatgatcaacttgtaaatgtaagcagttgacttcataaaaggtattttaactattcttggagtcctttgctacccaagcacctggtttcaccatgcgatcactgacttctctacagtgaagactctttcttaatataggatttcgctgtgctcttttgattaaaaatatctaaccttaaaagacgtaaaaatgtatctgtgaaatctcactttgttagcgttgctgctgttgtcattttctattatgataactgaaaagagaaaagaagaaaacataaa

SEQ ID NO: 350156 - DNA, 528 bp, Homo Sapiens
  misc_feature (501)..(501): n is a, c, g, or t
tgatgtgttctgagtcactgtagaagtcatgcatttattatcaagatagaaaagagcagagaatgacgtggacattggtcctcggagagcttgcgtaggtggtgcggtccccgggggattctggatgctggtcttttgaccgtggcggcactcggcgcctgcccggatggctccatccagacatttggcaaggctgtcatctgctcttgggtcctttttcaagctgatttcctgcctccccaagaggaggtttgagccccattctgccttggaaataaatcctgacagatgtgcacagcatatttgcagggaatttgcaggcctcgattattgggggaatcagagcccattccacaccgagccccatccacgtgggctgagcaacacccctgtgttcccctgtatctgtctcactttggcttgtcttttttcccagtttccttaaagaacccacaacatttactgcgttttgcccttcgaagcgtttgttcccaacaatgnagatgggtttttgacaaggggtttata

SEQ ID NO: 350157 - DNA, 661 bp, Homo Sapiens
  misc_feature (49)..(49): n is a, c, g, or t
  misc_feature (67)..(67): n is a, c, g, or t
  misc_feature (78)..(78): n is a, c, g, or t
  misc_feature (324)..(324): n is a, c, g, or t
  misc_feature (616)..(616): n is a, c, g, or t
  misc_feature (619)..(619): n is a, c, g, or t
ccccaccctactggggcaattgtggggaacccccccaaaatggaggganaaaaaccccctaacaaantggaaggggantgtgggggcctgaaacttttccccctacccccttaaactttgtgtcctcctggggaccctcccccgggaccccggcccccctcacccaatgccatatgaaagaagtatgccttggggaaagagccttaggaaatggggtgggccatgggaagtgcctgggtagccagccctttgaagcaaaacctgccatccttcctccttatttcctgaacctttttccccatgtgcccccagtccctatttccngcccagttgaaaggccatacctaatattcctttaatacctatttaatcttttgccagaaaccttacctattataacttgcctactctcccagataccaattcttcatgccgagagcatcggaaatgtttttgtgtcttactgatgttttcatgatcaacttgtaaatgtaagcagttgacttcataaaaggtattttaactattcttggagtcctttgctacccaagcaacctggtttcaccatgcgatcactgacttctctacagtgaagactctttcttaataaaggatnttngctgtgctcttttgattaaaaatatctaaccttaaaagacgt

SEQ ID NO: 350158 - DNA, 396 bp, Homo Sapiens
  misc_feature (355)..(355): n is a, c, g, or t
  misc_feature (370)..(370): n is a, c, g, or t
  misc_feature (384)..(384): n is a, c, g, or t
tctgccacttatccaagtccactagaggccactgtcttcaaagcttctctcaccctagccaaaggtcctaagaggagacagctgtgaagttgggcgtgctctgtggtaccagctgtgacttttctatttctcctagttttaggttgttcatgaaactagaaatgtcatcctgcttgatttttcatcagccaagttaaacccctgctttctgtcctttgcaccttttgcgtgaacagaatatgcattattaaagcaaaaataaataaaagtaaaatgcaaatgaaaacaagggagggaaagttgtattatttcctgcactgggttacccgtgtgtgttattcgttttaaactgtanttcacataatgtccntttgccttgctcanttgttaacccct

SEQ ID NO: 350159 - DNA, 2563 bp, Homo Sapiens
gggagagagacttgcagttctcggagagcacggaacttattcctgcccagagttcagacacagccagaaattaccatttcatacttcacagaatggaggtttcagcagccaaagccccaagtgccgcagacttgtctgagattgaaataaagaaagagatgaagaaagaccctctcaccaacaaagctccagaaaagcccctgcacgaagtgcccagtggaaactctttgctgtcttctgaaacgattttaagaaccaataagagaggcgagcgacggaggcgccggtgccaggtggcattcagctacctgccccagaatgacgatgaacttgagctgaaagttggcgacatcatagaggtggtaggagaggtagaggaaggatggtgggaaggtgttctcaacgggaagactggaatgtttccttccaacttcatcaaggagctgtcaggggagtcggatgagcttggcatttcccaggatgagcagctatccaagtcaagtttaagggaaaccacaggctccgagagtgatgggggtgactcaagcagcaccaagtctgaaggtgccaacgggacagtggcaactgcagcaatccagcccaagaaagttaagggagtgggctttggagacattttcaaagacaagccaatcaaactaagaccaaggtcaattgaagtagaaaatgactttctgccggtagaaaagactattgggaagaagttacctgcaactacagcaactccagactcatcaaaaacagaaatggacagcaggacaaagagcaaggattactgcaaagtaatatttccatatgaggcacagaatgatgatgaattgacaatcaaagaaggagatatagtcactctcatcaataaggactgcatcgacgtaggctggtgggaaggagagctgaacggcagacgaggcgtgttccccgataacttcgtgaagttacttccaccggactttgaaaaggaagggaatagacccaagaagccaccgcctccatccgctcctgtcatcaaacaaggggcaggcaccactgagagaaaacatgaaattaaaaagatacctcctgaaagaccagaaatgcttccaaacagaacagaagaaaaagaaagaccagagagagagccaaaactggatttacagaagccctccgttcctgccataccgccaaaaaagcctcggccacctaagaccaattctctcagcagacctggcgcactgcccccgagaaggccggagagaccggtgggtccgctgacacacaccaggggtgacagtccaaagattgacttggccggcagttcgctatctggcatcctggacaaagatctctcggaccgcagcaatgacattgacttagaaggttttgactccgtggtatcatctactgagaaactcagtcatccgaccacaagcagaccaaaagctacagggaggcggcctccgtcccagtccctcacatctgtgtctgacaacaaagcatccctgccgcccaagccggggaccatggcagcaggtggcggtgggccagcccctctgtcctcagcggcgccctcccccctgtcatcctctttgggaacagctggacacagagccaactccccgtctctgttcggcacggaaggaaaaccaaagatggagcctgcggccagcagccaggcggccgtggaggagctaaggacacaggtccgcgagctgaggagcatcatcgagaccatgaaggaccagcagaaacgagagattaaacagttattgtctgagttggatgaagagaagaaaatccggcttcggttgcagatggaagtgaacgacataaagaaagctctacaatcaaaatgaatacttgatcaatgaaatgtcacattattcatcctgagtccgagactcaaattttctgccccagccaaaataatcttgtgccaaaagattaaaggtttgcctcaaaatgtccctgtttgaaagattagcacaaaagtcttgatagcacaacacaaattccatccaagaggagaatcttccccagggtttagtcctggggctggcactcgttgtgacttacacagagcaaaattgtgctaaaggcttttctactctgagatctcaatgcgaaatgaaaactcaggcagtttagtccatagtggtactattttgatgatattttccattaataaaatgtaatttcagattattcgtttacaagctttataattttatgattttttaatcgtgttttgtcacagacttccctagtgtttgtactacacgtagtcagaagcgagtgtccttttcttttgcttcaggctaagagctgcctcgctctttgtccccccattaggattctattacatatgcaattgtaggttcaacctgtccctttccctgccagcaaaccccaccaccctaagagaaattttagcttatatatgacggtatatttacaaaaagagaaagagaaaatctggtatttgcaatgatctgtgccttctttttaccaccctcttgattggagcttttgtgatgcagctaccatgattcaaaaaaattaaaaatta

SEQ ID NO: 350160 - DNA, 1332 bp, Homo Sapiens
  misc_feature (1258)..(1266): n is a, c, g, or t
ggaactgaacagaggaaggaccagaaatgcttccaaacagaacagaagaaaaagaaagaccagagagagagccaaaactggatttacagaagccctccgttcctgccataccgccaaaaaagcctcggccacctaagaccaattctctcagcagacctggcgcactgcccccgagaaggccggggagaccggtgggtccgctgacacacaccaggggtgacagtccaaagattgacttggccggcagttcgctatctggcatcctggacaaagatctctcggaccgcagcaatgacattgacttagaaggttttgactccgtggtatcatctactgagaaactcagtcatccgaccacaagcagaccaaaagctacagggaggcggcctccgtcccagtccctcacatcttcatccctttcaagccctgatatcttcgactccccaagtcccgaagaggataaggaggaacacatttcacttgcgcacagaggagtggacgcgtcaaagaaaacttccaagactgttaccatatcccaagtgtctgacaacaaagcatccctgccgcccaagccggggaccatggcagcaggtggcggtgggccagcccctctgtcctcagcggcgccctcccccctgtcatcctctttgggaacagctggacacagagccaactccccgtctctgttcggcacggaaggaaaaccaaagatggagcctgcggccagcagccaggcggccgtggaggagctaaggacacaggtccgcgagctgaggagcatcatcgagaccatgaaggaccagcagaaacgagagattaaacagttattgtctgagttggatgaagagaagaaaatccggcttcggttgcagatggaagtgaacgacataaagaaagctctacaatcaaaatgaatacttgatcaatgaaatgtcacattattcatcctgagtccgagactcaaattttctgccccagccaaaataatcttggtgccaaaagattaaaaggtttgccctcaaaaatggcccctgttatgaaaagattagccccaaaagtccttggttggccccaccccaaatttcccttcccaagaaggaagaaatctttcccccaggggttttagtccccggggggttggggaccccctttggggggccttttccccggaggccaaaaatttggggcctaaaagggcctttttcccaccccccggaaaaattctcccaagggggaaaaaatgggaaaaaactctccnnnnnnnnntttttaagccccccaaaagggggggaaccaaatattttggaggggaaaatatttttcccccctttt

SEQ ID NO: 350161 - DNA, 844 bp, Homo Sapiens
  misc_feature (611)..(652): n is a, c, g, or t
gtcccattgaactgttgcaacaaatcagaaatccacataaaagtgctcttcctgcctgggcagcaacaaccaagaacaaagccccgggactgttttctttttaataaagccacaggcaggcatcgtagctccacagcccgaggggacacaggatggaaaccccaggatgagaagggagcagggagagttccagaaagggggatgaaataggagtattaaaaagctgcgttggtaagtttttcatggaaccaagatttgacaaaggcatctcttatccttggttttaaattcctgctgggagcaaggcctggtatgagcgccctgggtcttgtttttggtgtttcgcttttctgtaaggattaagcagatagggagaagggaaaaggggcctcactttagaatgaatgagtcaccttgtgatttttaaatttttattttaataaagctaatcaatttctacaaccttgtcacatgtagctgagtctgggatgactcagtggatcagtggatgcgtggaaggttttggtgtttataactcatgacccaaatccttccaagacacaaatgaagctaatcttcttcccctccctttcctctcccacttcccctcnnnnnnnnnnnnnnnnnnnnnnnnnnnnnnnnnnnnnnnnnncgcgcgcgcgcgtgcatgcagagaggaaggaagggagctttagcacaagtagctacatagtgttcaaggatcagctttcttgaactccgaggcttggttgcctttgctgaactccaagttagtggattgcagaatggaaacttggcctttgcggcactgggtgagttttagtttgtgtgtgtcttgctgggg

SEQ ID NO: 350162 - DNA, 438 bp, Homo Sapiens
  misc_feature (80)..(191): n is a, c, g, or t
  misc_feature (403)..(403): n is a, c, g, or t
tgggctcaagcgattcttccgcctcagtctccccagtaattgggaccacaggtgtgcaccaccacgcgtggctaattatnnnnnnnnnnnnnnnnnnnnnnnnnnnnnnnnnnnnnnnnnnnnnnnnnnnnnnnnnnnnnnnnnnnnnnnnnnnnnnnnnnnnnnnnnnnnnnnnnnnnnnnnnnnnnnnnttctgagagatacccttgtcagatttttcatgggaagcttctgttttccacagagctttgggagcagcatttactgcacaaattccacaaagggggagaactgaggaactattcatattcttatttctgaatgattacttgttttcctagaaaactctggcattttggttgcaagtattctaacttattatcatacagttaacatgatatcnggttatctctaggtattccaagaatttggtggaat

SEQ ID NO: 350163 - DNA, 475 bp, Homo Sapiens
ccagccgcatggcactgggccccacccgccgtcgcagccactcggcaatgccctcagcgtcccgtggtcctgtgtactcctccgggtgcgtgcggttcccattgcggaagaacttgagcgtagggtactccgtcacaccaaactcctcagccagctcgcgctgcgcgggcccatccaccttggccagcgtgaccaccattgactcggccgcgagcacggcagctgccttgctgtactcgggggccagggcctggcagtgcccacaccacggggcatctgggggatggggccgtgagtgccccaggccaccacaaccccaggagcaccctctccacacctgacaacccagcagggaacaagcgtgctgctccattctgccctgagccctggccgtggacaagccgagcaccagtgcctcttcgtggccccccaggctgcagcacagggaccagtaaggcttgggagagcttgaaag

SEQ ID NO: 350164 - DNA, 798 bp, Homo Sapiens
ctgggcctgtgtgccacgtggcagctgctgcttggcttctggcccccttacctgcccccgccccacgcgccctggcagcaccatgagccgccagcttctgcctgtactgctgctgctgctgctcagggcttcgtgcccatggggtcaggaacaggcagcgaggagcccctcggaggagcctccagaggaggaaatccccaaggaggatgggatcttggtgctgagccgccacaccctgtggcctggccctgcgggtagcaccctgcctctgctgtgtggatattctatgccccgatggtgtggtgcatctgccagtgccctggcccccgagtacacgtaaggcagctgccgtgctcgcggcctgagtcagatgtgtggtcacgctggccaacggtggatgggcccgcgcagcgcgagctggctgaggagtttggtgtgacggtagtaccctacgctcaagttcttccgcaatgggaacctgcacgctcccggtaggagtacacaggaccactgggaacgctgtagggcattgccgagtggctgctacggcgggtggggcccagtgccatgcggctggatggacgaggcggccgcccatggctgctgatcggtggccgggacctagtggtcgattggcttcttccaggacgccctggacattgacctttggcctcaacatgaccggccgcggctctttcagcagtttggcctcaccaaggtacgctgtggttctcttcaagaagtttgatgaggggcgggcaacttccccgtggacgagagcttggctgaactggggca

SEQ ID NO: 350165 - DNA, 2260 bp, Homo Sapiens
  misc_feature (58)..(59): n is a, c, g, or t
cttattttttttaaatccaccccccgcccccggtgccacgaactttaggggtaggggnngggaataattcaaaaaggggttgctcggatccgggactgccgcagggggtgccacagcagtgcctggcagcgtgggctgggaccttgtcactaaagcagagaagccacttcttctgggcccacgaggcagctgtcccatgctctgctgagcacggtggtgccatgcctctgcaactcctcctgttgctgatcctactgggccctggcaacagcttgcagctgtgggacacctgggcagatgaagccgagaaagccttgggtcccctgcttgcccgggaccggagacaggccaccgaatatgagtacctagattatgatttcctgccagaaacggagcctccagaaatgctgaggaacagcactgacaccactcctctgactgggcctggaacccctgagtctaccactgtggagcctgctgcaaggcgttctactggcctggatgcaggaggggcagtcacagagctgaccacggagctggccaacatggggaacctgtccacggattcagcagctatggagatacagaccactcaaccagcagccacggaggcacagaccactcaaccagtgcccacggaggcacagaccactccactggcagccacagaggcacagacaactcgactgacggccacggaggcacagaccactccactggcagccacagaggcacagaccactccaccagcagccacggaagcacagaccactcaaccaacaggcctggaggacagaccactgcaccagcagccatggaggcacagaccactgcaccagcagccatggaagcacagaccactccaccagcagccatggaggcacagaccactcaaaccacagccatggaggcacagaccactccaccagcagccacggaggcacagaccactcaacccacagccacggaggcacagaccactccactggcagccatggaggccctgtccacagaaacccagtgccacagaaggccctgtccatggaacctactaccaaaagagggtctgttcataactcttttctgggtcctctggtactcacaagggcattccaatgggcaaccagcaagttgtccgtcaactacccagtgggggccccagaccacatctctgtgaagcaatgcctgctggccatcctaatcttggcgctggtggccactatcctcttcgtgggcactgtggtgctggcggtccgcctctcccgcaagggccacatgtaccccgtgcgtaattactcccccaccgagatggtctgcatctcatccctgttgcctgatgggggtgaggggccctctgccacagccaatgggggcctgtccaaggccaagagcccgggcctgacgccagagcccagggaggaccgtgagggggatgacctcaccctgcacagcttcctcccttagctcactctgccatctgttttggcaagaccccacctccacgggctctcctgggccacccctgagtgcccagaccccattccacagctctgggcttcctcggagacccctggggatggggatcttcagcgaaggaactctggccacccaaacaggacaagagcacgcctggggccaagcagacgggcaagtggagccacctctttcctccctccgcggatgatgccccagccacatttcagccgaggtccaaggcaggaggccatttacttgagacagattctctcctttttcctgtcccccatcttctctgggtccctctaacatctcccatggctctccccgcttctcctggtcactggagtctcctccccatgtacccaaggaagatggagctcccccatcccacacgcactgcactgccattgtcttttggttgccatggtcaccaaacaggaagtggacattctaagggaggagtactgaagagtgacggacttctgaggctgtttcctgctgctcctctgacttggggcagcttgggtcttcttgggcacctctctgggaaaacccagggtgaggttcagcctgtgagggctgggatgggtttcgtgggcccaagggcagacctttctttgggactgtgtggaccaaggagcttccatctagtgacaagtgacccccagctatcgcctcttgccttcccctgtggccactttccagggtggactctgtcttgttcactgcagtatcccaactgcaggtccagtgcaggcaataaatatgtgatgggccaacc

SEQ ID NO: 350166 - DNA, 999 bp, Homo Sapiens
  misc_feature (420)..(483): n is a, c, g, or t
aaagaaggaatctagctctctacagcagggaggaagagcagggtgtgtagttgggtgggtgggtgcgtgggcatgtgcaggggggagggcgtgtgtgcgagggaagcaggcatgtgaataccagggcatgtgtgttggggcatggtgcacaggggctgggggctctaaggttgggtggggggaggagcccaaggaaacagtgtgcctttgtgagggtgtgtgtgccgccgggtctgtgcagtgggtgtgggtgtttgtctccctgtatccgccttgtctcccgtccgggacttttagccttcctgggctcgccttcctcatgtcctttctcctccctcttggggctcaaattgggtgccctggtgaaggaggggggcacactccagaacctagtccaaccccagacgctgcctgaggctnnnnnnnnnnnnnnnnnnnnnnnnnnnnnnnnnnnnnnnnnnnnnnnnnnnnnnnnnnnnnnnnccccgctaaggctggcgtgccagggggtgggacatgccaatcactggctgtgcctctcccgctgccagcacagggcgcagctccccctgggagccaggtgtatgggtccctggagacgccgcaggcccccagggaggcagtggggctgaggaccctacagacccctcttcagccccgtggtgatgcactttcccctgaggaagccctgtagcgtgcctggaggaaggggctctccaaaccccagacccacctagcacaccatgaacacttcaggacccacctgctgtccagccccaagcatcaccgtcctggcaccaggcaaagggtccctggccagtggacttcattgggatcacaacgggcctcctggtcgatagcccacagatgacaggcaacctgcatggtactcatctctttccaggtcaacacggagctcaagacagtcactaactacttcctgctgagccctggccttgtggctgaccctcatccatcaggaaccttcttccaatggac

SEQ ID NO: 350167 - DNA, 2823 bp, Homo Sapiens
  misc_feature (72)..(142): n is a, c, g, or t
tcaaattgggtgccctggtgaaggaggggggcacactccagaacctagtccaaccccagacgctgcctgagnnnnnnnnnnnnnnnnnnnnnnnnnnnnnnnnnnnnnnnnnnnnnnnnnnnnnnnnnnnnnnnnnnnnnnngctaaggctggcgtgccagggggtgggacatgccaatcactggctgtgcctctcccgctgccagcacagggcgcagctccccctgggagccaggtgtttgggtccctggagacgccgcaggcccccagggaggcagtggggctgaggaccctacagacccctcttcagccccgtggtgatgactttcccctgaggaagccctgtagcgtgcctggaggaaggggctctccaaccccagccccacctagccaccatgaacacttcagccccacctgctgtcagccccaacatcaccgtcctggcaccaggaaagggtccctggcaagtggccttcattgggatcaccacgggcctcctgtcgctagccacagtgacaggcaacctgctggtactcatctctttcaaggtcaacacggagctcaagacagtcaataactacttcctgctgagcctggcctgtgctgacctcatcatcggtaccttctccatgaacctctataccacgtacctgctcatgggccactgggctctgggcacgctggcttgtgacctctggctggccctggactatgtggccagcaatgcctccgtcatgaatctgctgctcatcagctttgaccgctacttctccgtgactcggcccctgagctaccgtgccaagcgcacaccccgccgggcagctctgatgatcggcctggcctggctggtttcctttgtgctctgggccccagccatcctcttctggcagtacctggtaggggagcggacagtgctagctgggcagtgctacatccagttcctctcccagcccatcatcacctttggcacagccatggctgccttctacctccctgtcacagtcatgtgcacgctctactggcgcatctaccgggagacagagaaccgagcacgggagctggcagcccttcagggctccgagacgccaggcaaagggggtggcagcagcagcagctcagagaggtctcagccaggggctgagggctcaccagagactcctccaggccgctgctgtcgctgctgccgggcccccaggctgctgcaggcctacagctggaaggaagaagaggaagaggacgaaggctccatggagtccctcacatcctcagagggagaggagcctggctccgaagtggtgatcaagatgccaatggtggaccccgaggcacaggcccccaccaagcagcccccacggagctccccaaatacagtcaagaggccgactaagaaagggcgtgatcgagctggcaagggccagaagccccgtggaaaggagcagctggccaagcggaagaccttctcgctggtcaaggagaagaaggcggctcggaccctgagtgccatcctcctggccttcatcctcacctggacaccgtacaacatcatggtgctggtgtccaccttctgcaaggactgtgttcccgagaccctgtgggagctgggctactggctgtgctacgtcaacagcaccatcaaccccatgtgctacgcactctgcaacaaagccttccgggacacctttcgcctgctgctgctttgccgctgggacaagagacgctggcgcaagatccccaagcgccctggctccgtgcaccgcactccctcccgccaatgctgatagtcccctctcctgcatccctccaccccagtccccgggaaaggccggtgggaagagggcaggggctgcatcctcagccccagggccctgcttcaggccttcacctggcttcccagggaccctgggtcacctttcctgggcagcccagagagaccctgccaactttccagacttcgctattcccaggcagggagggaaacccggggaactggtttttctgttccctgctgggtgggaatgcgctcttcaccaggaagaaggcccgggaggaggatccgggctttggactccttgtttgcctttaggcaggaagtcaggagccagcagggcgggccaggagaaagaaggcttaacattaagtattccttggcccagcagcggcccagattgcggtgtgagatggtgccccctggggggcacagccagaaactgaactggccgctgggagaaaagccagatgacagggagctggggaatcccctcgcttcataggcagagcccgcccacctgggccctaggcatactctccaggattgtccacaaatgtcctcagagggtccctaggtgggtcaactccaaggcaaatgtccaagcatcagcaagacaatgacactggaagggtccggcttggctagtcacatatcaagtcccgaggcagcaacaggaccaggagccaggtgtcctgactgtcctacaatatcattttcctgggagtgggagtcaagtgtgcctgctatccagccgcaaatccataccccctgccccagagaagcctcagtccctccctcctggctcacagccaccacctggatggatcttgctccatgcagatctagccaggcctcccgcatgctgcctcctccggccctgccccacacaggcctggcccagccagcaggttctctcctgtgagctccccaatccaacccatgcatggcctcccagccacccggatctccaggcccagcctggccccaaatgttctttcctttcatcctcagcaagtgctgagtctgtgaataaagccacataaccagcgggccct

SEQ ID NO: 350168 - DNA, 900 bp, Homo Sapiens
  misc_feature (837)..(837): n is a, c, g, or t
  misc_feature (843)..(843): n is a, c, g, or t
  misc_feature (860)..(860): n is a, c, g, or t
gtgctcagagcagtcgactctgcgtggcactgaaacacgagcagacggccaaggacaacctgcagaaggagctgcgtatcgagcactcacgctgcgaggccttgctggctcaggagcggagccagctctctgagctccagaaggaccttgcggctgagaagagccgcaccctggagctgtcagaggccttgcggcacgagcggctcctgaccgagcagctgagccagaggacacaggaggcttgcgtgcaccaggacacacaggcccatcacgctctgctgcggaagctgaaggaggagaagtcccgggtggtggacttgcaagcgatgcttgaaaaggtgcagcagcaagccctgcattctcagcagcagcttgaggctgaggctcagaagcactgtgaggcgctcaggagagagaaggagcgagaattagaactgcagcgtcagcgtgacttgcataagatcaagcagcttcaccagccaggccgtggacaggacagttaatgattggacgtcatccaatgagaaagcagtgatgtctttactgcacacgttggaggagctgaagtctgacttgagcaggcccacctcctcccagaaaaaaatggcagcagagctgcagttccagtttgtggacgtcctgctgaaagacaatgtttccctcacaaaagcgctcagcacggtgacccaggagaagctggagctgagcagagccgtgtctaagcttgagaagttgctgaagcaccatctgcagaagggctgcagcccaagcaggtcggaaaggtctgcttggaagccagacgaaacggctccacagagttccctgaggcgcccagancccggncggcttccaccagctgncagcgaggaagcacacaccagcaatgtcaagatggaaaaa

SEQ ID NO: 350169 - DNA, 854 bp, Homo Sapiens
ttggagctctctccagtctcgcctctggcaggtcctgtgtgccagaggtacatcccggttgggggactctctggttctggtggagactgcgctgtcgtgctcgggccctggcgaggggctttgccttgtggccagagctcctttccgatctacttcttgccatttcttaaccaaaaaacgtaatcttaatattgcaatgaccaccctgacggccgtgcggaacctggtgaaaggacgagatgtgattttccgttctgctttggaaggaaatacccccaaatgggcaatcatggagagtgtttcttgttcagaatcctggaatccaccaatcaacagcaaaagatacttcttttgataaatcagagcttttctaaagctctctgctctcaagtaatgcaggtacaatttgttccatcttgacattgctggtgtgtgcttcctcgctggcagctggtggaagccggccggggtctgggcgcctcagggaactctgtggagccgtttcgtctggcttccaagcagacctttccgacctgcttgggctgcagcccttctgcagatggtgcttcagcaacttctcaagcttagacacggctctgctcagctccagcttctcctgggtcaccgtgctgagcgcttttgtgagggaaacattgtctttcagcaggacgtccacaaactggaactgcagctctgctgccatttttttctgggaggaggtgggcctgctcaagtcagacttcagctcctccaacgtgtgcagtaaagacatcactgctttctcattggatgacgtccaatccggacgccgtgggtcgacgatatcccgataacttccggaccggtaccagcct

SEQ ID NO: 350170 - DNA, 1232 bp, Homo Sapiens
  misc_feature (1105)..(1105): n is a, c, g, or t
  misc_feature (1185)..(1185): n is a, c, g, or t
  misc_feature (1200)..(1200): n is a, c, g, or t
  misc_feature (1220)..(1220): n is a, c, g, or t
agcagggacagcgcttacggactgcctgtcagcttacaatcgcccccgacagaaagattttcctgaccttcctattttaattaacacctaccaacctcactttctatcgctttatccgcaatttttcttaatagcactcaccactaactaaccttatgcgcttgttgattgattggcttctccagtagtgttaagtgaattaataagttcctactacgttgtccggccatagagatagaaaaagctatggaaaccctttgctttcaaggaactctggtctagttgaaaaagactatttggtgagctaggaaaatatgggatcaaatatgagtgatacaaaaggcaagtgctacaggaaaaagaggaaattactgtggatcccttgctggaaagtttcgagaagaaattatactccaaaggacaagttgattttgcagaggagggaagagatcttagtgcgggaagtacttttgcaaagacccaagggtggagtgttagaacactaagaatacgagcctgacctggaacaccaagtgggtgtggaaaatgggaaacgagactagacaagaacatatctgaagaagctggatagcgtggaggaagaagtgaaggatgaactccagccaatctagatgatgacatttgccattgcagtgtatggagatgtagtcaaaggcctaggtacatttactccacttttgcccgtacaagacccgaattaggccttgcttttggtattctagatttatgcacgacctatttgggattagagcactaagttataacaatcagctatcaaagcataaaagcctactgaatgataggtacagccctgccatcattgggaagctgtgtatgacccccatgagttttggggccacattcacgttgagaggcatgcatttccaagcccagttccaatctgaagcctggctgtaattctgttcttggagtctgtggcatggagtggcagtgtagccttatagatgaacatctgccattattcccatttccccagttaaacctctgggcttctatcttagtgggctgggaccttccgccatgtaacagaagggcaacaaaggggttatgaggcaaaactttnggagccaaacctcttgggatgtggaacctcccaccctggttcattttgaggggaccttggggtaaaattactttcacctnttctgggggcatccntttttttcatctgttaaaantgaagggtactt

SEQ ID NO: 350171 - DNA, 812 bp, Homo Sapiens
ctggctccgcgtcggccggtcggtttggtcggttgtagtggcctcgccgcccggtccgctgtcgcagcgctcatccgcgccgggagcgcgcttggctgcgtcgcccggcagccgcgggagcatttcctgaagacgtagtcatgcagcacgtcagcagctcccagagcagccagcgccatgtccagtggcctggggcctgccccggcgcgggcgaggagcagccagcgtgctcccagccgtccctgcccctcacactgccatcccccagccaccaactacagcagctgatggtccagacccagagtcccacgcagcccagtccggggccggggcaggccttgcagaatgtgcgtgcaggtgcccctggccctgggctgggcctctgcagcagcagccctacaggggacttcgtggatgccagcgtgctggtgaggcagatcagcttgagcccctccagtggtggacactttgtgtttcaggatgggtcagggctcacccagatcgcccagggagcccaggttcagctccagcacccgggtacgcccatcacagtccgagagcggagaccctcccagccccacacacagtcagggggcaccatccaccacctgggaccccagagccctgcagccgcgggtggggccggcctgcagcccctggccagcccaagccacatcaccacggctaacttgccaccgcagatcagcagcatcatccagggccagctggttcagcagcagcaggtgctgcaggggccgcctgtgccccggtccctgggctttcgagaaggacgcccggcgtgctgcttcccg

SEQ ID NO: 350172 - DNA, 1207 bp, Homo Sapiens
  misc_feature (687)..(789): n is a, c, g, or t
gcatctccggagaggtctgggggtatctcctctaacgtcttggtacctttctgcattcccgtgttccccacagacgtgagtggggaggtctggataaggccctgggggcacggcagtcctggaaggtctgtggtcggggctggggacgtcatccctaaccccgctgcgcccccagccccggggagcagccacgccgggcgtcctctcgaagcccaggggccggggcagcggcggcccctgcagcacctgctgctgctgaaccagctggccctggatgatgctgctgatctgcggtggcaagttagccgtggtgatgtggcttgggctggccaggggctgcaggccggccccacccgcggctgcagggctctggggtcccaggtggtggatggtgccccctgactgtgtgtggggctgggagggtctccgctctcggactgtgatgggcgtacccgggtgctggagctgaacctgggctccctgggcgatctgggtgagccctgacccatccatcagctgctgtagttggtggctgggggatggcacgtgtgaggggcagggacggctgggagcacgctggctgctcctcgtcccgcggccggggcaggccccaggccactggacatggcgctggctgctctgggagctgctgacgtgctgcatgactacgtcttcaggaaatgctcnnnnnnnnnnnnnnnnnnnnnnnnnnnnnnnnnnnnnnnnnnnnnnnnnnnnnnnnnnnnnnnnnnnnnnnnnnnnnnnnnnnnnnnnnnnnnnnnnnnnnnnttgggcaagataagtgtctttattataaaaggcgtcaattcgcagcgtctttactgtaaaggtggtggtattattagattcttcctttccactaacactaaactcccagtgccggaaggcccttgtcaggagcaggacccgcggaggggtccgtggtcagttctgggacagctgccgagcagcgcagcgcgtggaatcaacttcactgctcacgtgcagcgcacactaagcgcactcgtctttcctggagtgcagaccaggccccgacctcagggatcaggacagcggggccaaggggtcaagaggcagaggcggcgtcagcgccgtagacagcggtctcgcgaggcgcggctgccgggcgacgcagccaagggctcccggcgcggatgagcgctgcgacagcggaccgggcggcgag

SEQ ID NO: 350173 - DNA, 2299 bp, Homo Sapiens
  misc_feature (132)..(147): n is a, c, g, or t
cgatgagctcatagcctgctcctgcagcgggagcgggagctgagccagcgggacgagcatgtgcaggagctggagagctacatcgaccggctgctggtgcggatatggagacctacccacgctgctgcaatnnnnnnnnnnnnnnnnaaatagccttcctcaccctacccccaggagggttggcatggacctattgctgcctgccctctctcctcctgaactctctcatctgcagtggggcatcgtctgtcttgccttgtcactccttgctcctctccctcctgcctcaactggggctgctggaagggggccctctggattccctttggaggcatcaggttctgtgcacaacttgtgtgtctttgggagccctgggtctttcccacctgcctgttttcatatccctcagctttgggggccccagggaattggaactcttcccccaagacagagcaggggtgaactgtagcttgatgcagtaatctgggacaagactggttgctagcacatactttattatcccccaaggatggtcagccatttcttcccacagccaaagccccatccccttcatttccctccagtccctggaggggcttctagtattactgggacaatgaccacgctgcctgtttgtctgtgagttacgggcaaccagcctcttcagcctcacacccattcccctgagagcaagaagcctgtgtggtctgggccagtctctgccatgtcctgagtctgcttcagtctggagctgtttgtggggcgagtgccatgtggacagtggtggatgatgtgtgtgcttcaggctgctccctgacccctctgacctttccacgagtgtcacatgggaatgtgtggggcgcaggggcgggtgcggagagagcacctttttgcttttcgagctcttgaccacctccaatgtgtaggtccctccaggctggggcttgggactgcttatgatttggggatcaagcctccatgtctgttcttgttgcctgtccagatgccaaaactctgtgttgctgcagggtttgaacttttggaaaccaattaaaatgtgcctttggtgggcggggtcaagagcccctggatgtcgacctctcccgctgtgtggtgtccccctcccacctgttgaatacatagggatggctctctcagggccctgggaatgggaatggacagcgctgctgtgggctgttcccctcccctaaagttaatctcttggtctggccaagttgctgctccctcaaccttcctgctgtcttcccctccctcaaccccaataggaggatcccaggataaacactgctgggcaggcgggcaggcaggcctggggctgccctgctcactctcattgtctggcctcaggacttagccatactagaccagtcagcttgcctggaagagggaggtcccactatgcctttgggagacacctatacttaggaaaaagcctttgttgtcctcccatccatccattaagctgctatctcagcctgtcccttctgccccaggggcttgcctggcttggctgcagtgcactttgaaatgaagtatctgtcctttggcccagcccctggtttgcttgtagaaaacatggtaggcttccccaaggcatctgcagggaactttggcagcttggggcaccctgaattagcaaaaatggggggtgatgaggtgctgaagaaggatacttaacagcttagtgaggaggcaagagctcctctgggaccaccacttcttcaggagagggcctgtgggcttgcttttggaaagcctcaggcagacacgtgccctctgggtgatgtctgtctgctgccaggatggagcagaggagcgccacacatggaggaaagcccctgtaacgttacctaccttaaactccactcatcaaatctgagaaaagtatccactggtccccagggtttcagtcatgcttttgggggtcattgggtattagagaagtaagtatcttttctgagagagggggagtcaccccccctactggggattcctctgggctttattcactcccagccctggccctgacctttgtgggcctccctaatgcccagggcatggatggcttcagaggagtttttgaatcgaagcccagggtccttgttgatgtttcttctcctagccacacttggaggaaagttgcaggtgggttgggcagggagcaggcatggttctgctttgctgtttgtcttcctagttaaggctctttataaagagcttgttcttcatgttttaagcactttatgaagaataaaacattcatgtactgcaaaaaaaa

SEQ ID NO: 350174 - DNA, 1690 bp, Homo Sapiens
cggtccggaattcccgggatggggaagaaaggagttggggcaaaacaggaggcgtttccctacccgcatacatccccgtccccgagacacccaatccccccacccccagcctgcccgcgcctcccgcccccagctcctcgccctggggacagctggcagccccgcgcggaccagacacaaagccgatcaatcccggaggcgtgggggcggagggacgacccgccggggctttcccgggcgctgctctcctcctgctgccccctcgctaggacccggcggacgcctcgtctggttttcacgccctctagcccctacccccacacccccaaaacagaacagacccccatccctgggctggaggacccgcctcttggcagccagctgagaaggcgccccggggagggggaaactgacatcccatctagagccgtccctcctcttcctcccctcccgactctctgctcctttcccgccccagaagttcaagggcccccggcctcctgcgctcctgccgccgggaccctcgacctcctcagagcagccggctgccgccccgggaagatggcgaggaggagccgccaccgcctcctcctgctgctgctgcgctacctggtggtcgccctgggctatcataaggcctatgggttttctgccccaaaagaccaacaagtagtcacagcagtagagtaccaagaggctattttagcctgcaaaaccccaaagaagactgtttcctccagattagagtggaagaaactgggtcggagtgtctcctttgtctactatcaacagactcttcaaggtgattttaaaaatcgagctgagatgatagatttcaatatccggatcaaaaatgtgacaagaagtgatgcggggaaatatcgttgtgaagttagtgccccatctgagcaaggccaaaacctggaagaggatacagtcactctggaagtattagtggctccagcagttccatcatgtgaagtaccctcttctgctctgagtggaactgtggtagagctacgatgtcaagacaaagaagggaatccagctcctgaatacacatggtttaaggatggcatccgtttgctagaaaatcccagacttggctcccaaagcaccaacagctcatacacaatgaatacaaaaactggaactctgcaatttaatactgtttccaaactggacactggagaatattcctgtgaagcccgcaattctgttggatatcgcaggtgtcctgggaaacgaatgcaagtagatgatctcaacataagtggcatcatagcagccgtagtagttgtggccttagtgatttccgtttgtggccttggtgtatgctatgctcagaggaaaggctacttttcaaaagaaacctccttccagaagagtaattcttcatctaaagccacgacaatgagtgaaaatgatttcaagcacacaaaatcctttataatttaaagactccactttagagatacaccaaagccaccgttgttacacaagttattaaactattataaaactctgctttgtccgacatttgcaaagaggtacacgaggaaatggaattggtatttcattttaattttcatgactactaactcacctgaacttgctattttaaacaaatagttctgtcgacacataaaatataatctggcatcttggtcggactagttaaagaattaaa

SEQ ID NO: 350175 - DNA, 340 bp, Homo Sapiens
gacccaggctgagcaaggccaaaacctggaagaggatacagtcactctggaagtattagtggctccagcagttccatcatgtgaagtaccctcttctgctctgagtggaactgtggtagagctacgatgtcaagacaaagaagggaatccagctcctgaatacacatggtttaaggatggcatccgtttgctagaaagacccagggctcccaaagacacacaagttgtgcacagaacctgatgcctccaaagggaatccagagggcccccttccagcagccccagttgaggcaggagggagaggagcaaggagtgacaaggcaagacagacgatgcccca

SEQ ID NO: 350176 - DNA, 2257 bp, Homo Sapiens
  misc_feature (2100)..(2100): n is a, c, g, or t
  misc_feature (2133)..(2133): n is a, c, g, or t
catggccgcctcagcaacagcccccctcctgtgcgtcacggacgcggcgactcctgacgtcataggaaggcgccggtttcggcgggggctgcacgtgcgcaggggtgtggaaacttaccggctgagccatggatacaccgttaaggcgcagccgacggctgggaggcctaaggcccgaatcccccgagagcctcacctcagtttcgcggacgagacgggcccttgtggagttcgagtcgaacccagaagaaacgagggagcccgggtctcctccgagtgtgcagcgggctggcctggggtcccccgaaaggccgccgaagacaagcccaggatcaccccgtctgcagcagggtgcaggcttggagtcaccccaagggcagccagagccaggcgcagcgtccccccagcgtcagcaagacctacacctggagtcgcctcaaagacagccagagtacagtcctgaatccccacgatgtcagccgaagccaagtgaggaggcaccaaagtgttctcaggaccagggagtactggcctcggagttggcccagaataaggaggagctgaccccgggggccccccagcatcagctaccgccagtcccaggatcaccagagccttaccccggtcagcaagctcccggtccggagccctctcagccactactggagctgacacccagggcacctggctccccccggggtcagcatgagccgagcaagccacctccagctggggagacggtgacaggcggcttcggggcaaagaagcgaaaaggttcttcatcccaggccccagcgtccaagaagttgaataaagaggagcttcctgtaatcccgaaggggaagcccaaatcggggcgagtgtggaaggaccgctccaagaaaagattctcccagatgcttcaggacaagcccctgcgcacatcgtggcagcggaagatgaaggaacgacaggagaggaagctggccaaggactttgcccgtcacctggaggaggagaaggagaggcgccgccaggagaagaaacagcgccgggctgagaacctgaaacgccgcctggagaatgagcggaaggcagaggtcgtccaagtgatccgaaaccccgccaagctcaagcgggcaaagaagaagcagctgcgctccattgagaagcgggacaccctggccctgctgcagaagcagccgccccagcagccggcagccaagatctgagctcaggacggcccgaggccttccatggccaacaaacatgtcagacacagcacctcaggccgctgctcagatgcctctgctggagctggcactccaaacccatggctccagaacagggacccccaccccgaccggggctcctcagcctttgaaggcttccaggcaggtctgtgtgggacagaagcccagagggggcctgggacctggcagagatgggggcgggaagagattcagctcccatccctccttcctctccttctccaagtgccttcaaaccaagaactgtacattcttctggttcctcagtgagctggtgactggcaggtgactccctcagcagtgtatgccctttctcagcatcctaggtccatcccaggcctggaggctgacagttgggaatccagcttcccccacaccttcccaaaggctgctctgagcacctccacaccccactgcctctgtccccagcaaactgaatccggttcctctccacttttcaatactgaaagattaaaatggggaggttgcagggagcagagcttttccctagcacccactttcccaaaccagtctctgcagaagccccagagaatctaactcatgcctgtccagtctacagcaaaaatatttattgagtgcctgttgcatacaggcacaatcctaggcaccggcaaatacagacaatagaccaaagtccctgccctcgaggagctttcattctgatggagagaaaacataataaacaagcaaaatgcaccacgtgtccaatgggggaagtgctatgagtaaagggggaagggatgggagggagcaggggccgaggtgtcaacacagggtggctctgcagctagctgggcacctcactgttccctttgctcagcacctgctntggggccagggctttcagtcaccctggcctttnggtgggcaggaaaaaacacaggaccaagatcttcaagagtttctcatctgcttcttccacttgacatttcatccaccaagcaaaattcatttgacaccaacttttcggtccctggggcttgcag

SEQ ID NO: 350177 - DNA, 1748 bp, Homo Sapiens
  misc_feature (53)..(53): n is a, c, g, or t
  misc_feature (391)..(391): n is a, c, g, or t
  misc_feature (413)..(413): n is a, c, g, or t
gtgaattggttcgtgtcacggccccagtgtggagttgtcagagctgttaccangtgtttcatttgaactgcataaagaaatgggcaaggtctccagcatctcaagcagatggccagagtggttggaggtgccctgcctgtcagaatgtttctgcacatgttcctaatacctacacttgtttctgtggcaaggtaaagaatcctgagtggagcagaaatgaaattccacatagctgtggtgaggtttgtagaaagaaacagcctggccaggactgcccacattcctgttaaccttctctgccatccaggaccctgcccaccctgccctgccttttatgacaaaaacatgtggaatgtggacggaccaggcacacagttcgctgtggtcaggntgttttcagtccactgtttctnacccatgtgaggaatattttgaactgtggtcagcaccagtgtgctgagctgtgccatgggggtcagtgccagccttgccagatcattttgaaccaggtatgctattgcggcagcacctcccgagatgtgttatgtggaaccgatgtaggaaagtctgatggatttggggatttcagctgtttaaagatatgtggcaaggacttgaaatgcggtaaccatacatgttcgcaagtgtgccaccctcagccctgccagcaatgcccacggctcccccagctggtgcgctgttgcccctgtggccaaactcctctcagccaattgctagaacttggaagtagtagtcggaaaacatgcatggaccctgtgccttcatgtggaaaagtgtgcggcaagcctctgccttgtggttccttagatttcattcatacctgtgaaaagctctgccatgaaggagactgtggaccatgctctcgcacatcagttatttcctgcagatgctctttcagaacaaaggagcttccatgtaccagtctcaaaagtgaagatgctacatttatgtgtgacaagcggtgtaacaagaaacggttgtgtggacggcataaatgtaatgagatatgctgtgtggataaggagcacaagtgtcctttgatttgtgcggaggaaactccgttgtggccttcataggtgtgaagaaccttgtcatcgtggaaactgccagacatgctggcaagccagttttgatgaattaacctgccattgtggtgcatcagtgatttaccctccagttccctgtggtactaggccccctgaatgtacccaaacctgcgctagagtccatgagtgtgaacatccagtatatcattcttgtcatagtgaggagaagtgtcccccttgcactttcctaactcagaagtggtgcatgggcaagcatgagtttcggagcaacatcccctgtcacctggttgatatctcttgcggattaccctgcagtgccacgctaccatgtgggatgcacaaatgtcagagactctgtcacaaaggggagtgtcttgtggatgagccctgcaagcagccctgaaccatccccagagctgactgtggtcacccgtgtatggcaccctgccataccagctcaccctgccctgtgactgcttgtaaaagctaaggtagagctacaggtgtgaatgtggacgaagcaaaagagatggtggatttgctctgaaggcatctagtacttaatcaaggaatagctgaaatctccatgggctctaagataaccgaacatgcagcttggaggttcacgggagatcaggcaagttaattaccaaaaaaggg

SEQ ID NO: 350178 - DNA, 1268 bp, Homo Sapiens
agtcaccggcccctgctcaagaatgccagtgtgtgtgtagcctccacagagaggtcgttttctcggagtccagaggggccgcctgagcttctgagaactagggaggagccatcccagccatgagcccctgtgggaatctgctgggggccaagtggcctggagtcctcaggctcccgcagctgctccggagggagaggtgagctcagggcagcctgcctgcagccagaggtgccgggagccccgggcctgtcatggtggccatctacagccggcctgaggcagtcacagacggatttgcagctgagcctgtctatctggtgtgggaagaagatggggagttacttgtcagtcccggcttacttcacctccagagacctgtttcggtgttcagaatgccaggattccctcaccaactggtactatgagaaggatgggaagctctactgccccaaggactactgggggaagttcggggagttctgtcatgggtgctccctgctgatgacagggcctttcatggtggctggggagttcaagtaccacccagagtgctttgcctgtatgagctgcaaggtgatcattgaggatggggatgcatatgcactggtgcagcatgccaccctctactgtgggaagtgccacaatgaggtgctgctggcgacccatgtacgaggagactctccacagagtctagcccaggagcagctgccctactctgtcacgctcatctccatgccggacaccacttgaaggcagctgcggggcttactcccgtgtccgtggaagagtgcctgctccacacatacgccaccacctgtgcaagtgaacagaggtcaaccggcatgcacatcagtcccaacaatcgaaacgccatccaccctggggaccgcatcctggagatcaatgggacccccgtcccgcacacttccaagtggagagaagctggaggattgcaattaacccagaccaagccaggacacttcagcctggtggatttgaaacatggaccccccttcttcccaacggcctggaaaccaaccttggccgcttgggaaggcccccggccttcccctcccttccaaatggcaaaaaatggcccggggaacaaccccccccaagggccccttcaggcaaccccttggggacaacacccaagggggaaaaaaattcttgggggagggggcgaacccccactctgtaaggggagaaacacctcttcttccggctcaaagagagggcggcagacccatataacccccgtgtaaata

SEQ ID NO: 350179 - DNA, 728 bp, Homo Sapiens
  misc_feature (608)..(608): n is a, c, g, or t
  misc_feature (633)..(633): n is a, c, g, or t
  misc_feature (651)..(651): n is a, c, g, or t
  misc_feature (660)..(660): n is a, c, g, or t
  misc_feature (668)..(668): n is a, c, g, or t
  misc_feature (697)..(697): n is a, c, g, or t
  misc_feature (717)..(717): n is a, c, g, or t
gttcttccaagaagttgcaagaaaacacattatatctcacctcttctctcagccaaaggcacctctgagccaaactggattgaattggcctgaaatgattactgcaattaccagttatttattgcagcttttatggcctagcaatcctggttgtctctttctagaatgtttgatgggaaattgccaatatgtacaattgcaggattatattcaactgctacatccctggtgtcaagtcaatgttggttcctgtcgatttatgctgggaaggtgttacctagttacaggagaaggacagaaggctctggaatgtttttgtcaggcagcatctgaagtaggcaaagaggaattcttggatcgcttgattcgctcagaggatggggagatcgtgtctacccccaggctgcagtattatgacaaggttttacgactactagatgtcattggtttgcctgaactggttattcagttggctacatcagccataactgaagcaggtgatgactggaaaagtcaggctactcttaaggacatgtattttcaaacatcatttgggatttggggtcacaataagccaagcatatggaagcctttaaccccaaattccntgatttccagcaggcaattaggttnttttacggccgtttggtnggtagttcntttgttgnaccgttcaccgcttaccaggttccttttnggagtttcccccttgtggantccggcatatt

SEQ ID NO: 350180 - DNA, 2093 bp, Homo Sapiens
tttttatgcgggattaagcttgctgctgcgtgacagcggagggctaggaaaaggcgcagtggggcccggagctgtcacccctgactcgacgcagcttccgttctcctggtgacgtggcctacaggaaccaccccagtggtcagctgccgcgctgttgctaggcaacagcgtgcgagctcagatcagcgtggggtggaggagaagtggagtttggaagttcaggggcacaggggcacaggcccacgactgcagcgggatggaccagtactgcatcctgggccgcatcggggagggcgcccacggcatcgtcttcaaggccaagcacgtggagactggcgagatagttgccctcaagaaggtggccctaaggcggttggaagacggcttccctaaccaggccctgcgggagattaaggctctgcaggagatggaggacaatcagtatgtggtacaactgaaggctgtgttcccacacggtggaggctttgtgctggcctttgagttcatgctgtcggatctggccgaggtggtgcgccatgcccagaggccactagcccaggcacaggtcaagagctacctgcagatgctgctcaagggtgtcgccttctgccatgccaacaacattgtacatcgggacctgaaacctgccaacctgctcatcagcgcctcaggccagctcaagatagcggactttggcctggctcgagtcttttccccagacggcagccgcctctacacacaccaggtggccaccaggtctgtgggctgcatcatgggggagctgttgaatgggtccccccttttcccgggcaagaacgatattgaacagctttgctatgtgcttcgcatcttgggcaccccaaaccctcaagtctggccggagctcactgagctgccggactacaacaagatctcctttaaggagcaggtgcccatgcccctggaggaggtgctgcctgacgtctctccccagggcattggatctgctgggtcaattccttctctaccctcctcaccagcgcatcgcagcttccaaggctctcctccatcagtacttcttcacagctcccctgcctgcccatccatctgagctgccgattcctcagcgtctagggggacctgcccccaaggcccatccagggcccccccacatccatgacttccacgtggaccggcctcttgaggagtcgctgttgaacccagagctgattcggcccttcatcctggaggggtgagaagttggccctggtcccgtctgcctgctcctcaggaccactcagtccacctgttcctctgccacctgcctggcttcaccctccaaggcctccccatggccacagtgggcccacaccacaccctgccccttagcccttgcgagggttggtctcgaggcagaggtcatgttcccagccaagagtatgagaacatccagtcgagcagaggagattcatggcctgtgctcggtgagccttaccttctgtgtgctactgacgtacccatcaggacagtgagctctgctgccagtcaaggcctgcatatgcagaatgacgatgcctgccttggtgctgcttccccgagtgctgcctcctggtcaaggagaagtgcagagagtaaggtgtccttatgttggaaactcaagtggaaggaagatttggtttggttttattctcagagccattaaacactagttcagtatgtgagatatagattctaaaaacctcaggtggctctgccttatgtctgttcctccttcatttctctcaagggaaatggctaaggtggcattgtctcatggctctcgtttttggggtcatggggagggtagcaccaggcatagccacttttgccctgagggactcctgtgtgcttcacatcactgagcactcatttagaagtgagggagacagaagtctaggcccagggatggctccagttggggatccagcaggagaccctctgcacatgaggctggtttaccaacatctactccctcaggatgagcgtgagccagaagcagctgtgtatttaaggaaacaagcgttcctggaattaatttataaatttaataaatcccaatataatcccaaaaaaaa

SEQ ID NO: 350181 - DNA, 2291 bp, Homo Sapiens
  misc_feature (2205)..(2205): n is a, c, g, or t
  misc_feature (2261)..(2261): n is a, c, g, or t
  misc_feature (2263)..(2263): n is a, c, g, or t
agcgggtggtgaggctgggggccggtggcggatggagcccgcgatggagccggagactctggaggcgcgaatcaatagagccacgaaccccctgaacaaggagctcgactgggccagcatcaacggcttctgcgagcagctcaacgaggactttgaggggcctccactcgccacccggctgctggcccacaagatccagtccccacaggagtgggaggcgatccaggccttgacggtgctggaaacatgcatgaagagctgcggcaagcggttccacgacgaagtgggcaagttccgctttctcaacgagctcatcaaggtcgtgtctcccaagtatctgggctctcggacatcggagaaggtgaagaacaagatcttggagctcctctacagctggacagtgggcctgcccgaggaggtgaaaatcgcagaggcctaccagatgctaaagaagcaggggattgtaaagtccgaccccaagcttccagatgacactacctttccccttcctcctccacggccgaagaatgtgatctttgaagatgaggagaaatccaagatgctggcccgcctgctgaagagctcccatcccgaagacctccgcgcagccaataagctcatcaaagagatggtgcaggaggaccagaagcggatggagaagatctcgaagagggtgaatgccatcgaggaggtgaacaacaatgtgaaactgctcacggagatggtgatgagccacagccagggcggcgcagcagctggcagcagcgaggacctcatgaaggaactgtaccagcgctgtgagcggatgcggcccacgctcttccgactggcgagtgacacagaggacaatgatgaggccttagcggagatcctgcaggccaatgacaacctcacccaggtgatcaacctgtataagcagctggtgcggggtgaggaggtcaacggtgatgccacagccggctccatccctgggagcacctcggccctgctggatctctcaggcctggatctcccgcctgcgggcaccacctacccagctatgcccacccgccctggcgagcaggccagccctgagcagcccagtgcctcagtttccctgcttgacgacgagctcatgtctctgggcctcagtgaccccacacccccttcaggcccaagcctggatggtaccggatggaacagcttccagtcgtcggatgccactgagcccccagcccctgctctggcccaggcccccagtatggaaagccgacccccagcgcagacatccctgccagcaagcagcggtctggacgacctagacctcctggggaagaccctcctgcagcagtcgctgcccccggaatcccagcaagtgcggtgggagaagcagcagccaaccccccggctcacactccgggacctgcagaataagagcagcagctgcagctcccccagctccagcgccaccagccttctccacaccgtgtccccagagccccccaggcctccgcagcagcccgtaccaaccgagctctcactggccagcatcactgtgcccctggagtccatcaaacccagcaacatcctgcccgtgactgtgtatgaccagcacggcttccgcatcctcttccattttgcccgggacccactgccagggcgctccgacgtgctggtggtggtggtttccatgctgagcaccgccccccagcccatccgcaacatcgtgttccagtcagctgtccccaaggttatgaaggtgaagctgcagccaccctcgggcacggagctgccagcttttaaccccatcgtccacccctcagcaatcacccaggtcctgctgcttgccaacccccagaaggagaaggttcgcctccgctacaagctcaccttcaccatgggtgaccagacctacaacgagatgggggatgtggaccaatttccccccacctgaaaactgggggagcccctagaaacaaaggggctggggagaggaaggggcagagggaccggtcactgtccagcctggagggaggcattggtggccaaggacaccctttgttgcccatggccattcacccccaggcctggtgcttctccccacacccctgtaggcctcaagtgactcttccccctcctgctccggccccgcccctgctgagccaaacccagtaggaggctgggcctgggtttgtgccgctggggtctccatcaccggggacctgnagagggaaggggctgtgtagccttggaaagaacttgggtcatggggaggaagccancntggttgggggaaagggccaggacctcag

SEQ ID NO: 350182 - DNA, 1245 bp, Homo Sapiens
aaagcgtctggtacggccggagttcgggatatcgtcgaccacgcgtcggacccactgccaggcgctccgacgtgctggtggtggtggtttccatgcatgagcaccgccccccagcccatccgcaacatcgtgttccagtcagctgtccccaaggttatgaaggtgaagctgcagccaccctcgggcacggagctgccagcttttaaccccatcgtccacccctcagcaatcacccaggtcctgctgcttgccaacccccagaaggagaaggttcgcctccgctacaagctcaccttcaccatgggtgaccagacctacaacgagatgggggatgtggaccagttccccccacctgaaacctggggtagcctctagaacagaggggctggggagaggaaggggcagagggaccggtcactgtccagcctggagggaggcattggtggccaaggacaccctttgttgcccatggccattcacccccaggcctggtgcttctccccacacccctgtaggcctcaagtgactcttccccctcctgctccggccccgcccctgctgagccaaacccagtaggaggctgggcctgggtttgtgccgctggggtctccatcaccgggacctggagagggaggggctgtgtagccttggaagaacttgggtcatggggaggaagcacagctgttggggaagggccaggacctcaggcccagccccaaccccagctggggtggggtcttccccacctgtctcttatgccttatgggaaggcccagccataactcgggggccatgctggagctggggaccagcttaggcctcctccataggaacccagtgactggggggtgacgcctacacccccagctatttgcactctggtgtgtggtttgactctgcttttcttccggattggccctgtggtcacagcctcagggggccaggctgggggaacctcacctggcccgtactcctgggggtttccctttgccattgggccccctgagggactgtgggggctcaagggtaatgccagaggcccatggccccagcgaggggctgtggggcacctagagttctcggtgtgtctccttcattcattggcctctgctggggcctcctatgggtgtcttacgtctgtccatccatctgtccgtggtcagaagtggggtcagtgtgtgagtgagagcaggagtatttatgaaaataaaacgtcgtttacctggaacacaccagaacacaaac

SEQ ID NO: 350183 - DNA, 1069 bp, Homo Sapiens
  misc_feature (977)..(988): n is a, c, g, or t
ggaattcccgggatctcagtcggcccctcagaccctggagcgatggaggaccccggccccggcgcggtccagcggtgggagcgggcgccgcccacctgtcggatccctgggccatgacccctgggacggcgagggagacaggtgtggacatgagtggctgggatgcagtgccgtagcaggctgggggacacaaaagagaactgacccagcactgctaccctgggcaggagtagaggattagagaaggggacaccgtgagccactcccaagggaatgaaggctttctgaacctggtgtgatgatagagccacgaaccccctgaacaaggagctcgactgggccagcatcaacggcttctgcgagcagctcaacgaggactttgaggggcctccactcgccacccggctgctggcccacaagatccagtccccacaggagtgggaggcgatccaggccttgacggtgagaaggggagaggccaccatccgtcccccgccatgtgacgacaccaaggtgctggaaacatgcatgaagagctgcggcaagcggttccacgacgaagtgggcaagttcccgctttctcaacgagctcatcaaggtcgtgtctcccaagtatctgggcctctccgacatcggagaaggtgaagaacaagatcttggagctcctctacagctggacagtgggcctgcccgaggaggtgaaaatcgcagaggcctaccagatgctaaagaaataggaatgtggacctttgaagatgaccgagaaactccaagatgttgggcccgcctgctgaaaagctcccatcccgaagaacctccgttcagccaataagctccttaaaaaaatggcgccgcagcaccccaactggttggggcaaaatcctccaaaagcctgcactgccctccatttggcgcacccccccgcggaaccggctcttatcaccgtgccccgcgccccccgctctgttttacgcctnnnnnnnnnnnntatctatgcgatctccctcacccccttcacactcctgtcgtgcacccctcgtgcccccacgtcctcgacaacatgtgtttc

SEQ ID NO: 350184 - DNA, 829 bp, Homo Sapiens
  misc_feature (699)..(699): n is a, c, g, or t
ttttttttaacatacaggtgaaaaaggcagaagtaaggccagtccagctgggttggctgacgtcatctctgagggctctgccaggtggattaggtgaagagaggttttatgggcctctaagcaccggccagtagtggggaatgccacatgcaatgggtgagtggggatctggggggggtcaggaccttgcttttcttccaatctctccttcttagccagaactttgcgagagcccctttgatttctcttccctctattcccctcctttccccaaatgtgctaaggtcccaattcccagacccctcccaggactcaagaattgggatagtcaagcaacaaacacaccaagacaggcttcccttgtacagtaaaaagggtcatttttattttgtttccttttggcttagaggagtgatggactttttatcacgtctcattagggcagcattggcctccatgcattcactaatacactaatcttcactgttggtcttttacaggtttacgttggttgcagcaaaaaataaaagaactctgggcactgtcgctttaggggctttgactgggagtttgtttatctctctccagtcaacttctgacgccaaaagtggctcgtttagaaaggagtgagagtaggccatgttaacatggaagtttcttcctcctctcgtcctctgctttaaattacagagtctcctncatcctaagcaacaaggaggttaaggaaagaagagggggaaaatgtttttcacacacaaaccagcaaccatgtcagctgctgctcagtggctttggctctgcattttaaattattaacagcatcacacat

SEQ ID NO: 350185 - DNA, 1448 bp, Homo Sapiens
cccgcggcctggagctgaagctggaggcggcgcgggccgaggctgcagagctgggcctgcggctgagcgcagccgagggccgggcacaaggcctggaggcctgagctggcccgcgtggagtgtgcagcggcgcgctggcggaggcccagctgggtggcctgcgctcggctctgcgccggggcctcggcctcggtcgcgcgcccagcccagccccgcggccagtgcccggttcccctgcccgggactgcacccgcaagaaggaagctgggggaaggggctcaacagtcctccagcagccttaggaatgcagccctgggtcccagccaccatctccaggacctgccacctccccagcctctccagacctggacccggaggcagtgcgcggggccctccgggaattcctgcaagagctgcggagtgcccagagagaacgggacgaacttcggacccagaccagtgccctgaatcgccagctggccgagatggaggctgagagggacagcgcaacctcgagggccaggcagctgcagaaggcggtggctgagagtgaggaagcccggcgcagtgtggatgggcggctgagcggggtccaggcggagctggcgctgcaggaggagagtgtgcggcgcagtgagcgggagcgccgggccacgctggaccaggtggccacactggagaggagcctgcaggccaccgagagcgagctccgggccagccaggagaagatcagcaagatgaaggccaatgagacaaagctggagggcgacaagcggcgcctgaaggaggttctggacgcctccgagagccgcactgtcaagctggagctgcagcggcgctcgcttgagggggagctgcagcgcagccgcctgggcctcagtgaccgcgaggcccaagcccaggccctccaggatcgggtggattccctgcagagacaggtggccgacagcgaggtgaaggcagggaccctgcagctgaccgtggagcggctgaatggggccctggccaaggtggaggaaagcgagggggccctgcgggacaaggtgcggggcctgacagaggccctggcccagagcagtgccagcctcaacagcacccgggacaagaacctgcatctgcagaaggctctgaccgcctgtgaacatgaccgccaagtactccaggaacggctggatgccgcccggcaggcattatctgaggcacggaagcagagcagctccctgggcgagcaggtgcagacgttgcgaggcgaggtggctgacctggaactgcagcgggtggaggccgagggccagctacaacagctacgggaggtgctgcggcagcgggcaggagggtgagggctgcagccctgaaacaccgtccagaagctgcaagacgagcggcgggttgttgcaggagcgcctgggaaggcttgcagcgcgcctggctcaagtggaagctgagga

SEQ ID NO: 350186 - DNA, 969 bp, Homo Sapiens
aaaattgcaaggagacgccgccgccttcatgctgccggcgggctgctcgcgccggctggtggccgagctgcagggcgccctggacgcctgcgcacagcgacaattgcaattggagcagagcctgcgcgtttgccgtcggctgctgcatgcctggtacgcggaccccggacccactggccagacctccctcgggccctcagagtcccgccccgagcgcccagggctgggagaccgggcgcagccgcccacttcggagctgtgggttgtcagtgccaccctccttaccctgcaggctctgagctgggggcctgccgcggggcccggcggccccctcgggtctgtttgggctgggccctgcctcctggccgtgcgatggctgcccgtgtctttgcagggaaccaactgggacccgggctttgaagccacctccagggccagaaactaatggagaggacccccttccagcatgcacacccagtccacaagacctcaaagagttggagtttctgacccaggcactggagaaggctgtacgagttcgaagaggcatcactaaggccggagagagagacaaggcccccagcctgaaatctaggtccattgtcacctcttctggcacgacagcctccgccccaccgcattccccaggccaagctggtggccatgcttcagacacgagacccaccaagggcctccgccagaccacggtgcctgccaagggccaccctgagcgccggctgctgtcaagtgggggatggggacccgtgttggggatggggagcccgaacccccaggccttggggcgggccctcagggacccagcaaatggcccccatccgctgctcctcagggccccagaagccttcacccttcaaagaaaaagggggcacctggctgcgggttgcctgcggggatttcaggaaaagcagctttcccagaactccgagcctggggggcccaacttcagtt

SEQ ID NO: 350187 - DNA, 1488 bp, Homo Sapiens
  misc_feature (1348)..(1404): n is a, c, g, or t
ttcagaggcggcaaattgcaaggagacgccgccgccttcatgctgccggcgggctgctcgcgccgggaaccaactgggacccgggctttgaagccacctccagggccagaaactaatggagaggacccccttccagcatgcacacccagtccacaagacctcaaagagttggagtttctgacccaggcactggagaaggctgtacgagttcgaagaggcatcactaaggccggagagagagacaaggcccccagcctgaaatctaggtccattgtcacctcttctggcacgacagcctccgccccaccgcattccccaggccaagctggtggccatgcttcagacacgagacccaccaagggcctccgccagaccacggtgcctgccaagggccaccctgagcgccggctgctgtcagtgggggatgggacccgtgttgggatgggagcccgaacccccaggcctggggcgggcctcagggaccagcaaatggccccatccgctgctcctcaggccccagaagccttcacactcaaggagaaggggcacctgctgcggctgcctgcggcattcaggaaagcagcttcccagaactcgagcctgtgggcccagctcagttccacacagaccagtgattccacggatgccgccgctgccaaaacccagttcctccagaacatgcagacagcttcaggcgggccccagcccaggctcagtgctgtggaggtggaggcggaggcggcgcgcctgcggaaggcctgctcgctgctgagactgcccatgagggaggagctctcagcagccccccatggactggatgcaggagtaccgctgcctggctcacgctggaggggctgccaggccatgggtgggccagtgtctgcacaggctgcaggagctgcgtgcagcggtggcggaacagccaccaagaccatgtcctgtggggaggccccccggagcctcgccgtcctgtgggggtagagcggagcctgcatggagcccccagctgcttgtctactccagcacccaggagctgcagaccctggcggccctcaagctgcgagtggctgtgctggaccagcagatccacttggaaaaggtgcttctggaagaggaggtgggggtgcaacagaggtccgcagccttgaggacccgagggtaggggcttgactgctccaccccccaggacccaggaggatgggggcaagcctggggtctgtgtgtgtgggttgggaagtgcatgggtcagaaggggcctgggacggcaagaagggagcctgggagcctcccaaaggaggaggagggctgaaaccctggggggcccccaaaccctggtccccagaattgnnnnnnnnnnnnnnnnnnnnnnnnnnnnnnnnnnnnnnnnnnnnnnnnnnnnnnnnnaagggtccctgaagggcctgaaactcccttccccccctgggaaagctgttgtcacccagcccgcagggggcgcgggccccttgc

SEQ ID NO: 350188 - DNA, 899 bp, Homo Sapiens
  misc_feature (45)..(45): n is a, c, g, or t
  misc_feature (53)..(53): n is a, c, g, or t
  misc_feature (79)..(80): n is a, c, g, or t
gcgccagtcctcagcaaggcgaggcagggccttccggcagggggncccgggcnttcggccttccaccttcccacagcanntgagcctggggctggggccccgcctgaagctgtctgcatgttctgagggaactgggttttggcagcggcggcatccgtgaattcactggtctgtgtggaactgtagctgggcccacaggctcgagttctgggaagctgctttcctgaatgccgcaggcagccgcagcaggtgccccttctccttgagtgtgaaggcttctggggcctgaggagcagcggatggggccatttgctggtccctgaggcccgccccaggcctgggggttcgggctcccatcccaacacgggtcccatcccccactgacagcagccggcgctcagggtggcccttggcaggcaccgtggtctggcggaggcccttggtgggtctcgtgtctgaagcatggccaccagcttggcctggggaatgcggtggggcggaggctgtcgtgccagaagaggtgacaatggacctagatttcaggctgggggccttgtctctctctccggccttagtgatgcctcttcgaactcgtacagccttctccagtgcctgggtcagaaactccaactctttgaggtcttgtggactgggtgtgcatgctggaagggggtcctctccattagtttctggccctggaggtggcttcaaagcccgggtcccagttggttcccaggcatgcagcagccgacggcaaacgcgcaggctctgctccaattgcaattgtcgctgtgcgcaggcgtccagggcgccctgcagctcggccaccagccggcgcgagcagcccgccggcagcatgaaggcggcggcgtctccttgcaatttgccgcctctccgct

SEQ ID NO: 350189 - DNA, 1077 bp, Homo Sapiens
  misc_feature (834)..(834): n is a, c, g, or t
  misc_feature (858)..(858): n is a, c, g, or t
  misc_feature (941)..(941): n is a, c, g, or t
  misc_feature (970)..(970): n is a, c, g, or t
  misc_feature (976)..(976): n is a, c, g, or t
  misc_feature (997)..(998): n is a, c, g, or t
  misc_feature (1001)..(1001): n is a, c, g, or t
  misc_feature (1004)..(1004): n is a, c, g, or t
  misc_feature (1008)..(1008): n is a, c, g, or t
  misc_feature (1012)..(1012): n is a, c, g, or t
  misc_feature (1022)..(1022): n is a, c, g, or t
  misc_feature (1025)..(1027): n is a, c, g, or t
  misc_feature (1036)..(1036): n is a, c, g, or t
  misc_feature (1050)..(1050): n is a, c, g, or t
  misc_feature (1063)..(1063): n is a, c, g, or t
  misc_feature (1065)..(1065): n is a, c, g, or t
atttccgcttccggtgcgggccgcgcgcgagcgcagcggtgggaggcggcgaccagccggttgaggccccaggcttggcctcaccacaatgtggcacgaggctcggaagcatgagcggaagcttcgaggcatgatggtcgactacaagaagagggcggagcggagacgggagtattatgaaaagatcaagaaggacccagcccagttcctgcaggtacatggccgagcttgcaaggtgcacctggattctgcagtcgccctggccgctgagagccctgttaatatgatgccctggcagggggacaccaacaacatgattgaccgattcgatgtccgtgcccacctggaccacatccccgactacaccccccctctgctcaccaccatctccccagaacaggagtcggacgaacggaagtgtaactacgagcgctacagaggcctggtgcagaacgactttgccggcatctcagaggagcagtgcctgtaccagatctacattgatgagttgtacggaggcctccagagacccagcgaagatgagaagaagaagctggcagagaagaaggcttccatcggttatacctacgaggacagcacggtggccgaggtagagaaggcggcagaaaagccagaggaggaggagtcagcggccgaggaggagagcaactcggacgaagatgaggtcatccccgacatcgacgtggaggtggacgtggatgaattgaaccaggagcaggtgggcagatctcaacaaacaggccacgacttatggcatggccgacggtgacttcgtcaggatgctccggaaagacaaggaggaggcagaggccntcaagcatgccaagggctcttganggaggagaaggccatgtactcgggacgccgctctcgacgccagcggagaagagtttcgggagaagcggctgaggggtcgcaanatcagccacccagctatgcccgccgaganagcccncctatgaccctataagcggtnnccncgngtcnactnaaagtccgcnccnnnccgctcccngacccgggcgggangagaaatacgttnanacagttttgggg

SEQ ID NO: 350190 - DNA, 1473 bp, Homo Sapiens
  misc_feature (23)..(23): n is a, c, g, or t
  misc_feature (28)..(28): n is a, c, g, or t
  misc_feature (475)..(498): n is a, c, g, or t
  misc_feature (1274)..(1274): n is a, c, g, or t
  misc_feature (1385)..(1418): n is a, c, g, or t
tcccgcctcttctcccccctccncagcncaagctgacgcctcaggagaagctgaaactgaggatgcagaaggcgctgaacaggcagaggccatcaagcatgccaaggctcttgaggaggagaaggccatgtactcgggacgccgctctcgacgccagcggagagagtttcgggagaagcggctgaggggtcgcaagatcagcccacccagctatgcccgccgagacagccccacctatgacccctataagcggtcaccctcggagtccagctcagagtcccgctcccgctcccgctccccgaccccgggccgcgaggagaagatcacgttcatcaccagttttgggggcagcgatgaggaggcagccgcagccgctgctgccgcagcagcatcaggagtcaccacagggaagccccccgcacctccccagcctggcggccccgccccgggacgtaatgccagcgcccgccgccgnnnnnnnnnnnnnnnnnnnnnnnnttctgcctcgaggacctccagctcccgctccagctctcgctccagctcccgctctcgccgtggtgggggctactaccgttccggccgccacgcccgctcccggtcccgctcctggtcccgctcccgctcccgctcccggcgctattcccggtcccgtagccgtggccggcggcactcaggtgggggctcccgagacggacaccggtactcccgctcgcccgcccggcgtggtggttacgggccccggcgcagaagcaggagccgctcccactcaggggaccgctacaggcggggcggccggggcctcaggcaccacagcagtagccgcagccgcagcagctggtccctcagcccgtcccgcagtcgcagcctgactcgcacccgcagccatagccccagccccagccagagccgcacccgcagccgcagccgcaggccacagcccctcgccatcacccgcaagagagaagctgaccaggccggccgcgtcccctgctgtgggcgagaagctgaaaaagaccgaacctgccgctggtaaagagacaggagctgccaaacccaagctgacgcctcaggagaagctgaaactgaggatgcagaaggcgctgaacaggcagttcaaggcggataagaaggcggcacaagaaaagatgatccagcaggagcatgagcggcaggagcgggaagacgagcttcgagccatggcccgcaagatccgcatgaaggagcgggaacgccgagagaaggagagagaagagtgggaacgccagtacagnccggcagagccgctcaccctccccccgatacagtcgagaatacagctcttctcgaaggcgctcaaggtcccgatcccgaagcccccattaccgacattaggcagaagagtnnnnnnnnnnnnnnnnnnnnnnnnnnnnnnnnnnctcaagctgtgatgctgctggttttatctctagtgaaataaagtcaaaagttatt

SEQ ID NO: 350191 - DNA, 2440 bp, Homo Sapiens
  misc_feature (13)..(13): n is a, c, g, or t
  misc_feature (23)..(23): n is a, c, g, or t
  misc_feature (1096)..(1104): n is a, c, g, or t
  misc_feature (1115)..(1115): n is a, c, g, or t
  misc_feature (1310)..(1347): n is a, c, g, or t
  misc_feature (1695)..(1724): n is a, c, g, or t
  misc_feature (2123)..(2123): n is a, c, g, or t
tttttgactcccnccccctttangctcgcccagccctccccctgctgctgagaagtgggggagggtctcggcctccaggttcccgccccaccggggcccgggcgagcatggggggcaagcagagcacggcggcccgctcccggggccccttcccgggggtctccaccgatgacagcgccgtgccgccgccgggaggggcgccccatttcgggcactaccggacgggcggcggggccatggggctgcgcagccgctcggtcagctcggtggcaggcatgggcatggaccccagcacggccgggggggtgccctttggcctctacacccccgcctcccggggcaccggcgactccgagagggcgcccggcggcggagggtctgcgtccgactccacctatgcccatggcaatggttaccaggagacgggcggcggtcaccatagagacgggatgctgtacctgggctcccgagcctcgctggcggatgctctacctctgcacatcgcacccaggtggttcagctcgcatagtggtttcaagtgccccatttgctccaagtctgtggcttctgacgagatggaaatgcactttataatgtgtttgagcaaacctcgcctctcctacaacgatgatgtgctgactaaagacgcgggtgagtgtgtgatctgcctggaggagctgctgcagggggacacgatagccaggctgccctgcctgtgcatctatcacaaaagctgcatagactcgtggtttgaagtgaacagatcttgtccggaacaccctgcggactgacctgcgggcttgcttgctgactcctctcaaagggacagagcgcccctgctccagggaggaggctcaccggaccctggggcagagctgagcttgggacaccagcgggaacagggcaccccttctgcactgacttccagatcatggttctcccttcctccctgaggacaccaaattggatgagagcaagtttgagagaagaatgaatcaactgctatccttcccctcacccctcagcccaggagggaaagggcattttctttttcatctttgaaaggcattgtgggtctgtctttaaagtgtttacnnnnnnnnnttatataaaanaaaagtctagtgtcgactggtgttttccctcgtgatgtttacagcttgctgtttgctgcccagccataacccactcagtgacagacgaacacagctaaggcctcgctgccagccttctgacggcgggcgagcacacggtctcttcccctgccccaactggccctctccaccaccaacttctctactttgggtttnnnnnnnnnnnnnnnnnnnnnnnnnnnnnnnnnnnnnngctcgtttctccccttgagaccctaatatcttgacttcattgccaaaaaacaacccattgagaactttcttcctactgatcccatctcttttcccttctttcctcctggttccggtcagttcagaggatttaacaatcacaagtgtcctgcaaaaatgcctgaacattattcttaggccctcgtggatttattttttcagaaaacttaaacaaaaaaagacttactaagaaatatgtacagctacccctgttttcaggcactatgtttgagaacattttagccattgatgttcacacgtggcatcagcccatgcaagataggtttctgtatttatatattaaaatacnnnnnnnnnnnnnnnnnnnnnnnnnnnnnntgttcaaagcttgggagaaaagctttcttcattagtcaaggtgttttgatatggtattaaaatgtctaataaaagatggcactgcgtgattttattttaatgaagtgttatacaatcaagaaatgggggcaagggcctgccccccactccctcacctacctccttagcattccttcaggctgctactcggggctccaggtgtgtgaattggtcctcagatagtcaggcctgcgtggagggagtggcaagtcaggcgtgcctcctacaagcttcctaacctcttaagcatcatggaacccgtcagccctctgtggagtcattgtgccggacctctgaaaagatctgcaggggccaagatgttgcagccaccggaagctgcaaggaatggggttcttcccngttgggggccagccccccctcctccagccttttgcctcccaatcccacgttccattccccctggcctggttggttcagttttgcggtctcaagtggttgactcaccgggccatgctttcattgaagggccccagaatagaggcgcccggcttttgtgggcgctgtgccccgatcccccaaacccctttgtgaacctgaaaccaacctgtgctcacgggcctcccacaaaaagtttgggcaaaaaaggcgcgcccttgggtgtcaggccccccctttctggggccccagggggccacccctcccactgtgtccctgtc

SEQ ID NO: 350192 - DNA, 1023 bp, Homo Sapiens
  misc_feature (13)..(13): n is a, c, g, or t
  misc_feature (39)..(39): n is a, c, g, or t
  misc_feature (67)..(67): n is a, c, g, or t
  misc_feature (84)..(84): n is a, c, g, or t
  misc_feature (100)..(100): n is a, c, g, or t
  misc_feature (259)..(259): n is a, c, g, or t
atcaattctgccnaaattaaggaaaaccttgaatgcaanattctaaaacccaaggttcctgccaacnaactcaaaaaaagcccnaaaggtcttcaacccnagacgggtcccgcgctaagacccaagctctgaaaccaccaaagtcttctttagtgtttcctccgctggccctggctcacgtttgcccactggcctgttgtgaaatgcccttgcacagagtaggtgcttctggaagcatctgatggagggtgactgcggnagccaggggccgtggcagcagggggatggtccagcacatcaggcgggcctgagaagggtcagagcagagaggcggtggagtcgtctccctctagagctttccttcgctggctctgcaggaggctctggaatgctgctccgggacccgctgggcacggggacacaggccaggcctgcactgctgctccctgccccgagctgcctgcccagcccgcattttgccaacttttgtgagcctgagcagttggttctggttcaagggctctgagctggcacagccccaaaccagggcctcttcctgggcctcaatgaagcatgcccgtgagtcagcactgagacgcaaactgaacaacaggcagggcgagtggaacgtgggatggggagcaaaggctggaaggaggggggctgggcccacacctggaagaacccacatccttgcagcctccggtggctgcaacatcttggcccctgtagatcttttcagaggtccggcacaatgactccacagagggctgactggttccatgatgcttaagaggttaggaagcttgtaggaggcacgcctgacttgccactccctccacccaggcctgactatctgaggaccaattcacacacctggagccccgagtagcagcctgaaggaatgctaaggaggtaggtgagggagtggggggcaggcccttgcccccatttcttgattgtataacacttcattaaaataaaatcacgcagtgccatcttttattagacattttaatacca

SEQ ID NO: 350193 - DNA, 1092 bp, Homo Sapiens
  misc_feature (4)..(4): n is a, c, g, or t
  misc_feature (135)..(135): n is a, c, g, or t
  misc_feature (156)..(156): n is a, c, g, or t
ccgncccaggcctcgtgaagtccacactatgcgccaggctctgccgcatctggttactgaacaggcggacacagacgctctggaggtactcaggggtgatcatcttgccgctgactgtggcctctagagaatccnaccagctctgctgtgactccnaatgagattgtggtagtcggcctggatcttattgtaccgtttgaggtatgtcactgacctacgttcagcttcaaccagctgctggtggagctgctgcaagatttctttgttactttgtccattctccttatatattgttaaaagctttggcgtgttgctggctttaggatattaaagcttagaaactttttccaacttcaaactttgaactctggagtccaggaaatcctggaagagttctttaaatgaagggtggcaccatagggttgggaacaaaaggaaggggcatagaaaggaagaaactctgtggtctggctcaaggctgcccctttggtctccaggtaggttttgaagtaggaaatcttttcatccagctcctctttgtccggtctccccacagagtacttcaaaagatagatggcaaaatggatgtggagatagaattccagcttctgggcaaaggagtccccatctcggatggaacttgaaatgtgctcctcccacagatcgaagaacaccttctggtctccgttgtcaaatgcagcgacaagatccttctgaattgtcaatgatttggagtctctgaaagatccgcctactgttttacacaatggttttccttttattttgcattcttttgaaaatgttttcaaggtgtcttcaaattcagcaaaatctaaatactctttcactagtccaagtaattcagattcatgagccagaatgtcccccatattgaactgttactggtaattaattctcacagcaaaaatctctgctgctcggccgcggacactcgcgctatcccagcccggccgccacctccgcagccgtcacccgggcaaccgccgccgccaccccggcgtcacgtgggggcggcgcagccaatcgcgcggggcgccgccgacgcggagcagcctgggagggatcccgaga

SEQ ID NO: 350194 - DNA, 951 bp, Homo Sapiens
ctaagcagtgtaacaccgttataaacgaggcagtactataacggttcctaaggtagcgaggctgggtggcggaattcggcacgaggggaggagcagcggtgcgtttggagggccgaggctctgcggacctcttgttccgaggaaaaacccgacgcgcccgctccgccgccgccggatgctaccacttctcgcctgcggtccagggatctttcttcggcaagggccgaggcggccgcctggacatcccaagaaaggacaggcccagctgcttcccagatttttgctgtgagaattaattaccagtaacagttcaatatgggggacattctggctcatgaatctgaattacttggactagtgaaagagtatttagattttgctgaatttgaagacaccttgaaaacattttcaaaagaatgcaaaataaaaggaaaaccatgtgtaaaacagtaggcggatctttcagagactccaaatcattgacaatctcacgaaggatcttgtcgctgcatttgacaacggagaccagaaggtgttcttcgatctgtgggaggagcacatttcaagttccatccgagatggggactcctttgcccagaagctggaattctatctccacatccattttgccatctatcttttgaagtactctgtggggagaccggacaaagaggagctggcatgacacaagattcctacttcaaaacctacctggagaccaaaggggcagccttgagccagaacacagagtttcttcctttactatgcccttcctttggttcccaaccctatggtgcacccctcatttacaagcaactcttccacgattcctggactccaggagttaaagttgaagttggaaagtttctacgctttataatctaaagccagcaacacgccaaaggctttacaatatataggggatggcccagtaacaagaatcctgcagcg

SEQ ID NO: 350195 - DNA, 800 bp, Homo Sapiens
ggggatagttcggtaaactgaattgagaagcggatccgagggaggttgaaagctgtcaagcccgtgtagctctcccgctaggaggcggcacgcgggggaataggggcgctggagtttccccagctctacctcatctttctccacagccatggagccagagagggaagggaccgagagacaccccaggaaggtcagggaaagcaggcaggccccaaataagctggtcggggcagctgaggcgatgaaagccggttgggatctcgaggagagtcagcccgaggccaagaaagcccgcttatctaccattttatttactgacaactgtgaagtaacccatgaccagctgtgtgaattgctgaagtatgcagttctgggcaaatccaatgttccaaaacccagctggtgccagctttttcatcaaaaccacctaaacaacgtagtggttttggttctgcagggaatgagtcagctacacttttacaggttctatgtggagtttggatgtcttcgaaaagcattcagacataaattccgcttgcctccaccatcatctgattttctagctgatgatgttgggctacaaactgaacaaagagctggagatctgcccaagacaattggaagggcctttaccttctaatgcaaaagccgccatctaaccttcaggatgatcccatcattcaaaagtatggctctaagaaagtgggcttgaccagatgccttctgacaaagggaggcaaaggagaacgtttcactttccattacaaggtttcctgatgtgaaaactttttactttacag

SEQ ID NO: 350196 - DNA, 1842 bp, Homo Sapiens
  misc_feature (155)..(155): n is a, c, g, or t
agaggggaatcttgttcccaggcctctttcccccttgatgccaaattcccttttttccaggattcccttcccaagggcttttatgcccaagtgggccagctttttaaggctttcataccgtattccagaaaggaggctgacgggtttcaaagaancaaaaatccattggctgggactgggccaaaagcttttaaacagccttcttcagagcccctgagattgccattttttgctaaatggcccagcatagacagttgatatctctgtccacttgatcctcatccttttgttcatctcctcagtgaggacaggtgaaaaggccttaaaagagaactgaacaatgctgaagggaaacagggggatttcccactctggcctgctcaagaacctctttatttgaaagacacttaatagtttgacaatttctggaagatggaagttcaccagcatctgtctcccgggtcaaaaaaagaagcttctgacccactgaatccaagcattctaaaacacttgtgtttgggtgctgaagtacttctgctgtgtttttaggctcttggcctgctgcttgtatttcttggtgattagctagtgcttctagatttagttctgcaatcttttttgggccatgcttaaggaaataccgagccaattcaaggattgttctagcatcttctgtggcatcatgaccaagtctgtctggacactgtatatccttccccaaaataactttggctaagaacttgagcttaaatcttctgccctgctctctgacataaagcaacgatgtatcaataacatatggatgtatcattttcagtgctctgagatccaaatctaaggagtggcccactaacacagcatcaggaggaagcagtgcttttaactgcctctgtacatctttgagtttggtcgtcactgggttaagaatcttcttcgtgattcccgaaaagctggtgaggtagtccagaatcttgttttcaggtttgaccagttcatccataacacagcagcctccttcagcaaccagtgagatgcgtgttagctctctccccttggatgtgaggcacatttcacagtcaagtccaaagagaggactattgtctgctatagaaccattacatttggtaagtaaaaagttttcacaatcaggaaaaccttgtaatggaaagtgaaacgttctcatttcctcctttgtcagaaggcatctggtcaagcccactttcttagagccatacttttgaatgatgggatcatcctgaaggttgatggcggcttttgcattagaaggtaaaggcccttccattgtcttgggcagatctccagctctttgttcagtttgtagcccaacaacatcagctagaaaatcagatgatggtggaggcaagcggaatttatgtctgaatgcttttcgaagacatccaaactccaaatagaacctgtaaaagtgtagctgactcattccctgcagaacaaaaaccactacgttgtttaggtggttttgatgaaaaagctggcaccagctgggttttggaacattggatttgcccagaactgcatacttcagcaattcacacagctggtcatgggttacttcacagttgtcagtaaataaaatggtagataagcgggctttcttggcctcgggctgactctcctcgagatcccaaccggctttcatcgcctcagctgccccgaccagcttatttggggcctgcctgctttccctgaccttcctggggtgtctctcggtcccttccctctctggctccatggcgaactatccccgttcccctaaaaaagcgaaggtgccaacgatctccccgttccgcggactggacaccc

SEQ ID NO: 350197 - DNA, 850 bp, Homo Sapiens
  misc_feature (699)..(699): n is a, c, g, or t
gccggaagtcgctcgacttctacttccggtccgttcaaaaagcccgcgaggctgaggggcggtggttgttggcagctgtggctaaggaggggagaacctctgctccccgcccgtcttctcttctgcgtttcccgggctagggggcgtggggagtggttttaggcggcgaagccgctcggcagcaccttccttctttgccaggcagacgcccgttgtagccgttggggaaccgttgagaatccggtaaccgatgcggacgccatggagccagagagggaagggaccgagagacaccccaggaaggtcagggaaagcaggcaggccccaaataagctggtcggggcagctgaggcgatgaaagccggttgggatctcgaggagagtcagcccgaggccaagaaagcccgcttatctaccattttatttactgacaactgtgaagtaacccatgaccagctgtgtgaattgctgaagtatgcagttctgggcaaatccaatgttccaaaacccaggggaatgagtcagctacacttttacaggttctatttggagttggatgtcttcgaaaagcattcagacataaaattccgcttgcctccaccatcatctgattttctagctgatgttgtgggctacaaactgaacaaagagctggagatctgcccaagacaattggaagggcctttaccttctaatgcnataagccgccatcaacttcaggatgatcccatcattcaaaagtatggctctaagaaagtgggcttgaccagatgccttctgacaaggaggaacttgagaacgtttcactttccattacaaggtttcctgattgtgaaactttttacttacc

SEQ ID NO: 350198 - DNA, 1068 bp, Homo Sapiens
  misc_feature (1014)..(1014): n is a, c, g, or t
cggtccggaattcccgggatcttctacttccggtccgttcaaaagcccgcgaggctgaggggcggttgttgttggcagctgtggctaaggaggggagaacctctgctccccgcccgtcttctcttctgcgtttcccgggctagggggcgtggggagtggttttaggcggcgaagccgctcggcagcaccttccttctttgccaggcagacgcccgttgtagccgttggggaaccgttgagaatccgccatggagccagagagggaagggaccgagagacaccccaggaaggtcagggaaagcaggcaggccccaaataagctggtcggggcagctgaggcgatgaaagccggttgggatctcgaggagagtcagcccgaggccaagaaagcccgcttatctaccattttatttactgacaactgtgaagtaacccatgaccagctgtgtgaattgctgaagtatgcagttctgggcaaatccaatgttccaaaacccagctggtgccagctttttcatcaaaaccacctaaacaacgtagtggtttttgttctgcagggaatgagtcagctacacttttacaggttctatttggagtttggatgtcttcgaaaagcattcagacataaattccgcttgcctccaccatcatctgattttctagctgatgttgttgggctacaaactgaacaaagagctggagatctgcccaagacaatggaagggcctttaccttctaatgcaaaagccgccatcaaccttcaggatgatcccatcattcaaaagtatggctctaagaaagtgggcttgaccagatgccttctgacaaaggaggaaatgagaacggttcccttttccattacaggcttttcctgattgtggaaaacttttttacttaccaaatggtaatgggttctatagccagaacataagccctctcctttggaatctggacgggggaaatgggcctctccatcccagggggaagagaagcttaacccccattctccctggntggcctgaaggaagggtgcctgggctttcagggatgaaactggggccaaaccgg

SEQ ID NO: 350199 - DNA, 1524 bp, Homo Sapiens
  misc_feature (441)..(441): n is a, c, g, or t
  misc_feature (598)..(717): n is a, c, g, or t
aaaggacaccacaggggggggcgatagagtcgctatgagcgagtctccttccacggtataatgataagaggctcacgattatttgcgcgagtgttcgataggtcttgtttagggaaaggtatgttggggggttcgtaatggtctttggcacccgggagggccacataggtggtagaaggggcaacagccccacgggggcaacttgttatggacatcgcctagggtgggcccgtactttaaagagaccgtgggggttttcaccccaacacagggggggcccctcggcctttttaaaacgggctccatcggggaccccagtgaaaggtgatgggaagctgctgttttcaggggcgaggtgacaagagggccccccgaattaccgctggactttattccacccagcctctccctggtcggagggctccttggaaatacagaaanctcaggaagcaggtcgcagcccgagtttggaaggatgtttggttaaaaaccagctcaaggcccacctaagggaggcaccagagccccctctagggacgggtcctgccaaggctgttcaggcctgggatgctgggcagaagtggctcacacctgtagnnnnnnnnnnnnnnnnnnnnnnnnnnnnnnnnnnnnnnnnnnnnnnnnnnnnnnnnnnnnnnnnnnnnnnnnnnnnnnnnnnnnnnnnnnnnnnnnnnnnnnnnnnnnnnnnnnnnnnnncccccatgggcttctggcaggctcctgtcccacctgaccgggctcaggcgaggtcccagctcacagcccccaagcctgacatccaagccccagcaggagggatggatggacatggggggccctcctggctaggggtcctcccgggagcttggccccctgaagaaatcaggccaaacacactgatgccaacactctcctccccagagccgaaaacccacaagcagggccctgatgagggcaaagaaccctcttctctggaggacacagagagaggctgaacttgggctacaccctctgcctgcaagacttgccaccctgggtagtgacgtcggcgaaacaggaaggtggggacgccatgctctcaggagggagagccctggctgaacttcgccgtaggggaccgatgtacccagcagagggtctgcagaagccatgagcacatgggtgcgtggggagagcagcctctaacccagtgtagaccaagcatccgggcctgaccaaggacacagacggcgggtctatgtacacggcgcaacctccccacgtgggcctgcccctcaggaagcggctcgtcaaatcacagtattttcacatcacaaagcaaaaggctgattcccttaagctgtcttgtttcagaaagtcttggcaattcaagaatatgtagtagtgatatataaaaaaaccacacgtacgcacacacaaaaggccgtgatacagaccccctgggaggcccgcccaggtccaggaggggcgtgaatccttctggaacacagggacgcctggctgctggctcctggctgggccccg

SEQ ID NO: 350200 - DNA, 1829 bp, Homo Sapiens
  misc_feature (1408)..(1534): n is a, c, g, or t
  misc_feature (1655)..(1655): n is a, c, g, or t
cttgacggaccgaccacaatcatgggcccacgggacgtccgtggcagagtatacatgctagggttgggggagagccagcctgggcacagaggagcacaggcaggaacagggctcggaccggcgggtttgcatatatcagtggggccacccagcccctaggggacagtttcctactcaggggcacggcagggccagtggactttggctgccaaagccctccctccccaggcctactggccaagtccatggctaagtcccctcctggtgggcaggagatcagaagttcttgatggctgggctgggcaagggttgcccccaaattccagaacacttcgagatgggggccatcccccgaccccaacacatgccacctgtccctgggctcctgggggttggggtgctggccaggagcccagaaggtggatacaggctctggaatcatcagagccagcaccaccccaaggcccagcccttgccccccatcctgcccaggaggagcccggggccctgagacctgcaggtttgagaaagtgacaagagagaaactgaggctgggatcacgaggcactcactcctgccccacccatgccctcaggaactccccagccacccaggcctgggggtacaacttactccacctcctgctcccagggggagaatggtgtctgtggccagtggggctgggtggacacctgtgccacacggaagagtatggggtgcctgacccctgcctggccaggaccctggaaggccaagggccgcagggaacaggacacttggctcaggtggagctgacgggagaatgtcccagggacccccaaatcacatgccgcaagagcccccaggaaatggaggcccctggtccatggtgaatgggggtagaaagagacccaggtgtccatgtagcccaggcaggcctcccagggtgagtgaggggccgagtcttgcccctgctcttaggctgtgtagggaaggctctggcgcccgcacgccctggcccagggcaccacatgtgggtgacgggccaggcccaggggcacatctgtgccatcggctttgtggcccttgctctgagagcccctgcgtcccacccccacacagagggcccctcggcctctgagacggctccatcgggacccagtgaaggtgatgggagctgctgttttcagggcgaggtgacagaggacccccgaataccgctggaccttactccaccagcctctccctggtcggagggctccttggaaatacagaaaactcaggaagcaggtcgcagcccgagtttggaaggatgtttggttaaaaaccagctcaaggcccacctaagggaggcaccagagccccctctagggacgggtcctgccaaggctgttcaggcctgggatgctgggcagaagtggctcacacnnnnnnnnnnnnnnnnnnnnnnnnnnnnnnnnnnnnnnnnnnnnnnnnnnnnnnnnnnnnnnnnnnnnnnnnnnnnnnnnnnnnnnnnnnnnnnnnnnnnnnnnnnnnnnnnnnnnnnnnnnnnnnncccccatgggcttctggcaggctcctgtcccacctgaccgggctcaggcgaggtcccagctcacagcccccaagcctgacatccaagccccagcaggagggatggatggacatggggggcncctcctggctaggggtcctcccgggagcttggccccctgaagaaatcaggccaaacacactgatgccaacactctcctccccagagccgaaaacccacaagcagggccctgatgagggcaaagaaccctcttctctggaggacacagagagaggatcccgggaattccggaccg

SEQ ID NO: 350201 - DNA, 1285 bp, Homo Sapiens
  misc_feature (987)..(987): n is a, c, g, or t
gcggccgccaagaaagccctacagacgctgcgcggctgggactctgtggacagggaggtggccgagatccggcaggaggatgaggcagagaaggccgcgggcttcatctccgtgctgaagctgttccttctgcgccgtgttcgtggtggagctcctgggtcggaggctgctgctgctgctgggcttctccatctgcctcatagcctgctgcgtgctcactgcagctctggcactgcaggacacagtgtcctggatgccatacatcagcatcgtctgtgtcatctcctacgtcataggacatgccctcgggcccagtcccatacccgcgctgctcatcactgagatcttcctgcagtcctctcggccatctgccttcatggtggggggcagtgtgcactggctctccaacttcaccgtggcctggatcttcccgttcatccaggagggcctccgcccgtacagcttcattgtcttcgccgcgatccgcctcctcaccaccatctacatcttcttgattgtcccggagaccaaggccaagacgttcatagagatcaaccagattttcaccaagatgaataaggtgtctgaagtgtacccggaaaaggaggaactgaaagagcttccacctgtcacttcggaacagtgactctggagaggaagccagtggagctggtctgccaggggcttcccactttggcttatttttctgacttctagctgtctgtgaatatccagaaataaaacaactctgatgtggaatgcagtcctcatctccagcctccccaccccagtggaaactgtgcaaagggctgccttgctgttcttgaagctgggctgtctctctccatgttggcctgtcaccagacccgagtcaattaaacagctggtcctccactttgctggttcagccttcgtgtggctcctggtaacgtggctccaccttgatgggtcaacctttgtgtggctcctggtaacataacaacaacnagttactatagtggtgagatggaaggaatcaaattttgccagagaaactaacttggtggccccgacaggtcttccggggccatgggcatttgtttagagccaaattcatcctcttaccagatccttttccagaaatacctgtctaggaaggtgtgatgtcagaaacaatgacatccagaaagctgaggaacaggttcctgtggagacactgagtcagaattcttcatccataaattatgttgttagtggaaaatggaattgattctgtgtagtcaataaaatgaacctgatcactttt

SEQ ID NO: 350202 - DNA, 1466 bp, Homo Sapiens
gatgagcagcgcggtactggactgggaccgaggcatgtcctatgacgtaggagatgacacagacgatgctgatgtatggcatccaggacactgtgtcctgcagtgccagagctgcagtgagcacgcagcaggctatgaggcagatggagaagcccagcagcagcagcagcctccgacccaggagctccaccacgaacacggcgcagaaggtcacgaccacgcccacggccccggcgccggccgtcacgtactgcacgtgctccctcggcacgccggcgctcaggtagatctggtccgcgtagtagtagatagcgttgacgcccgacagctgtggccgcccatgaggacgatgatggacagcactgccacgcagcgagcgcatccggaacagcttcagcacggagatgaagcccgcggccttctctgccacatcctcctgccggatctcggacacctccctgtccacagagtcccagccacgcagcgtctgtagggctttcttggcggccgcttcgtctttcttctgaatcaagcaggtacctggggctctcggggaagaagggcagcagaaggagctgcagcgccgcggggaccccggtcagccccagcaggatcggccagccatctacgtttgcaaggagattccgaagaccaaagatctgggccacaaggatgccaacagtgatgaagagctggggcaccaccccgagagccccccgcaggtttttaggggccagctcccctaagtacatggggaccacgttggaagatacacctgcacatattcccaccaaaagtctggaaataatgataagctcaaatgatgtggcgactctgctgcatcccattaagatcgcaggcacgatagaaaatatgttgttgaacagcaaggccccttttctgccaaatttattcaccaaggggccgaccaggagggatccgataaaccctccaaatggaaacatggacacggttacagaccacagcaacgtcaaggggaagtcttccatgaattcaccggtcctaccatagtaagtctcattgtaaaattgttgcatgagcagtgctggggagttgacagcagccacgttgtacccatactggaaggatgacccaaaggcagctatcagggttgccagggcaagcacaagcgtcagcctcccttccttcatgctctgatcctgttgctccatgcttgctctggaagggcagagtgccgctcacctccttttagccaaagtaacgcgtgcacccggccattgcacagcacccgcaggacttctccttggtgttgatgtgggcactggctgactgccacagcactctatgcctgctctcgtgactctgtcacgcgtctgcttttcctcctgggataatgtggtgctggatgttgatgaaaagagtcaaactgtttgaaaactacaaccagccccttgggtggctgcagtttgccaaccacgcctggt

SEQ ID NO: 350203 - DNA, 796 bp, Homo Sapiens
gaaacggaagaggaagagatacacacgagggaacgattgcaatagtttttgaaaaccttgaagaaatggagaagaggagaccctgttgaagacatacttaggtggtgaaaaggactttgtaatggttgaatgtggagagtaaagaggaggatcaagaaggaatcctcactccacactgtgacccatcaatggagttcacaaatctaccacagtgtagtacttacagggaagagaaaagaaagcatccttcattgaggtgcctggagaatttcctggtagaaatgttaaacactcaagagcaaaggaggtttcaagcctcagaaaaaaggagagaattaggagcaacagcagaggtagctgcaaaaggacagcgcccagcagtaggagggagagactcactaaggacaaaaccccatgaaatgaccaagatgtacatggtttctttagaggagtatgggcaaaaaagaatgagaaataaaggctaaagatttatgaaaagaatctggacagaattacatctggggcatcaagagaagagaggattttcaagaaaagctgccctggtaaagagggacacagtcttctgctgagatacatgggatggtcacaggattgacatcagggaatctctaattaagaagctgtagggtaggcttccttctccagcgctgtttttgtagagtaaaacagctgaaagtgataatttgaagagtgaactggaggtgaggaagtagagaaaagaggtataaactacccttgtaagaaatgaggtgctaatacattgaaaaggtacagc

SEQ ID NO: 350204 - DNA, 1270 bp, Homo Sapiens
  misc_feature (239)..(274): n is a, c, g, or t
  misc_feature (341)..(384): n is a, c, g, or t
  misc_feature (1190)..(1190): n is a, c, g, or t
agcggaggggccgccggggcccgggggacgcgctcgcgcgggggccgccccctccccttccctccaccctgggcgggggcgcgcgagaagcggtgacgtcaaggggcgcgctgtggcagcacctccccgcgcgctagttaaaaagaagaagaaaagagggaacgaaacatgagaggctgtgtgagaagctgcagccgccggcagaggagacctcagcatcatctagagcccagcgctgnnnnnnnnnnnnnnnnnnnnnnnnnnnnnnnnnnnntttctgttcctgctactgtcccacctaaacaactaccgttacacggacaagtgaacaactgtggctnnnnnnnnnnnnnnnnnnnnnnnnnnnnnnnnnnnnnnnnnnnnccacttcccagccgcagcagaaagcccccaacccaactgacactggcacaactgcaaacggtgtcatccgcacaactttatctcgctcctcgggctcccctaaggcattggacccatcgccgcgtcttttattttttgcaaagttgcatcgctgtacatatttttgtccccgcaacctccctctgtctctggagtgccctacagccccgcaaactcctcctggagctgcgccctagtgcccctgctgggcagtggcgttcccccccatcctcccgcgcccagcccatgctgctctggggcagacgatgctgaagatgctctcctttaagctgctgctgctggccgtggctctgggcttctttgaaggagatgctaagtttggggaaagaaacgaagggagcggagcaaggaggagaaggtgcctgaatgggaaccccccgaagcgcctgaaaaggagagacaggaggatgatgtcccagctggagctgctgagtgggggagagacgctgtgcggtggcttctaccctcggctgtcctgctgcctgcggagtgacagcccggggctagggcgcctggagaataagatattttctgttaccaacaacacagaatgagggaagttactggaggaaatcaaatgtgcactttgctctccacattctcaaagcctgttccactcacctgagagagaagtcttggaaagagacctagtacttcctctgctctgcaaagactattgcaaagaattcttttacacttgccgaggccatattccagggtttccttcaaacaactgcggatgaagnttttgcttttactatgcaagaaagatggtggggggttgtgcttttccaagattttccaagaaaaacagttcagaggacca

SEQ ID NO: 350205 - DNA, 1412 bp, Homo Sapiens
  misc_feature (1208)..(1228): n is a, c, g, or t
gctgggtggcgatttcggcacgaggacgtgacaatcgcggccaccgccaggtggaacggcagttccccattcccctaccgagctgggcagttagccagcccactccaactctcggaaccatgtttgcagacttggattatgacatcgaagaggataaactcggaatcccgactgtgcctgggaaggtgaccctgcagaaggatgctcagaacctgatcgggatcagcattggaggaggggcccagtactgtccctgcctctatatcgtccaggtatttgacaacaccccagcagccttggacggcacagtggcagctggcgatgagatcaccggtgtcaatggcaggtcaatcaaagggaaaactaaggtggaggtggcgaagatgattcaggaggtgaagggggaggtgaccatccactacaacaagctgcaggcggaccccaagcagggcatgtccctggacattgtgttgaagaaagtcaagcaccggctggtggagaacatgagttcagggaccgcagatgctctgggcctgagccgggccatcctgtgcaatgggatgacggaacacaccaagaacctcctacgggccttttatgagctgtcgcagactcaccgggcctttggggacgtgttctccgtgatcggggtgcgggagccccagccagctgcgagcgaggcttttgtgaagttcgccgatgcccaccgcagcatcgagaagttcggcattcggcttctgaaaaccatcaagccgatgctgacggatctgaacacgtacctcaacaaagccatcccggacactcgcctcaccatcaagaagtacctggacgtgaagtttgagtacctgtcgtactgcctgaaggtgaaggagatggatgacgaggaatacagctgcattgccctaggcgagcccctttaccgggtgagcaccggcaactatgagtaccgcctgatcctgcgctgccgccaggaggcgcgcgcccgcttctcccagatgcgcaaggatgtgctggagaagatggagctgctggaccagaagcacgtccaggacatcgtgttccagctgcagcgcctcgtgtccaccatgtccaagtactacaacgactgctacgcagtgctgcgggatgccgacgtcttccccatcgaggtagacctggcgcacaccacattggcctatggcctcaaccaggaggagttcacagatggnnnnnnnnnnnnnnnnnnnnnagacacggcagctggggagccgtccagggatacacgaggggctgctgggcccttggacaagggtggaagctggtgtgactcctgagtgccccgcggctgtggtgccgggggcagggtgcgtgggaggacggagcctgggagcggggcggggccgccgcgcaagggggcgacgcaaaagggcctg

SEQ ID NO: 350206 - DNA, 930 bp, Homo Sapiens
  misc_feature (9)..(9): n is a, c, g, or t
  misc_feature (17)..(17): n is a, c, g, or t
  misc_feature (39)..(39): n is a, c, g, or t
  misc_feature (91)..(91): n is a, c, g, or t
  misc_feature (749)..(749): n is a, c, g, or t
gcttgatgntttcagangccgaatgccgaacttctcgangtgcggtgggcatcggcgacttcacaaaagcctcgctcgcagctggctgggntcccgcaccccgatcacggagaacacgtccccaaaggcccggtgaatctgcgacagctcataaaaggcccgtaggaggttcttggtgtgttccgtcatccctttgtatagctcagcggtccgctccagctcctctagcctcttgacaagcccatcattgcacaggatggcccggctcaggcccagagcatctgcggtccctgaactcatgttctccaccagccggtgcttgactttcttcaacacaatgtccagggacatgccctgcttggggtccgcctgcagcttgttgtagtggatggtcacctcccccttcacctcctgaatcatcttcgccacctccaccttagttttccctttgattgacctgccattgacaccggtgatctcatcgccagctgccactgtgccgtccaaggctgctggggtgttgtcaaatacctggacgatatagaggcagggacagtactgggcccctcctccaatgctgatcccgatcaggttctgagcatccttctgcagggtcaccttcccaggcacagtcgggattccgagtttatcctcttcgatgtcataatccaagtctgcaaacatggttccgagagttggagtgggctggctaactgcccagctcggtaggggaatggggaactgccgtntcccctggcggtggccgcgattgtcacgtcacttccggcaagacgcggaagtcccggctttccccccactggatatttgctccaatccctgcagacaatccttcccttcccggctcccgggacgctcggaaccaagaacgagaacaagtattggcggaagctcgctgttagtaggaacaag

SEQ ID NO: 350207 - DNA, 772 bp, Homo Sapiens
ctgcgggatgccgacgtcttccccatcgaggtagacctggcgcacaccacattggcctatggcctcaaccaggaggagttcacagatggggaggagagaggaggaggaggaagacacggcagctggggagccgtccagggatacacgaggggctgctgggcccttggacaagggtggaagctggtgtgactcctgagtgccccgcggctgtggtgccgggggcagggtgcgtgggaggacggagcctgggagcggggcggggccgccgcgcaagggggcgacgcataaaggcctgctggcttggggcgcctgcctccctgctcctctgtcctcgcacagcgaacctgggctcctgcccaggacaggcaccagggtcatggcctgggacctggacactggcccctccaccctccctcccctcccggctccccggccagagggagagcttggtctctggacctgccttaggaaggagagggagggcaggaaggaaaagaaaggacttggaggtggcaggagtccgagccctgctccttgtgggcgctcacactgcccccggagcctgctgggagtggggccagccgtggacagctgaggttggggtcaatgcctcctgggcacccttgcctcgccccagaccggcccgtccagtccccatcacacctcggcggcctttatttattctgttcccccagctcggccacttctctgaaggagggctgggttctgggcctgtatcgaataaacacaaacctggatggcgcaaaaaaaa

SEQ ID NO: 350208 - DNA, 906 bp, Homo Sapiens
agcggctggtacggcccggagagttatggatccgccaggtggaacggcaggtgggttcaggtaccagcctggccgggacccggctgtgggaccaacgcttccggtgagcgacagaggcagctccccagggcctggagacccgtggggcggactctgggatctgagcctatcgccctggcctggagcccccctttgtacctattccccattcccctaccgagctgggcagttagccagcccactccaactctcggaaccatgtttgcagacttggattatgacatcgaagaggataaactcggaatcccgactgtgcctgggaaggtgaccctgcagaaggatgctcagaacctgatcgggatcagcattggaggaggggcccagtactgtccctgcctctatatcgtccaggtatttgacaacaccccagcagccttggacggcacagtggcagctggcgatgagatcaccggtgtcaatggcaggtcaatcaaagggaaaactaaggtggaggtggcgaagatgattcaggaggtgaagggggaggtgaccatccactacaacaagctgcaggcggaccccaagcagggcatgtccctggacattgtgttgaagaaagtcaagcaccggctggtggagaacatgagttcagggaccgcagatgctctgggcctgagccgggccatcctgtgcaatgatgggcttgtcaagaggctagaggagctggagcggaccgctgagctataccaaagggatgacggaacacaccaaagaacctcctacgggcctttttatgagctgtccgcaaaatcaccgggccttgggtgacgtgttctccgtgatcaggggtgcgggagccccagccagctgcgagcaagcttttgtgaagttcgcggatgcccaccg

SEQ ID NO: 350209 - DNA, 983 bp, Homo Sapiens
ctgccagcgacagggaactgttgaagtaccctccttccactacccacgctgtgtcattagccttgttggagaccccgcaggaacctatgcaggtcacccggatggctgcaaaggggatggctgcatgagccccagccagccgacagcccaggcccctgcttgctgccagcacaggaattcgacctggggccaagcagcaccacctgggcagggtcctgggaaggccagtgagcaagcagcccatgccacttcagaggacatctgcccatctcctgtcttggggggctccaagggaatcaggcaggcgaggggcctgaccagcacaaaacgacgtctgccctgcaatccagagcagaaagaccccaacgctcatccagatgatggctgggttaccccccagattggtaaccttggctcccagccagacctgcgaaagctcagctgcctacaggagacactcgggacacaccaaggggcgcatcttctcgctgccctgtggacaagtcagtcaggcagggaaggacccgtccacactccaggaagctaactgccaaccatcatgctgcaggaatgtggccagacccgcctaggcagacacagtgttccacagtcagcacaccgttgggtggggccctacttcctgggcgagcactgcccagcggggctgactttctgcatcaggagacggctcagtcctctccggcctcctgggggagtgcccagaccaggaactgcttgaggcagaggtggcactgttctgtggccaggaacacaaattccttagtccaacagatgtgtgtccagaaaccatgatgatcagaagatcatggctggacaatcaggtccagcagaagctggtcacaagggaggacagacgcagcagaagtacacacagcacaagacccaggtgggcaggggttgggggagccagtggcaggccacctgcacctccagcccctcttctccctgcagggctgagtcag

SEQ ID NO: 350210 - DNA, 2486 bp, Homo Sapiens
  misc_feature (53)..(53): n is a, c, g, or t
  misc_feature (136)..(136): n is a, c, g, or t
  misc_feature (212)..(212): n is a, c, g, or t
  misc_feature (268)..(268): n is a, c, g, or t
  misc_feature (392)..(392): n is a, c, g, or t
tgtccgcgaaagcgtgggtagcgttctcgattgcattgccactagattcttcncctctctaattatctctatctatctattaccctacaatactctagtctatctataactcacatctacagcgttctctcccgantaataaaatgtgaggcagtctgattgcgcagcgttgcacttctatctctgatactcgcatacatttggtctatcantcaagcttacattaccgagaccagtacagctagttcaaacattagcggtccattgncttctctcactacgttcgatatcttcactagagagtgtgatagcctctataatacgtgagtcggccctctactcacagaaccgggagagtgtgctgtcatctgggctcacatgcccttatgttnccccattcaagctctgaacagaatacgtcctatggggcgtattactttcagtgaaatcagtctaacttcatgaagtaggttaaagtagctaccaccttacatgtacacagcagttgccactatcgctgtcatcctcgtttttcctcattctcttagtactcctactgagcggtggacggtataagggcgacggaaaaatattcctccctccaaccctccgactcactgataatatagggagggtctgtggggcggtaggggaaatatagcacacatccctccggtaaactaatatagaaccgctctctcccccttcatcatagacaccggcacttttgttctacagctagcggtatccccctgatgatatgccttactgcaactcgccacatcctcggcgcttctctctaacaaataaagtgtttttatttacaggagttgtctcgacagggcccagctccatgccacccccaccccagccccagggagaagagggcggatgccagaggacctggcagaggctgggcaggtcctgagtggcccacgctaggccaagagagaaggcacgaggacctgggcgccccagtcccaaggcagaggccaggcctgcatggagaaggcagcacggggtcagctctcaggggtcaggatgggttccacgccgccgcagctctgctcgataagacggtggggcctctgcgggaagaaagcagggtctgcgtggggctcttggcgtcccctccctgccaagccctggctgtcgactcaccataggggtagccccaagaactgtactctggaggaagaatcaaggtgctggtagtgggcactggccccccggagccctctgcaaagtaggggacagtggcacctgttgaaatgcacaagggagggtgcagcgggtgtgaggcagggctgccatcctgagggcagggctccggcgcaccaggcacagaactcaaggtggccagcaggggctgccgctgcgaatggctcttggtggagaggaagacggggtccaagaagtgggggccgccagccgcagcctcagcctcagcctcctcctggggtggtgcggaaggcaccaccaggggtggggccccaggaggcaagccccaggcctggccgggggctcactggggcatggttcacagcaatattgccaatgaagaccgggagggtcacagtagcttccggcgccttcagagagacctgtaagtagtagtcgatgtggatgaggctgcagcccggcagggccgactggggcaaggcaggcaccaggatctgctcgtgccactgcgcccgccgccaggccttgacgcccgcaccctccacctccgcaatggtccgtacgtcgtggatccagcgcttggccttataggacactttctgcagcagactggccaccacagggctggtgtccttgcctgactggttctcaacgtcggcatgcagctgcagtgcctgccccaccacatagccgcggagatcagtgctggctgtgaggaccacgctgcccgtcttcaccagcttgtaggagaacttcttggtggcagaggccacgttgggttgctcaatgtctgggatgctgttcaggttcaaggggctcaagatatagaacacgaggctgcacttgtgatccttggaaaaccgtggcgtgtggatggcggccctcacctggtgcacgatcttcccgaaaggaccctcaaaggacgtgggtgcagtggcaggaagcaggaactggaaggggaagctgtgctctccagcgggcaggctccccttgtctgccagcgacagggaactgttgaagtaaccctcctccactacccacgctgtgtcattagccttgttggagaccccgcaggaacctatgcaggtcacccggatggctcggaacggcagcggtgcccccaggcgcacgcgcacggtcccagccaacggctccccggggctgtagacgacgcggccgtggctcaggctgatctcgaagagctgcactcgccccatgccgcggcctcaccggccagccgcgcagcgacgcccccgcccgccgcccgcgagtcccggctccgagatcccgggaattccggaccg

SEQ ID NO: 350211 - DNA, 418 bp, Homo Sapiens
  misc_feature (26)..(26): n is a, c, g, or t
  misc_feature (52)..(52): n is a, c, g, or t
tgcaccctcccttgtgcatttcaaanaggtgcccactgtccccctactttgnagagggctccggggggccagtgcccactaccagtaccttgattcttcctccagagtacagttcttggggctacccctatgaggccccaccgtcttatgagcagagctgcggcggcgtggaacccagcctgacccctgagagctgaccccgtgctgccttctccaggcaggcctggcctctgccctgggactggggcgcccagggcctcgtgccttctctcttggcctagcctggcccactcaggacctgcccagcctctgccagctccttctgcatccgccctcttctccctggggctggggtgggggtggcagggagctgggacctggagagacaactcctgtaaataaaacactttatttgtag

SEQ ID NO: 350212 - DNA, 1737 bp, Homo Sapiens
cggccccgagcagccatgctgggcgcgcgggcctggttgggccgcgtccttctgctgccccgcgccggtgcaggcctcgccgcgagccgcagtctgcctgcagtcccacttccaggctgaactccctgaggtctctgattccctaggtgtcctggagtctggcccaggacctggccccacaggagtcccagcaggggtagctcctcccgggacaaggaccgaagtgcgacggtcagtagttcagtgcccatgcctgctggagggaaaggaagccatccttcatctacaccccagagggtccccaaccgcctgatccacgagaagtcaccatacctcctacaacatgcctacaatcctgtggactggtacccctggggacaggaagccttcgacaaggccaggaaggaaaacaagccgattttcctctcagtcgggtactccacctgccactggtgccacatgatggaagaggagtccttccagaatgaggagattggccgcctgctcagtgaggactttgtgagtgtgaaggtagaccgtgaggagcggcctgacgtggacaaggtgtacatgacgttcgtgcaggccaccagcagcggcgggggctggcccatgaatgtgtggctgactcccaacctccagccctttgtcgggggcacctatttccctcctgaggatggcttgacccgagtcggcttccgcacagtgttgctgagaatacgagaacagtggaaacagaacaagaacaccctgctagaaaatagccagcgtgtcaccactgccctgctggcccgatcagagatcagcgtgggtgaccgccagctgccgccctctgccgccaccgtgaacaatcgctgcttccagcagctgggatgagggctatgatgaggaatacggtggcttcgctgaggcccccaagtttcccacgccggtgatcctgagcttcctgttctcctactggctcagccatcgactgactcaggatggctctcgggcccagcagatggccttgcataccctgaaaatgatggctaacgggggcatccgggaccatgtggggcagggctttcaccgctactccacagaccgccagtggcacgtccctcactttgagaacgatgctctatgaccaggcacagctcgctgtggcctattcgcaggcctttccagctctctggtgatgaattctactctgacgtggccaaaggcatcctgcaagaacgtggctcggagcctgagccaccgggtccggaggcttctatagcgcagaagatgcagacttcgccccaagagccgggccagcggcccaaagagggcgcctactatgtgtggacggtcaaagaggttcagcagctcctcccggagcctgtgttgggtgccaccgagccgctgacctcaggccagctcctcatgaagcactacggcctcacagaggctggtaacatcagccccagtcaggaccccaagggggagctgcagggccagaatgtgctgaccgtccggtactcgctggagctgactgctgcccgctttggcttggatgtggaggccgggccggcctttgcttaatcagggctggagaagttctttcaggcccgggagcattggcccaaacccgcaccttgacagaaaagatgcttggctgccctgaaatggctttgatgggcggcaggcttttgctggggacttggggcttgcccctgggcccaaagacaggcttgatcaacttttgccaca

SEQ ID NO: 350213 - DNA, 1297 bp, Homo Sapiens
  misc_feature (1097)..(1097): n is a, c, g, or t
  misc_feature (1117)..(1117): n is a, c, g, or t
  misc_feature (1129)..(1129): n is a, c, g, or t
  misc_feature (1177)..(1177): n is a, c, g, or t
  misc_feature (1228)..(1228): n is a, c, g, or t
  misc_feature (1238)..(1238): n is a, c, g, or t
  misc_feature (1256)..(1256): n is a, c, g, or t
  misc_feature (1258)..(1258): n is a, c, g, or t
  misc_feature (1286)..(1286): n is a, c, g, or t
  misc_feature (1290)..(1290): n is a, c, g, or t
gctggtaccggtccggaattcccgggatcttcccaccgccaggcccaggaggttgggggagactaacctggcaaggagcccccaatgagccacctctcctcaccccccaaaaaacataagggggagcacaaaggccacagtctcccccatggttcagaaaggggtagctcctcccgggacaaggaccgaagtgcgacggtcagtagttcagtgcccatgcctgctggagggaaaggaagccatccttcatctacaccccagagggtccccaaccgcctgatccacgagaagtcaccatacctcctacaacatgcctacaatcctgtggactggtacccctggggagaggaagccttcgacaaggccaggaaggaaaacaagccgattttcctctcagtcgggtactccacctgccactggtgccacatgatggaagaggagtccttccagaatgaggagattggccgcctgctcagtgaggactttgtgagtgtgaaggtagaccgtgaggagcggcctgacgtggacaaggtgtacatgacgttcgtgcaggccaccagcagcggcgggggctggcccatgaatgtgtggctgactcccaacctccagccctttgtcgggggcacctatttccctcctgaggatggcttgacccgagtcggcttccgcacagtgttgctgagaatacgagaacagtggaaacagaacaagaacaccctgctagaaaatagccagcgtgtcaccactgccctgctggcccgatcagagatcagcgtgggtgaccgccagctgccgccctctgccgccaccgtgaacaatcgctgcttccagcagctggatgagggctatgatgaggaaatacggtggcttcgctgaggcccccaagtttcccacgccggtgatcctgagcttcctgttctcctactggctcagccatcgactgactcaggatggctctcgggcccagcagatggccttgcatacccctgaaaatgatggctaacgggggcatccgggaccatgtggggcagggctttcaccgctactccacagaccgccagtggcacgtccctcactttgagaagatgctctatgancaggcacagctcgctgtggnctattcgcaggncttccagctctctggtgatgaattctactctgacgtggccaaaggatnctgcagtacgtggctcggagctgagccacggtccggagcttctatagcgcnaagatgcagntcgccccagagcggggcnancgcaaaagaggggctactatgtgtggangtanagaggtt

SEQ ID NO: 350214 - DNA, 1562 bp, Homo Sapiens
gaagaccgccgcggctcgtaggtgccggccgccctcgctagcctcctgccttcccttcctgtcctcagcggccgggcccacggccccgagcagccatgctgggcgcgcgggcctggttgggccgcgtccttctgctgccccgcgccggtgcaggcctcgccgcgagccgcaggtgtcctggagtctggcccaggacctggccccacaggagtcccagcaggggtagctcctcccgggacaaggaccgaagtgcgacggtcagtagttcagtgcccatgcctgctggagggaaaggaagccatccttcatctacaccccagagggtccccaaccgcctgatccacgagaagtcaccatacctcctacaacatgcctacaatcctgtggactggtacccctggggacaggaagccttcgacaaggccaggaaggaaaacaagccgattttcctctcagtcgggtactccacctgccactggtgccacatgatggaagaggagtccttccagaatgaggagattggccgcctgctcagtgaggactttgtgagtgtgaaggtagaccgtgaggagcggcctgacgtggacaaggtgtacatgacgttcgtgcaggccaccagcagcggcgggggctggcccatgaatgtgtggctgactcccaacctccagccctttgtcgggggcacctatttccctcctgaggatggcttgacccgagtcggcttccgcacagtgttgctgagaatacgagaacagtggaaacagaacaagaacaccctgctagaaaatagccagcgtgtcaccactgccctgctggcccgatcagagatcagcgtgggtgaccgccagctgccgccctctgccgccaccgtgaacaatcgctgcttccagcagctggatgagggctatgatgaggaatacggtggcttcgctgaggcccccaagtttcccacgccggtgatcctgagcttcctgttctcctactggctcagccatcgactgactcaggatggctctcgggcccagcagatggccttgcataccctgaaaatgatggctaacgggggcatccgggaccatgtggggcagaccgccagtggcacgtccctcactttgagaagatgctctatgaccaggcacagctcgctgtggcctattcgcaggccttccagctctctggtgatgaattctactctgacgtggccaaagatccctgcagtacgtggctcggagcctgagccccggtccggagctttctatagcgcagaggatgcagactcgcccccagagcggggccagcgcaaaagagggcgcctactatgtgtggacggtcaaagaggttcagcagctcctcccggaacctgtgttgggtgccaccgagccgctgacctcaggccagctcctcatgaagcactacggcctcacagaggttggtaacatcagccccagtcaggaccccaagggggagacttgcagggccagaatgttgcttgaccgtccggtaattcgctgggagctgattgctgcccgttttggtttggatgttggaaggccgtgcggaac

SEQ ID NO: 350215 - DNA, 1766 bp, Homo Sapiens
  misc_feature (700)..(701): n is a, c, g, or t
  misc_feature (712)..(714): n is a, c, g, or t
  misc_feature (1536)..(1537): n is a, c, g, or t
  misc_feature (1542)..(1551): n is a, c, g, or t
aacttacggctaggtacgaggctgggtttgaattcggcacgagggatgaattctactctgacgtggccaaaggatcctgcagtacgtggctcggagcctgagccaccggtccggaggcttctatagcgcagaagatgcagactcgcccccagagcggggccagcggcccaaagagggcgcctactatgtgtggacggtcaaagaggttcagcagctcctcccggagcctgtgttgggtgccaccgagccgctgacctcaggccagctcctcatgaagcactacggcctcacagaggctggtaacatcagccccagtcaggaccccaagggggagctgcagggccagaatgtgctgaccgtccggtactcgctggagctgactgctgcccgctttggcttggatgtggaggccgtgcggaccttgctcaattcagggctggagaagctcttccaggcccggaagcatcggcccaagccgcacctggacagcaagatgctggctgcctggaatggcttgatggtgtcaggctatgctgtgactggggctgtcctgggccaagacaggctgatcaactatgccaccaatggtgccaagttcctgaagcggcacatgtttgatgtggccagtggccgcctgatgcggacctgctacaccggccctggggggactgtggagcacagcaacccacccctgctgggnntccctggaggnnnacgccttcgtggtgcggggcctgctggacctgtatgaggcctcacaggagagtgcgtggctcgagtgggctctgcggctgcaggacacacaggacaggctcttttgggactcccagggtggcggctacttctgcagtgaggctgagctgggggctggcctgcccctgcgtctgaaggacgaccaggatggagcagagcccagcgccaattccgtgtcagcccacaacctgctccggctgcatggcttcacgggccacaaggactggatggacaagtgtgtgtgcctattgaccgccttttccgagcgcatgcgtcgtgtcccggtggcgttgcccgagatggtccgcgccctctcagcccagcagcagaccctcaagcagatcgtgatctgtggagaccgtcaggccaaggacaccaaggccctggtgcagtgcgtccactctgtctacattcctaacaaggtgctgattctggctgatggggacccctcgagcttcctgtcccgccagctgcctttcctgagtaccctccgacggttggaagaccaggccactgcatatgtgtgtgagaatcaagcctgctcagtgcccatcactgatccctgcgaattacgaaaactactacatccatgactgccccaacccccttggggtggggcagaaggtgaagcatcccaactgactagagactcaggccctgcagggccctatagaacctgtggccatccctgagcaccctgccaccaggtgacctcggccatactcactgccccccttgggcacccactcaccctagaataaacttaacagtgtcccggtggtnnccctnnnnnnnnnnacccaaatttgatcctctcaccctgtggaacgtgacccccgcctttgaccaaaaaaccttgtccggccgccttcggccctaaaaaaattttctaaaacaatttcctttgggcgcccggggcccccgtcgaggaaaggtgaccggtggctcatgccgggtttcccaaagaaaaaacccgggctcatgaacataagggttttggaattttccccccc

SEQ ID NO: 350216 - DNA, 783 bp, Homo Sapiens
ctgagaagtggtgacgggcctccctgacgggggttccgccaaggcccggtccaccccgtctggccttcggaagcttccgccagcccctcggtagatcctgtgcaccttcatgatcgcgatggccatcatggcagccagacacgggagaacatgagtggctggaagcagcatgaccacggcagcgcccgggctgtagctggaagaatccaatggccgacagccagctcgcacgcgccccagccggagaagccaatcagcctggactgaccggtcatggacaaacctgggctccgaagatgaagagaaaacgccatgaaacctaaaggagctagtcggctcggaaggcctctgtagacaagccgagaaccagcacaacgtagccgcaaggcgtgaacaggaagcagccacacgaaggccaaggccgaacattggtccaccgagcaatccgcacgatccaccaggccaggcaggcaatgagctccgacgccgacgggtggcgcacgtaaaacactccacacccgcgtagatcctccttgcaccatggagccctggtgcgtccactggggatctcgtcggagaagttctggtagaagcagggccttcacagggatgaacttgggcagtggcagggaacgttgttctccttttctgacatctctgtttcaccaaccagcgcaggctgaagcctgcagccgcctgagggatccgggcgcgagacgcagcgccctcgtgccgaattcaccacccaggcctcgctaccctgacctatttggtgtttgctct

SEQ ID NO: 350217 - DNA, 1034 bp, Homo Sapiens
  misc_feature (901)..(977): n is a, c, g, or t
aagtagcgaggcctgggtggcgaattcggcacgagggccgggccggttgctaagacttggcgaagcgctgcgctcgcgcccggatccctcaggcggctgcaggcttcagcctgcgctggttggtgaaacagagatgtcagaaaaggagaacaacttcccgccactgcccaagttcatccctgtgaagccctgcttctaccagaacttctccgacgagatcccagtggagcaccaggtcctggtgaagaggatctaccggctgtggatgttttactgcgccaccctcggcgtcaacctcattgcctgcctggcctggtggatcggcggaggctcggggaccaacttcggcctggccttcgtgtggctgctcctgttcacgccttgcggctacgtgtgctggttccggcctgtctacaaggccttccgagccgacagctcctttaatttcatggcgtttttcttcatcttcggagcccagtttgtcctgaccgtcatccaggcgattggcttctccggctggggcgcgtgcggctggctgtcggcaattggattcttccagtacagcccgggcgctgccgtggtcatgctgcttccagccatcatgttctccgtgtcggctgccatgatggccatcgcgatcatgaaggtgcacaggatctaccgaggggctggcggaagcttccagaaaggcacagacggagtggaacacgggcacttggcggaacccaccgtcgagggaggcccagtacaacaacttctcaagcaacagcctggcccgagtaccccactgtgcccagctaccccgggcaggggccagtgggccttaaaagggagcctggccctggcccccaacggcccaacaacctcctcccccttcattccctgctgctacccctgggcnnnnnnnnnnnnnnnnnnnnnnnnnnnnnnnnnnnnnnnnnnnnnnnnnnnnnnnnnnnnnnnnnnnnnnnnnnnnncccagggaaacggcccccctttctggcaagggggccaccaaaaaccccgggggtcat

SEQ ID NO: 350218 - DNA, 1492 bp, Homo Sapiens
catccacagctctcggccactttaaccattcccatctggcagtggttcttgacccggtttggcagaagacagctgtatatgttgggatctcagtgagtggggttgaagagcagagcctgggttgagttgggatgtctggtgggaacctcccagctgattcatcttcctgcacccccttccctagtcagcagtgccatttctcatcttggtggccctcatggagagtaacctcatcattacatatgcggtagctgtggcagctggcatcagtgtggcagctgccttcttactaccctggtaggtatatacaggcccccctcctcgggtatctccagcccctagtccccagttttgaagctccttagggagagttctatgcagtgttctcccacaggccattctgtgggtccaggttaggagtgggggaggtctgtcctgtacagttgtacaggtagtgagctttgcaagaacacctagtcggagtgaaaaatgggggctgtaatctggcctgggctccacttgccacgctgagcacctccaggcagggttacttcctcttagagcaagaggccttttcttattcatgtgaaggtcccatatcctcactgagctgtgtacccatggtactgcaagcttccagagggccacctcttctcattaacacagaggcccgttaggtgggtcagtcctcatggctgtcactactctgcgcaggtccatgctgcctgatgtcattgacgacttccatctgaagcagccccacttccatggaaccgagcccatcttcttctccttctatgtcttcttcaccaagtttgcctctggagtgtcactgggcatttctaccctcagtctggactttgcagggtaccagacccgtggctgctcgcagccggaacgtgtcaagtttacactgaacatgctcgtgaccatggctcccatagttctcatcctgctgggcctgctgctcttcaaaatgtaccccattgatgaggagaggcggcggcagaataagaaggccctgcaggcactgagggacgaggccagcagctctggctgctcagaaacagactccacagagctggctagcatcctctagggcccgccacgttgcccgaagccaccatgcagaaggccacagaagggatcaggacctgtctgccggcttgctgagcagctggactgcaggtgctaggaagggaactgaagactcaaggaggtggcccaggacacttgctgtgctcactgtggggccggctgctctgtggcctcctgcctcccctctgcctgcctgtggggccaagccctggggctgccactgtgaatatgccaaggactgatcgggcctagcccggaacactaatgtagaaaccttttttttacagagcctaattaataacttaatgactgtgtacatagcaatgtgtgtgtatgtatatgtctgtgagctattaatgttattaattttcataaaagctggaaagcaaaaaaa

SEQ ID NO: 350219 - DNA, 1717 bp, Homo Sapiens
  misc_feature (893)..(893): n is a, c, g, or t
agcgggggcgttcctcgtctgccagccggcttggctagcgcgcggcggccgtggctaaggctgctacgaagcgagcttgggaggagcagcggcctgcggggcagaggagcatcccgtctaccaggtcccaagcggcgtggcccgcgggtcatggccaaaggagaaggcgccgagagcggctccgcggcggggctgctacccaccagcatcctccaaagcactgaacgcccggcccaggtgaagaaagaaccgaaaaagaagaaacaacagttgtctgtttgcaacaagctttgctatgcacttgggggagccccctaccaggtgacgggctgtgccctgggtttcttccttcagatctacctattggatgtggctcaggtgggccctttctctgcctccatcatcctgtttgtgggccgagcctgggatgccatcacagaccccctggtgggcctctgcatcagcaaatccccctggacctgcctgggtcgccttatgccctggatcatcttctccacgcccctggccgtcattgcctacttcctcatctggttcgtgcccgacttcccacacggccagacctattggtacctgcttttctattgcctctttgaaacaatggtcacgtgtttccatgttccctactcggctctcaccatgttcatcagcaccgagcagactgagcgggattctgccaccgcctatcggatgactgtggaagtgctgggcacagtgctgggcacggcgatccagggacaaatcgtgggccaagcagacacgccttgtttccaggacctcaatagctctacagtagcttcacaaagtgccaaccatacacatggcaccacctcacacagggaaacgcaaaaggcatacctgctggcagcgggggncattggctgaatctatataatctgggctgccatcctgatcctgggcgtgcgggagcaagagagaaccctatgaagcccagcagtctgagccaatcgcctacttccggggcctacggctggccatgagccacggcccatacatcaaacttattactggcttcctcttcacctccttggctttcatgctggtggaggggaactttgtcttgtttgcacctacaccttgggcttccgcaatgaattccagaatctactcctggccatcatgctctcggcactttaaccattcccatctggcagtggttcttgacccggttggcaagaagacagctgtatatgttgggatctcagtgagtggggttgaagagcagagcctgggttgagttgggatgtctggtgggaacctcccagctgattcatcttcctgcaccccccttccctagtcagcagtgccattatctcatcttggtggccctcatggagagtaacctcatcattacatatgcggtagctgtggcagctggcatcagtgtggcagctgccttcttactaccctggtccatgctgcctgatgtcatgacgacttccatctgaaagcagccccacttccaatggaacaccgagccatcttcttctccttctatgtcttcttcaccaagttgcctctggagtgtcaatggggatttataccctcagactggactatgcaggatactagaccgtggctgctacgaagaccggaacgtgtcagtttaacatgaacaatggtcagtgagcaaggtcacaagatctacatcctgatggcactggtgctacaaatgtac

SEQ ID NO: 350220 - DNA, 980 bp, Homo Sapiens
  misc_feature (427)..(457): n is a, c, g, or t
  misc_feature (894)..(931): n is a, c, g, or t
tgtctcttcccagggacgaggtctacaccctcttctcaggagcatcctttcggtgcacgggactaccacatgttaatatgaccatccgctctctccctgtgcatgttaatactgtttagaggaaggatggatccagcttctctcacaaaaggaaatggctattccctaagtcatgtggactgagtggtaaatgtatcagccctggagcaggtgtctacaggcgtctggcgcctcgttaccacattgagaagctggggtgcaggatgcagccagtggctttatctcaggctcttatttagggcacatctgtcatcagatggtgatggtggaggtaacttggaaatgcaagggtagaataggtcctggtgttttgataattacgtactctgcctggtttggaaggttttcctctattacaatggacggnnnnnnnnnnnnnnnnnnnnnnnnnnnnnnnaattagacaacctggcagatagcgtgagaaagaaaatatctgaattagcatagccagttttagaaatttctggttggctgtttttacattaagaaatgaaaaaaacaagcaagaattgactttatgcctccttgacatcttgtgcatatgagtttggtttctgaatggattattggagcatttttaaggttgggtgtctcaatcttttaagagtgacgagcatgacgagtggctggcatccacacctgaagcaacactttctgtgatcccacagctttggatgccaaagcagctgctcagcgtgacacgaagaatcagtccagaaagctgccacagaccctctccatgagatttttaaaaaaccacttttgttttctgagtaataaaagaaaccccccgctctcgacgaattcgagctcggccgatttggcctgatnnnnnnnnnnnnnnnnnnnnnnnnnnnnnnnnnnnnnngccgccaccgcgtgacctgcggttcgccctatagtgagtcgtatcctcc

SEQ ID NO: 350221 - DNA, 1217 bp, Homo Sapiens
  misc_feature (188)..(188): n is a, c, g, or t
  misc_feature (372)..(372): n is a, c, g, or t
  misc_feature (374)..(376): n is a, c, g, or t
  misc_feature (386)..(386): n is a, c, g, or t
  misc_feature (436)..(436): n is a, c, g, or t
  misc_feature (483)..(483): n is a, c, g, or t
  misc_feature (490)..(493): n is a, c, g, or t
  misc_feature (519)..(519): n is a, c, g, or t
  misc_feature (523)..(525): n is a, c, g, or t
  misc_feature (527)..(527): n is a, c, g, or t
cgccgctgccttcatctctccatctctgcgcttctgccggctgcgccatccagcacccagactccagcaccggccgaggacccccactccggctgcagggaccctgtcccagcgagaccgcagcatgtcatccgaaaagtcaggactcccagactcagtccctcacacttctccgccgccctacaatncccctcagcctccagccgaacccccagccccaccgccacaggcagccccttcctcacaccatcaccaccaccaccactaccatcagtctggcaccgccaccctcccgcgcttaggggcagggggcctggcctcttccgcggccaccgctcagcgcggtccctcctcctctgccacgctgccganannnccccaccacncccctcccggccctgctgccggggcacccccacccggctgcgctaccttnccccgcatgccacccgacccttacctgcaggagactcgcttcgaggncccacannnnccgccgccgcccgctgccgccggggngggnnngngggggggaggtagagtgcccaggcccctggcttcgtggtgcccacgcacgcggggactgtgggcacgctgccgctggggggctacgtagcgcccggataccccctgcagctgcagacttgcactgcttacgtgccggtctacccggtgggcacgccatatgcaggcgggaccccggggggaacaggagtgacctccactctccccccgccgccccagggcccagggctggccctactggagccgaggcgcccgccacacgactacatgcccatcgcggtgctgaccaccatctgttgcttctggcctactggcatcattgccatcttcaaggccgtgcaggtgcgcacggccttggcccgcggagacatggtgtcggccgagatcgcttcacgcgaggcccggaacttctccttcatctccctggccgtgggcatcgcggccatggtgctctgtaccatcctcaccgtagtcatcatcatcgccgcgcagcaccacgagaactactgggatccctaaaaacgcccctggtccggccccactctgcgcccctcgatctcccaggctctttctgcagtcataccgcggacccaatgggcgccctgcacacccgtttctggggccggcagacttggatacatcggaaactccgcctccacggaacgtctcgccttgcgagcaagctcggaatc

SEQ ID NO: 350222 - DNA, 881 bp, Homo Sapiens
  misc_feature (509)..(554): n is a, c, g, or t
  misc_feature (560)..(560): n is a, c, g, or t
  misc_feature (599)..(599): n is a, c, g, or t
  misc_feature (757)..(763): n is a, c, g, or t
  misc_feature (766)..(766): n is a, c, g, or t
  misc_feature (769)..(769): n is a, c, g, or t
  misc_feature (784)..(784): n is a, c, g, or t
  misc_feature (790)..(790): n is a, c, g, or t
  misc_feature (796)..(796): n is a, c, g, or t
  misc_feature (800)..(800): n is a, c, g, or t
  misc_feature (804)..(804): n is a, c, g, or t
  misc_feature (809)..(809): n is a, c, g, or t
  misc_feature (812)..(812): n is a, c, g, or t
atcaggccaaatcggccgagctcgaattcgtcgagagcggatctctgcgctgctgccggctgcgccatccagcacccagactccagcaccggccgaggacccccactccggctgcagggaccctgtcccagcgagaccgcaggcatgtcatccgaaaagtcaggactcccagactcagtccctcacacttctccgccgccctacaatgcccctcagcctccagccgaacccccagccccaccgccacaggcagccccttcctcacaccatcaccaccaccaccactaccatcagtctggcaccgccaccctcccgcgcttaggggcagggggcctggcctcttccgcggccaccgctcagcgcggtccctcctcctctgccacgctgccgaggcccccccaccacgcccctcccggccctgctgccggggcacccccacccggctgcgctaccttgccccgcatgccacccgacccttacctgcaggagactcgcttcgagggcccacnnnnnnnnnnnnnnnnnnnnnnnnnnnnnnnnnnnnnnnnnnnnnnacccanactgcccaggcccctggcttcgtggtgcccacgcacgcngggcactgtggcgcacgctgccgctgggggggctacgtagcgcccggataccccctgcagctgcagccttgcactgcttacgtgccggtctacccggtgggcacgccatatgcaggcgggaccccggggggaacaggagtgacctccactctcccccnnnnnnncanggnccaggggtggcctantggagncgaggngccngcanacgantanatgccatcgcggtgctgacaccatctgttgctctggctactggatcattgcatcttcaaggcgtgaggt

SEQ ID NO: 350223 - DNA, 1383 bp, Homo Sapiens
tacatacttactccggttgggtgctgacttcagggacaggaaaaagcaaggtttgcaaagagtgaaactagtgtatattccgtatcttggtagttcgtttctggattggggttagtttcagaactggacttgttccttcactgccacagaatcagaaagagctagaagaaaaggctcacctggccactgtttaggcacccagacataatttatggacgaaatgcctaaaaatgtgccaggcatgctctgtttgagaggctttttctaaccccaaatcttagatctgccaggtagttcaacatcttccaagtgtgctggttctgctttccaatgcctgcttcccaattttggatccatgagctatacagctgcatgctttgactgccggaaaaattaatcttgcttcttcatcaggtctttctcctgtacttgtgatcagaaattacctttgacgtgcagtgacagttgatttcctcttgaactgccggtgaaaacagtctagtacacaggtgctgtcagcccagggtgggagcaggaaatgattgctgagcccggggcaggggaattgcatctgcaggaaagagatgcagcatgctcctcactcctgagtgcccacctgtcctgcttctctgcaggtgaaaactctgggggatgctgatcaatagagcttggtcccaagctctactgggcccttggaggtagcaaggccactgggttgctatcctcttgctggggatagcaaccactggtttgcaaccactgggttgctatccttttgctatcctcttgctcatgaccagccatatggtgaggctggggagttcacatcctcaggcaggaactagcagttgtttatccagcaatgcctcaaggatgttgcattgctcccaggagctggctattaggtatgtcttgtgcggtcagtcagcatcacagacacatagatgctcaccagcctggcttagctgggacctaaatcttctggtgaaaagcttttcactaagtgaggttccttccctgcaaatgctgaatctagcctaattcgcaaccacacagaatttcatggctttcaaaggcttgccatgtgccccatctcattctatactcacatcccatggaggtgaggattttcacttcttttctctagacttggaagctgagattcagagaggaagcatcccttgtgcaagatcacatagtcaggaggtgacacagggctaagacttgaaccaaggctctaagaggatttcttcttttcagagtctcttccctgtccatttctgtgactaagctgtgcagaggttgacagcagggcaagttacattgatattcatcctttataggcttcctgctaaaaagcttctgagattgtgggttttccaa

SEQ ID NO: 350224 - DNA, 1025 bp, Homo Sapiens
cacaggtctcccgtccctgcaccagctgagagagacttgccacaaagcacaaggctggcagagatttatgtatgacttgcacagacacaaaaatatacagacaatcaaaacattgatatattcaaactctcctttaaattccaatcttattgcaacaactctgtgaattgcaaggtcccagaatctgccttctcacatactctaccctcattcatccttttgggctaattgatgagcatcttatttcttatctctaaaaattatcagcaaaggctacttcagatggccactttagtcctttcagctgtagtcaggattatttaacttacctgtatatcaaaagtgaagaaaaagttagttcataagtaaaggcactaaatcctttcctgacaatggcagagtctctagaggtagaaatttgccttgctgcagagagagaaggaatggcgtgggatgggggaaagaaaagaaagagaagaagctggggtccccaggcagggtagtaagctgacactaaatattttttacacaaaaatgtattgaagcaacaaatatttcctgaagatccaccctgggtgaggctttgagctgactttagagatcactgtggggtcaagaatgtcttacatgttttattcatcattcttgaaaaaagaaataattcaaaccttggaattaaaaagtcagaaaaatatgggattttctttctggaattttcgaggttttctttttacctttgccagagtgtgggggcaggactgggcctgccagggtgtatagcccttcctgcttggtggaggccagtcaggcccagggccttctaagcagcagtagaaaggaggcttggggaaggggggggtctgggtagcaggggaaggaggccagttccagtgtagccccctatcccctccagatgtgctgcttctggctgtgcactcagtgactgccctcactgctcaaccctgtgctgtgtggtgtgtttctttccccactgacagtgaataaaaggtgcaactgtaaaaaaa

SEQ ID NO: 350225 - DNA, 777 bp, Homo Sapiens
  misc_feature (143)..(143): n is a, c, g, or t
  misc_feature (555)..(555): n is a, c, g, or t
  misc_feature (703)..(703): n is a, c, g, or t
  misc_feature (767)..(767): n is a, c, g, or t
ggttgacagcagggcaagttacattgatattcatcctttataggcttcctgctaaaaagcttctgagattgtggtcttccaaaaaaaataggagcttggttgaagtccccacattttcaagcactcagtgttctgcctctgcncagctgtgctaacagctcaagtgctgtcctgggagtcctctgactcagaaccctcgaagcatcctgcattgtctttacccaccatcatcgtcactaagagaaacatgcctacccatgaaggcgtgtttgattactccaggcttctggacacacatacccatgggtgatttttgctcctcaggcccaatattctcagacagcccagcagtgtgaacacacaatgccaggccaggaactgggaccaccatcttgctgatggaaggaacaacaggtggcccaggacatgctcctgcatactcctgggtgtcccagggactgtgtgctcaggagcactgtggtagagcactggccctgccttgagaagagacacaggtctcccgtccctgcaccagctgagagagacttgccacanagcacaaggctggcagagatttatgtatgacttgcacagacacaaaaatatacagacaatcaaaacattgatatattcaaactctcctttaaattccaatcttattgcaacaactctgtgaattgcaagtcccagaatcttgcttctnacatactctaccctcattcatccttttgggctaactgatgagcatcttactttctatctctaanaattatcagc

SEQ ID NO: 350226 - DNA, 512 bp, Homo Sapiens
  misc_feature (31)..(31): n is a, c, g, or t
  misc_feature (57)..(57): n is a, c, g, or t
attgatgaggcacccctatttcccctatccncctaaaattatccggcaaaggccctncttcagatggccccactttagtccctttcagcctgtagtccgggattatttaaaccttcccctgtatatccaaaagtgaaggaaaaagttagttccataagtaaaggcacctaaatccctttccctgacaatggccagagtcctcctagaggtagaaatttgccttgcctgccagagagagaaggaatggcgtgggatgggggaaagaaaagaaagagaagaagctggggtcccccaggcagggtagtaagctgacactaaataatttttacacaaaaatgtattgaagcaacaaatatttcctgaagatccaccctgggtgaggctttgagctgactttagagatcactgtggggtcaagaatgtcttacatgttttattcatcattcttgaaaaaagaaataattcaaaccttggaattaaaaagtcagaaaaatatgggattttctttctgg

SEQ ID NO: 350227 - DNA, 1643 bp, Homo Sapiens
agcggaccaatcaagacggccagccgaggcccctggaacggctcaggcggctgcggctgctacggcggcgcatgctaggggattctgccgggtagaagagctgggcctggaacccagccctgaggacatcctgcggcccaggggcaagtgacacctgctgagagaggcccaggatggtggaggctgaggaactggcacagctgcggctgctcaatctggagctcctgaggcagctgtgggtggggcaggatgctgtgcggcggtcagtggccagggcagcctcggagtcaagcctggaatccagcagcagctacaactcagagactccatcgaccccagagacgtcctcaacttccttgagcacctcctgcccacggggccggtcctccgtgtggggcccaccagatgcctgtcgaggggacctccgtgatgtggccagatcgggggtggcctctctcccacctgccaaatgccagcaccaggagtccctgggccgaccgagaccccactcagcaccctcgctgggcacctcaagcctgagggacccagagccctcagggaggctgggtgatccaggaccccaggaggcacagaccccgaggtccatcctggctcaacagagcaagctgtccaagcccagggtgaccttctctgaggagtctgcagttcctaagaggagctggcgcctcaggccatacctgggctatgactggattgcagggtctctggacaccagctcttccatcaccagccagcctgaggccttcttctccaagctgcaggagtttcgggaaaccaacaaggaggagtgtatctgcagccatcctgaaccccagttgccaggcctgcgtgagagcagtggcagcggcgtggaggaagaccatgaatgtgagtgcgggccctcggctaggccgctgagtagtccagcctcgcgctgccctggcctcccctgccccagagcagtcccatttgaggtttggggcctggggaggcccctgagatgttgagactcatggagggaggcctgcagtctggacagggtggccaagccctggtaggggtggagtgagctaaggcctggccaccgaattaggggctgccctgtgtggcaccatcccaccctccccagcagtgcccctgtgctggtgggactccatcccagctcctgagggccccaggaggatgtccctccccaccccttagggcgtgggccccaggttctggggaagaaaggggtttaggaggaaatggggccgaagggcttcccagagggattggcagcttgtgtggttgggggccgctgagggcagcacggagcctggggacctgggttcctggctcagggagagctgtggcttctcatgggcctcgcaggcgtgtactgttaccgtgtcaaccggcgcctgttcccggtgcctgtggatcccggtaccccctgccgcctgtgcaggacaccgcgagaccagcagggccctgggaccctggcgcagccagcgcacgtcaggtgagtgaccagagtattgggacaccttgggggacagagcctgaaccactggtttaagaaaagatgggcctgggcgtggggccccaacccgtgggaggcttctcaggggtcccccactgcccccctgcgcaggggggga

SEQ ID NO: 350228 - DNA, 902 bp, Homo Sapiens
aggggcccaggaagaaggccccctcccccacccttaggggcgtggggcccaggttttggagagaaaaagggttaaggaggaaatggggccgaaggggtttccagagggattggccacttgtgtggtgggggccgctgagggcagcacggagcctggggacctgggttcctggctcagggagaagctggggcctctcatgggcctcgcaggcgtgtactgttaacgtgtcaaccggcgcctgttcccggtgcctgtggatcccggtaccccctgccgcctgtgcaggacaccgcgagaccagcagggccctgggaccctggcgcagccagcgcacgtcagggtgagcatcccgctgtcgatcctggagcccccgcaccggtaccacatccaccggcgaaagagctttgacgcctctgacacactggccctgccccggcactgcctgctgggctgggacatttttcctccgaagtctgagaaaagctcagcccccaggaacctggacctctggtcctctgtctccgctgaggcccagcaccagaagctgtccggcaccagcagcccttttcacccggcctcaccaatgcagatgctgcccccgaccccgacctggtcagtgccccaggtccctcggccccacgtcccacggcagaagccctgaggactgactcctgggggagaacagcattcccgccgcctccagcctctcccctctggcaggcgcacccaggagatggaatcccctgcccgcccagctcaggcccagctgtcctaggttgggcaggtgggtggacccaagcttgtctgctgcctgagttccagagagggaggaccctggggtggagggtgagggattctgtggaagtttgtaaataaagctcagtgctctgcagctcaaaaaa

SEQ ID NO: 350229 - DNA, 677 bp, Homo Sapiens
  misc_feature (108)..(160): n is a, c, g, or t
cctttctgagcaggacctgatcggccgggcctgaactctcgctacctgaatgcccagggtggccctgaggtggtgggggcaaggggctcggcccggcccctggccttnnnnnnnnnnnnnnnnnnnnnnnnnnnnnnnnnnnnnnnnnnnnnnnnnnnnnagcacttcaccccttatcccccgggcctgctgccaccccacggcccccacatgtttgagaaatatccaggaaagatggaaagccttttccgacataatccgtacacggccttccctcccgcagtgcccgggctgcctccgggcctcccgccggccgtctcctttggctccctgcaaggggccttccagcccaagatcacgaaccctgagctgccaccacgactggggccggtgccgagcgggctctcccagaaggggacacagatccccgaccatttccggccacctttgaggaaaccaggcaagtggtgtgccatgcactgtgcgtgtggcttacatgatcctgaaacaccaggagaaaatgaagggtgactcccacaagcttgactttcggaatgacctcctgccctgccttccggggccctatggggccctgccccctgggcaggagctctcccacccggcctccctcttcactgcgactggtgccgtccacgctgcagctcgcccctgagttt

SEQ ID NO: 350230 - DNA, 500 bp, Homo Sapiens
acagggtaccatgactgggatgactacgcatccagtgatgtggatcttagagatcaccatagtgagacaacacttgttgccgtaagtctgagtgattggggtatttatgtgtatgtcatggctgcctggggcagagaatatacccactgccctctcataggtttggctctgctggcctgggtaatgtgctggggaacacatgcccacttgttgccttatagatcaactactttctcaacctgacttctcaaggtagtgctccaagtccagtgcacccaagacagcctgatccacttagaactgtgcccaccacgggagtcctctgggccaggggatgccccagcttagactctcctagggctcctgagactgaagggacagggaactggcttgtggaaaaagctacattacatttttctacctgtcttaggaagggggtgagctctgacagcaggattggcgctttagcaggactaatagcctggttcacagatgttaaa

SEQ ID NO: 350231 - DNA, 2143 bp, Homo Sapiens
atgcaggcaggcctgtgagtggcacgtcatggacatcgttgctggcagtagctggcccgtgaagccggttggacacagggcaggttgaacgagttgaatgcccgtccacgcaggtgccaacgcggtggaagcaggagctctctgtgcaagtcaggcgttttgttctcacagtggatcccggctgaagcctgcggggcagtgcacgtgtagctgtccacgcaagtccgtgcagttggccccgttgcggcaggggtcactggcacactcggttgatgtcctcctcacagaaagtgccccggaagccgggcaggcagtcgcagaaggccgtgttgatgccgtctgtgcaggagcccccgttgtgacacgggttgggccggcagtcgtcgatgtcggtcttcgcagttgcgcccactgtagccggcctggcagtggcagcggtatgccgccgtgggtgttctggcaggatgcgccgtgccggcacgggctcagaacgcactcgttgatgtcgacctcacaggtctgcccttgccagcccgtggggcagacacaggagaagctctcatagtcctcggattgcctgcactccccgccgtttctgcaggggctgggggcacacggggccagcaccacctcacacgtggcacctgtgtagggcagcaggcagttgcacttgtacccggcaacgtcgctcaatacacgtgccctggttcagacatgggttggacgcacactcgttgatgttggtctggcagttgggaccgctgaagccctcccggcaggtgcacacgtagccactggtcatgtctttgcaggtgccgccgttgacacaagggttgggcttcagcggtcccaactgtcagacttacgccaacaagtgttgtctcactatggtgatctctaagatccacatcactggatgcgtagtcatcccagtcacggtaccctgtggaggaatgctggaagaacataaagagcagttcagaaagtcacccaataccaggaccactgcatttaccagcctgatactgccaagattatctgatgctctcctcaggagctaggagaggagtgctccttcctccctaccgctactctccccaagcctgtgttgcaggtagagaggtgcagcaaatagagaaggcatgtcaaaccctgcatttctacctgagacgtgtgacctggatgatcctccaaaccctattggtcccaccccctgggaaaggccatggtgccagtttgaaaggtgctagctacctgaagccttgatatttcttcatggctgccgcacattcttccaccttggccagaacaggttctgaaaaccacttctctaccttcaccaccaccactgcccatcttgatctctttgagggttttcccatttcacttgatcttatttttgtttatcccttcctgcactttgtcaagagagtcctccagtttctatccaggaatgttcacatccaaagggttggacccacggatcattctgaatcttcctgcccctcctcactgcttaaccctgagaaccacaaatataatggaagcagttccccccaccctcaccccatctctttaagctcatcctagcaagacctctagagaccctagagactcgactttagtccttccccgccatggcacagtggggaaggtgtcaatggggagtgtcacggacaggaggtaggatcctgccgctcgcgtcttagtgtttctccctcaagactttccttctgttttgttgtcttgtgcagtattttacagcccctcttgtgtttttctttatttctcgtacacacacgcagttttaagggtgatgtgtgtataattaaaaggacccttggcccatactttcctaattctttagggactgggattgggtttgactgaaatatgttttggtggggatgggacggtggacttccattctccctaaactggagttttggtcggtaatcaaaactaaaagaaacctctgggagactggaaacctgattggagcactgaggaacaagggaatgaaaaggcagactctctgaacgtttgatgaaatggactcttgtgaaaattaacagtgaatattcactgttgcactgtacgaagtctctgaaatgtaattaaaagtttttattgagcccccgac

SEQ ID NO: 350232 - DNA, 966 bp, Homo Sapiens
  misc_feature (681)..(682): n is a, c, g, or t
  misc_feature (693)..(693): n is a, c, g, or t
  misc_feature (784)..(784): n is a, c, g, or t
  misc_feature (818)..(818): n is a, c, g, or t
  misc_feature (858)..(858): n is a, c, g, or t
accaaggagctgccagcaagccagtggacgacccttccatgtaccagctcaagggggctgccaaggtgatggtgaccaatgtcacctcgctcctcaagactgtaaaggcagtggaggatgaggccacccggggcaccagggcgcttgaggccacaattgaatgcataaagcaggagcttacggtgttccagtcaaaagacgtacctgaaaagacatcatcacctgaagaatccataaggatgacgaaaggcatcaccatggcaacagccaaagccgtggcagctgggaactcatgtagacaggaggacgtgattgctactgccaacctgagccggaaagccgtgtcagatatgttgacggcttgcaagcaagcatccttccaccccgatgtcagtgacgaggtgagaaccagagccttgcgtttcgggacggagtgcacccttggctacttggacctcctggagcacgtcttggtgattcttcagaaaccaaccccagaattcaagcagcagctggccgctttctccaagcgagtcgccggcgctgtgacagagctcatccaggcggcggaagccatgaaaggaacagagtgggtggatccagaagacccaactgtcattgcagaaacagagttactgggggctgcagcatccatcgaagctgctgctaagaagttagagnncactgagccangagcaaaccaaaacaagcggatgagaccctggactttgaggaacagatcttggaagctgctaaatccattgctgctgccacaagcgccctngtcaaaatcggctcagcagcccagagggagctgntggcccaaggaagggggggctcatccctgccatgctgcanacgacgacagtggcacagggcctgatttctgctgccggatggggggcgctggaacaaaatcctttggagggggccatggcttcgtttaaggcacccccagcgaggaag

SEQ ID NO: 350233 - DNA, 675 bp, Homo Sapiens
tcttaagatgttggttgcaacccatcagattgatgatgggactcatttctgggtcatgacctgaatataggaaaggctagtctagctgccctgtgcctgtgacatggcaggtgcctggtccgctgcctgcttctataagaatgtctccctgcagcctcttttctatacagaactcagccctgcctcacggaagcttttccaggcagtgcgagatagaggagcgcttgagaaggcaggttttgcagcagacggcagtgacagcccagttctgcaccttctttgctgagtcactgtgggccagtgacttgatctgagattgtttccccatcagaaccatgaggttatcatctgtgccttggggctgttcatctatctattcacttgacacacacacatccacctttctataccagctgcagcgccacctgctggtaccgtgagcaagagctgggcatgcccacggttccggtgccctgcagtctggtgggagaggcaggtaggggtcgactcaggtagcaaacctgaaactccaggggaaggaagcgtttctgcaactgtgagtacataggactgtgaggagagacttcccgagaaaggatgttcgggctagcgttaagggtgagcgtgagttcaccagagaaggaaggggagaccacgtccagggcaaggagaatc

SEQ ID NO: 350234 - DNA, 1851 bp, Homo Sapiens
  misc_feature (11)..(11): n is a, c, g, or t
  misc_feature (17)..(17): n is a, c, g, or t
  misc_feature (19)..(19): n is a, c, g, or t
  misc_feature (36)..(37): n is a, c, g, or t
  misc_feature (816)..(816): n is a, c, g, or t
tcatcagcttngcaggntncgcgcgaaaagaggcgnncggacagcgcaggtgcagtgccccgagcacccatgcgcatatttagccactcccaacgagcgcgtgggcccgcgccctcctctcggtggagcaggactagctgcttaagggcgcgcacagccgtgttctccagcatctgctccagctggccgagggtaggcctcctggtcccccaggcccacaatgaggatgcagtcggcctgtcgcaggcagcgcacggtccagggcgtcagcgaggcgtccgtctggtagagtacgatacggtgtgcatcctcctgctgggccagccaccctgacagccggaactcttggatgctatccagtgcggaggcccccaggcgtgcccggatgatgtcactgttaaggagtagcgtcggaccgatggcctgcagggcgtgctgcagctccagcgtgaaggccaccatggggacctcagcacacacaggcaggattgccacagttgccaggttgatggatgggttggtgagttccgagtgtgggggaacacccaacccagagcctgggaagggtctttgcagctgctgcaaattccctagaattttctggctcagtaggtggataaggcgggtcacgactgcgggtaccggcgtttgatgtgacccaaggtgccctcgggaagcttggccagctccgtgtcgcgcaccgcgtgcaccgtcgtggctcgcggctgccgggtcagtgcctccaccacgccgatgaggtcgccgcggccgtactcgcccaccagctccttcttgccactgcctcgctggatcacntacgcagccgcccattgagcacgatgtaagtgcagtcgaagccggtcgccctgcctgtacagcgcgcgttcccgcctccactgcagtccagtcgatggcgaagtccatctggcgcacgaagggcgacatcctggctgccaccgtgtgcgccgcactcagcaccacactgggctgtgcgcgcatgatctcatagaagtcggacttggagatccgcaggaaggtgcagtcgcgttgggctcgcagtgtgaagatgagaggttcgccagtgagcaccgccagctgccccaccagttccccgggctgcgctacgaacaggcacacgtcctccgccttgtcgatcatgcgctggtacacgtgcaggcagccccagagcacgaagtgcaggctcacgtcctggtctccctggcgggcaatgatggtgccagctttggcgtggtgcagcaagactctgctgttcaggagggaggggtcctcaatccgcatcagcttggccagctcctgctttgctgcctcgaagatgctgctggtctggcggccctggtagggcccgaaagggcagccaccagtggccgactcatcctcacagtagctgtattcacaggcgcctgccggctgctcacgaggctcctgagtgggggtccgagcgggggctgccagggaccccccggaggcctcttcctgcagggacacggagatccggccacgctcataggccatgtcgaagtcggagcgggggccaccctgcaagcctgagatgtcccctggcatggagacgcagcggctcagcagaggggccgagggggtttccagggatgtgggcttcacagggtcccctgtaggtccaggcagcggggccccggtgggatcgggtggccgcctggggtctcctgggctcgtctgtagctgaggtgctgaccattctcttggagccccgcacagggctggtgcgagttcgggaggccggggctggggaacagacgcaggggctggatctcgtggctgaagagctcattggtcagacccaggtagttgtgc

SEQ ID NO: 350235 - DNA, 2123 bp, Homo Sapiens
gcagtaaaccgcggtataaggtagcgaggcctgggtggcgaattcggcacgaggcttgcagctgctgcaaggacccttccgagcaggctctgggttgggtgtgcccccacactcggaactcaccaacccagccagcaacctggcaactgtggcaatcctgcctgtgtgtgctgaggtccccatggtggccttcacgctggagctgcagcacgccctgcaggccatcggtccgacgctactccttaacagtgacatcatccgggcacgcctgggggcctccgcactggatagcatccaagagttccggctgtcagggtggctggcccagcaggaggatgcacaccgtatcgtactctaccagacggacgcctcgctgacgccctggaccgtgcgctgcctgcgacaggccgactgcatcctcattgtgggcctgggggaccaggagcctaccctcggccagctggagcagatgctggagaacacggctgtgcgcgcccttaagcagctagtcctgctccaccgagaggagggcgcgggccccacgcgcaccgtggagtggctaaatatgcgcagctggtgctcggggcacctgcacctgcgctgtccgcgccgcctcttttcgcgccgcagccctgccaagctgcatgagctctacgagaaggttttctccaggcgcgcggaccggcacagcgacttctcccgcttggcgagggtgctcacggggaacaccattgcccttgtgctaggcgggggcggggccaggggctgctcgcacatcggagtactaaaggcattagaggaggcgggggtccccgtggacctggtgggcggcacgtccattggctctttcatcggagcgttgtacgcggaggagcgcagcccagccgcacgaagcagcgggcccgggagtgggccaagagcatgacttcggtgctggaacctgtgttggacctcacgtacccagtcacctccatgttcactgggtctgcctttaaccgcagcatccatcgggtcttccaggataagcagattgaggacctgtggctgccttacttcaacgtgaccacagatatcaccgcctcagccatgcgagtccacaaagatggctccctgtggcggtacgtgcgcgccagcatgacgctgtcgggctacctgcccccgctgtgcgaccccaaggacgggcacctactcatggatggcggctacatcaacaatctgccagcggacatcgcccgcagcatgggtgccaaaacggtcatcgccattgacgtggggagccaggatgagacggacctcagcacctacggggacagcctgtccggctggtggctgctgtggaagcggctgaatccctgggctgacaaggtaaaggttccagacatggctgaaatccagtcccgcctggcctacgtgtcctgtgtgcggcagctagaggttgtcaagtccagctcctactgcgagtacctgcgcccgcccatcgactgcttcaagaccatggactttgggaagttcgaccagatctatgatgtgggctaccagtacgggaaggcggtgtttggaggctggagccgtggcaacgtcattgagaaaatgctcacagaccggcggtctacagaccttaatgagagccgccgtgcagacgtgcttgccttcccaagctctggcttcactgacttggcagagattgtgtcccggattgagccccccacgagctatgtctctgatggctgtgctgacggaaaggagtcagattgtctgacagagtatgaggaggacgccggacccgactgctcgagggatgaaggggggtcccccgagggcgcaagccccagcactgcctccgagatggaggaggagaagtcgattctccggcaacgacgctgtctgccccaggagccgcccggctcagccacagatgcctgaggacctcgacaggggtcaccccctccctcccacccctggactgggctgggggtggccccgtgggggtagctcactccccctcctgctgctatgcctgtgacccccgcggcccacacactggactgacctgccctgagcggggatgcagtgttgcactgatgacttgaccagcccctcccccaataaactcaactcttgga

SEQ ID NO: 350236 - DNA, 471 bp, Homo Sapiens
  misc_feature (37)..(37): n is a, c, g, or t
  misc_feature (77)..(77): n is a, c, g, or t
aaaattttgtccccggaattaaacccccccaacgaanctaatgtctctgaatggctgtgcttgaacggaaaaggaantcaaaattgttctgaacaagaagtatgaaggaaggacgccggacccgaactgctcgaagggatgaaaggggggttcccccgaaggcgcaaaccccagcactgcctccgagatggaggaggagaagtcgattctccggcaacgacgctgtctgccccaggagccgcccggctcagccacagatgcctgaggacctcgaacagggtcaccccctccctcccacccctggactgggctgggggtggccccgtgggggtagctcactccccctcctgctgctatgcctgtgacccccgcggcccacacactggactgacctgccctgagcggggatgcagtgttgcactgatgacttgaccagcccctcccccaataaactcgcctcttggaaatggc

SEQ ID NO: 350237 - DNA, 1829 bp, Homo Sapiens
  misc_feature (1806)..(1806): n is a, c, g, or t
  misc_feature (1813)..(1813): n is a, c, g, or t
  misc_feature (1823)..(1823): n is a, c, g, or t
agcggacggtggcccttaagcgaggagcggcggcgcccgcagcaatcacagcagtgccgacgtcgtgggtgtttggtgtgaggctgcgagccgccgcgagttctcacggtcccgccggcgccaccaccgcggtcactcaccgccgccgccgccaccactgccaccacggtcgcctgccacaggtgtctgcaattgaactccaaggtgcagaatggtttggaaagtagctgtattcctcagtgtggccctgggcattggtgccgttcctatagatgatcctgaagatggaggcaagcactgggtggtgatcgtggcaggttcaaatggctggtataattataggcaccaggcagacgcgtgccatgcctaccagatcattcaccgcaatgggattcctgacgaacagatcgttgtgatgatgtacgatgacattgcttactctgaagacaatcccactccaggaattgtgatcaacaggcccaatggcacagatgtctatcagggagtcccgaaggactacactggagaggatgttaccccacaaaatttccttgctgtgttgagaggcgatgcagaagcagtgaagggcataggatccggcaaagtcctgaagagtggcccccaggatcacgtgttcatttacttcactgaccatggatctactggaatactggtttttcccaatgaagatcttcatgtaaaggacctgaatgagaccatccattacatgtacaaacacaaaatgtaccgaaagatggtgttctacattgaagcctgtgagtctgggtccatgatgaaccacctgccggataacatcaatgtttatgcaactactgctgccaaccccagagagtcgtcctacgcctgttactatgatgagaagaggtccacgtacctgggggactggtacagcgtcaactggatggaagactcggacgtggaagatctgactaaagagaccctgcacaagcagtaccacctggtaaaatcgcacaccaacaccagccacgtcatgcagtatggaaacaaaacaatctccaccatgaaagtgatgcagtttcagggtatgaaacgcaaagccagttctcccgtccccctacctccagtcacacaccttgacctcacccccagccctgatgtgcctctcaccatcatgaaaaggaaactgatgaacaccaatgatctggaggagtccaggcagctcacggaggagatccagcggcatctggattacgagtatgcgttgagacatttgtacgtgctggtcaacctttgtgagaagccgtatccgcttcacaggataaaattgtccatggaccacgtgtgccttggtcactactgaagagctgcctcctggaagcttttccaagtgtgagcgccccaccgactgtgtgctgatcagagactggagaggtggagtgagaagtctccgctgctcgggccctcctggggagcccccgctccagggctcgctccaggaccttcttcacaagatgactggctcgctgttacctgcttccccagtcttttctgaaaaactacaaattagggtgggaaaagctctgtattgagaagggtcatatttgctttctaggaggtttgttgttttgcctgttagttttgaggagcaggaagctcatgggggcttctgtagcccctctcaaaaggagtctttattctgagaatttgaagctgaaacctctttaaatcttcagaatgattttattgaagagggccgcaagccccaaatggaaaactgtttttagaaaatatgatgatttttgattgcttttgtatttaattctncaggtgntcaagtcttnaaaaat

SEQ ID NO: 350238 - DNA, 888 bp, Homo Sapiens
  misc_feature (43)..(43): n is a, c, g, or t
gtgcctctcaccatcatgaaaaggaaactgatgaacaccaatnatctggaggagtccaggcagctcacggaggagatccagcggcatctggatgccaggcacctcattgagaagtcagtgcgtaagatcgtctccttgctggcagcgctccgaggctgaggtggagcagctcctgtccgagagaagccccgctcacggggcacagctgctacccagaggccctgctgcacttccggacccactgcttcaactggcacttccccaacgtacgagtatgcgttgagacatttgtacgtgctggtcaacctttgtgagaagccgtatccgcttcacaggataaaattgtccatggaccacgtgtgccttggtcactactgaagagctgcctcctggaagcttttccaagtgtgagcgccccaccgactgtgtgctgatcagagactggagaggtggagtgagaagtctccgctgctcgggccctcctggggagcccccgctccagggctcgctccaggaccttcttcacaagatgacttgctcgctgttacctgcttccccagtcttttctgaaaaactacaaattagggtgggaaaagctctgtattgagaagggtcatatttgctttctaggaggtttgttgttttgcctgttagttttgaggagcaggaagctcatgggggcttctgtagcccctctcaaaaggagtctttattctgagaatttgaagctgaaacctctttaaatcttcagaatgattttattgaagagggccgcaagccccaaatggaaaactgtttttagaaaatatgatgatttttgattgcttttgtatttaattctgcaggtgttcaagtcttaaaaaataaagatttataacagaacccaaa

SEQ ID NO: 350239 - DNA, 1028 bp, Homo Sapiens
attgctgaatcctggactgcaccattctgtgttcaagggaaaatgtaatctgatccctctgctgctgagggaggaatctgttcagtcaagggcttcgacagggcatagtctcctccaataatcttctccgttctctctcattattccctcgagttcttctcagtcaagctgcatgtatgtatgtgtgtcccgagaagcggtttgatactgagctgcatttgcctttactgtggagttttgttgccggttctgctccctaatcttccttttctgacgtgcctgagcatgtccacattagaatctgtgacatacctacctgaaaaaggtttatattgtcagagactgccaagcagccggacacacgggggcacagaatcactgaaggggaaaaatacagaaaatatgggtttctacggcacattaaaaatgattttttacaaaatgaaaagaaagttggaccatggttctgaggtccgctctttttctttgggaaagaaaccatgcaaagtctcagaatatacaagtaccactgggcttgtaccatgttcagcaacaccaacaacttttggggacctcagagcagccaatggccaagggcaacaacgacgccgaattacatctgtccagccacctacaggcctccaggaatggctaaaaatgtttcagagctggagtggaccagagaaatcgcttgctttagatgaactcattgatagttgtgaaccaacacaagtaaaacatatgatgcaagtgatagaaccccagtttcaacgagacttcatttcattgctccctaaagagttggcactctatgtgctttcattcctggaacccaaagacctgctacaagcagctcagacatgtcgctactggagaaatttggctgaagacaaccttctctggagagagaaatgccaagaagaggggatcgatgaaccattgcccatcaagagaagacaagtaataaaaacaggttcatacaccagtccatggaaaggtgctacctccgaccgccaggattggtccta

SEQ ID NO: 350240 - DNA, 703 bp, Homo Sapiens
tcctgcccccaccttacaggtctgggatgtacctttccatctgttgctgctttcttctatgggcccctgccctcactctcaagaacctcaactactccgtgccggaggagcaaagggccggcacggtgatcgggaacatcggcagggatgctcgaatgcagcctgggcttccgcctgcaaagcgcggcggcggagggcgcagcaagtcgggtagctaccgggggctggagaaatccgcaccgcacctgctggaagtggacgcagacaacgggctcctctacaccaagcagcgcatagaccgcgagtccctgtgccgccacaatgccaagtgccagctgtccctcgaggtgttcgccaacgacaaggagatctgcatgatcaaggtagagatccaggacatcaacgacaacgcgccctccttctcctcggaccagatcgaaatggacatctcggagaacgctgctccgggcacccgcttccccctcaccagcgcacatgaccccgacgccggcgagaatgggctccgcacctacctgctcacgcgcgacgatcacggcctctttggactggacgttaagtcccgcggcgacggcaccaagttcccagaactggtcatccagaaggctctggaccgcgagcaacagaatcaccatacgctcgtgctgactgccctggacggtggcgagcctccacgttccagcac

SEQ ID NO: 350241 - DNA, 700 bp, Homo Sapiens
tcctcactgccccaagtgcccatcagaccctgctccccaaatgcttctccagagccccccaaccctctcctccattgccttctcagcaatgactttcagttccctgggtacctgcaacaggactgccctttcccctttccccacccttgcagtctccccaagcctcccccagattctggcctgggctggggtcttacctgggtctccttgggctttgtggaagatggtgaaggcccaaagaaggaagcggcagagtgtggggagggtgagccagcctggcatgatggggggtcagcccggcaccgtctgttagaagctggtctcttcacagagacggagggagcagtgcttagcagctttttgtcttgcttgaggaagaggttctggatgaaggtttgccaggctcctgggagttccaagcaccttaaaaccctggaacttgagcccctgttcaacacagttgctccttttgcacctttgaggaaaagcttctgtcctctgccctctggtgcctgagtgcgcattgcctttgcaaacagactttcaggtgggaactatccaggacttccagctgcttcaagaaaccggacctcttctgtacaaccccctgtctgtctgtctgtctgtcctctccttctcagtccccaccccatcggaagcacaatttcccattgtctctgtcttttcccctattgtgaat

SEQ ID NO: 350242 - DNA, 1134 bp, Homo Sapiens
  misc_feature (10)..(10): n is a, c, g, or t
  misc_feature (13)..(13): n is a, c, g, or t
  misc_feature (21)..(21): n is a, c, g, or t
  misc_feature (29)..(29): n is a, c, g, or t
  misc_feature (51)..(51): n is a, c, g, or t
  misc_feature (55)..(55): n is a, c, g, or t
  misc_feature (57)..(57): n is a, c, g, or t
  misc_feature (61)..(61): n is a, c, g, or t
  misc_feature (73)..(73): n is a, c, g, or t
  misc_feature (75)..(75): n is a, c, g, or t
  misc_feature (78)..(78): n is a, c, g, or t
  misc_feature (91)..(91): n is a, c, g, or t
  misc_feature (108)..(108): n is a, c, g, or t
  misc_feature (111)..(111): n is a, c, g, or t
  misc_feature (134)..(134): n is a, c, g, or t
  misc_feature (154)..(154): n is a, c, g, or t
  misc_feature (166)..(166): n is a, c, g, or t
  misc_feature (168)..(168): n is a, c, g, or t
  misc_feature (172)..(172): n is a, c, g, or t
  misc_feature (181)..(181): n is a, c, g, or t
cccaaccttngcnaccacgcnccgcgtcnccgcacgccgcgtgggcttcanacancntcanccgcccgggcancnaanaacacttggcccnccagcgcggaggtgaancanaaggcgtcgtagcggtcgcgcanccggtcgcggggtccgtagntgcggatcccgngnccgncctcggccngccgcacggggcgcgtgcggtgagcacagggtagcgcacggaggccctcgagcagccagcccgcgtaacaccagtccagaccctcggtccaagcctggtagagctgggagtaggtggccaggcgtccgtcctgctcctcgcacgccctgcttcgcctcgtagtaattgaactggtaccggccccggctgggttggtacggaaacaccacaccctccaagctcaaggtcagcgccacgctctcgtcctcgatgccgttgatgagctcgcagcggtaccggccctcgtcctccaggcgcacgcccgcgatgaccagggaggcgtctagtcgatgccccctccgcatcctggcgcgccctcccaggggcccatacccccgggcgtgcagtccgttggtgatgaggatcagcgtttcccggagctccccaggctccaccttgctccagcgcaccttgtagctgggaggcgtggtgcccaggacgcagggcagcgtggccgtggccccacgatgagagtgaatgacctcgtggatggggggcaggaggtagtgggggcccgggtgggatgctgggtctccttgggctttgtggaagatggtgaaggcccaaagaaggaagcggcagagtgtggggagggtgagccagcctggcatgatggggggtcagcccggcaccgtctgttagaagctggtctcttcacagagacggagggagcagtgcttagcagctttttgtcttgcttgaggaagaggttctggatgaaggtttgccaggctcctgggagttccaagcaccttaaaaccctggaacttgagcccctctgccctctggtgcctgagtgcgcattgcctttgcaaacagactttcaggtgggaactatccaggacttccagctgcttcaagaaaccggacctcttctgtacaaccccctgtctgtctgtctgtctgtcctttcc

SEQ ID NO: 350243 - DNA, 1014 bp, Homo Sapiens
ccgggccccaaaagaaccccttgggccccccaagcgcggaggtgaaccagaagggtttcttagcggttcggccatcccggttcggggggtccggtaactgcggattcccggcccggcctgggccccccccacggggcccttgccggtgaacacagggttggcgcacggagccctcgagcagccagcccgcgttacaccagtccagcccttcggtccaagcctggtagagctgggagtaggtgcccaggcgtccgtcctgctcctcgcacgcctgttccgcctcgtagtaattgaactggtaccggccccggcctccaagctcaaggtcagcgccacgctctcgtcctcgatgccgtggatgagctcgcagcggtaccggccctcatcctccaggcgcacgcccgcgatgaccagggaggcgtctagtcgatgccccctccgcatcctggcgcgccctcccaggggcccatacccccgggcgtgcagtccgttggtgatgaggatcagcgtttcccggagctccccaggctccaccttgctccagcgcaccttgtagctgggaggcgtggtgcccaggacgcagggcagcgtggccgtggccccacgatgagagtgaatgacctcgtggatggggggcaggaggtagtgggggcccgggtgggatgctgggtctccttgggctttgtggaagatggtgaaggcccaaagaaggaagcggcagagtgtggggagggtgagccagcctggcatgatggggggtcagcccggcaccgtctgttagaagctggtctcttcacagagacggagggagcagtgcttagcagctttttgtcttgcttgaggaagaggttctggatgaaggtttgccaggctcctgggagttccaagcaccttaaaaccctggaacttgagcccctctgccctctggtgcctgagtgcgcattgcctttgcaaacagactttcaggtgggaactatccaggacttccagctgcctcaagaaacatcccgggaa

SEQ ID NO: 350244 - DNA, 1214 bp, Homo Sapiens
  misc_feature (140)..(140): n is a, c, g, or t
  misc_feature (586)..(638): n is a, c, g, or t
atatttgtatgatgtccgtgacgtgtgtcatatgtttgcgttcgagtacgtaatgttccgccagttcgtctcacactcacttccgacagcactcttgcatctagtattacgagaggcgaagtgcgtgtgctcttaatcgncgcggcgctgtggcgtgtctcgttcaatcctcggcggggcgcgcggcacaaccacactcgctagtaacactggtatctcgtgtttacgcaccagtctcattgtatcattggacgcggagtgcaacagacctagacgtccgccagatgggcgttggctgactgtaggatggttgtcaacgcctggctcgtgtctaggtgtatatatgtcggtgtgggagctacttgttcccgccatgggtgcgtgggcaaggaccctatggcgttacttgaggtattttaggttttttctccgcgggagtctctacccccagggtatcgccaccctttgggtgccaagagggccaccttgttaaggctggggagggtggggggtggccccaagatcgccgggggcaggcgttgcccgttggcccccccgatgaggagggaatgtccctcgtggaatnnnnnnnnnnnnnnnnnnnnnnnnnnnnnnnnnnnnnnnnnnnnnnnnnnnnnacagtggcaggaacccccaatcctcactgccccaagtgcccatcagaccctgctccccaaatgctttctccagagccccccaaaccctctcctccattgccttctcagcaatgactttcagtccctgggtacctgcaacaactgccctttcccctttccccacccttgcagtctccccaagcctcccccagattctggcctgggctggggtcttacctgggtctccttgggctttgtggaagatggtgaaggcccaaagaaggaagcggcagagtgtggggagggtgagccagcctggcatgatggggggtcagcccggcaccgtctgttagaagctggtctcttcacagagacggagggagcagtgcttagcagctttttgtcttgcttgaggaagaggttctggatgaaggtttgccaggctcctgggagttccaagcaccttaaaaccctggaacttgagcccctctgccctctggtgcctgagtgcgcattgcctttgcaaacagactttcaggtgggaactatccaggacttccagctgcttcaagaaaccatcccggaaattccggaccg

SEQ ID NO: 350245 - DNA, 1131 bp, Homo Sapiens
aaccctttatgggggattacggggattgggggttggggagcatggggaaggacataaccggggcgagtgggacgcataaatttatgggggtaaccggtacgtggcgttgggtcgcctccgccgcggggattaatggggggtgatcgttcggtgtagccgccgggataccccttggagtaagccagtgcggggtttacccgcagtgccaggaccccgtgggttccaaagcctggtagaacccgggagttagggggcccgggcgtccgttctggttcttcgcaaggcctgtttcgccttggtagtaatgaactggttcccgccccgggtggggttggtacggaaacaccaccaccttccaagctcaaggtcagcgccacgctctcgtcctcgatgccggtgatgagctcgcaccggtaccggccctcgtcctccaggcgcacgcccgcgatgaccagggaggcgtctagtcgatgccccctccgcatcctggcgcgccctcccaggggcccatacccccggggcgtgcagtccgttggtgatgaggatcagcgtttcccggagctccccaggctccaccttgctccagcgcaccttgtagctgggaggcgtggtgcccaggacgcagggcagcgtggccgtggccccacgatgagagtgaatgacctcgtggatggggggcaggaggtagtgggggcccgggtgggatgctgggtctccttgggctttgtggaagatggtgaaggcccaaagaaggaagcggcagagtgtggggagggtgagccagcctggcatgatggggggtcagcccggcaccgtctgttagaagctggtctcttcacagagacggagggagcagtgcttagcagctttttgtcttgcttgaggaagaggttctggatgaaggtttgccaggctcctgggagttccaagcaccttaaaaccctggaacttgagcccctgttcaacacagttgctccttttgcacctttgaggaaaagcttctgtcctctgccctctggtgcctgagtgcgcattgcctttgcaaacagactttcaggtgggaactatccaggacttccagctgcttcaagaaaccggacctcttctgtacaacccccatcccgggaattc

SEQ ID NO: 350246 - DNA, 1044 bp, Homo Sapiens
  misc_feature (13)..(13): n is a, c, g, or t
  misc_feature (20)..(20): n is a, c, g, or t
  misc_feature (23)..(23): n is a, c, g, or t
  misc_feature (37)..(37): n is a, c, g, or t
  misc_feature (45)..(45): n is a, c, g, or t
  misc_feature (72)..(72): n is a, c, g, or t
  misc_feature (77)..(77): n is a, c, g, or t
  misc_feature (83)..(83): n is a, c, g, or t
  misc_feature (85)..(85): n is a, c, g, or t
  misc_feature (98)..(98): n is a, c, g, or t
  misc_feature (105)..(105): n is a, c, g, or t
  misc_feature (147)..(147): n is a, c, g, or t
  misc_feature (151)..(151): n is a, c, g, or t
  misc_feature (158)..(158): n is a, c, g, or t
  misc_feature (996)..(996): n is a, c, g, or t
ccaattgactttncctccanttnaggatttgaagccnagtagttnaagggaggccctggggccgatgtgaancagtntttagngnatttttacatttntgtcagnagggcagtcctgggttgaagtccagaagacattgtagctgcnatanttggggntgtatcccctggactgggtgggtggcaaaagtgtaaagcggaaagttaccaaagttcaacgggtgtgccaactgataaacttcaactgcccccttggccccaacctctggtagtaggactcccttgccatctgtcacccacatagaagaacagggagaccaaagggagggcagaagtacctgagtcctgaggctctacagtcactctccagctccagtcccctccgtgctgacccccaggcctcttgacgaactcagtggtgagccttaaggccccatcctggatgtgttggcgcccgaaggagaggccgtcgtggaactcccagccatagggacccacaccgtccccctgctcacacgtgtgcctgagcttaggagtccccggggtggtgccctgctgcgcccacatcagtccggtgaggaggggcttcgggctgcgggtcttcatgccgaagtagacgtgagggcggtaggttccccagaagaggtccggggccacggcggggctggaggagtcggcaggcaacacaggaggcgcggagtgcatgcgtgaccgcccgccgcgcacggtaccacgccagcacccagcgccccgacatacccagggccaaagacaggaccacgacggccagagccactcctccagccgtgctacgcggcccgccgccccggccgtcccgtcgcccggggcctccccgagccgccctctcggctgtccgcactccctctgccggcactgcgcggcgccgccgctcgccccgagccatcctggcactgaggtccgcgtcacaagagctcggagaggcggcagtggagcccgggtcctgcctcacctctcncggctcccgcctctcgccctggcgatcccgggaattccggaccggtcc

SEQ ID NO: 350247 - DNA, 1048 bp, Homo Sapiens
  misc_feature (943)..(943): n is a, c, g, or t
  misc_feature (946)..(946): n is a, c, g, or t
  misc_feature (956)..(956): n is a, c, g, or t
  misc_feature (958)..(958): n is a, c, g, or t
  misc_feature (970)..(970): n is a, c, g, or t
  misc_feature (978)..(978): n is a, c, g, or t
  misc_feature (984)..(984): n is a, c, g, or t
  misc_feature (989)..(989): n is a, c, g, or t
  misc_feature (998)..(998): n is a, c, g, or t
  misc_feature (1009)..(1010): n is a, c, g, or t
  misc_feature (1012)..(1012): n is a, c, g, or t
  misc_feature (1014)..(1014): n is a, c, g, or t
  misc_feature (1022)..(1024): n is a, c, g, or t
aaagcaggctggtccggtccggaattcccgggatatctgtcgacccacgcgttcgggatggcggatggcgcaggcgctggctggcaggtgtcgctaaccggacggtggtcgccagggcgagaggcgggagccggagaggtgaggcaggacccgggctccactgccgcctctccgagctcttgtgacgcggacctcagtgccaggatggctcggggcgagcggcggcgccgcgcagtgccggcagagggagtgcggacagccgagagggcggctcggggaggccccgggcgacgggacggccggggcggcgggccgcgtagcacggctggaggagtggctctggccgtcgtggtcctgtctttggccctgggtatgtcggggcgctgggtgctggcgtggtaccgtgcgcggcgggcggtcacgctgcactccgcgcctcctgtgttgcctgccgactcctccagccccgccgtggccccggacctcttctggggaacctaccgccctcacgtctacttcggcatgaagacccgcagcccgaagcccctcctcaccggactgatgtgggcgcagcagggcaccaccccggggactcctaagctcaggcacacgtgtgagcagggggacggtgtgggtccctatggctgggagttccacgacggcctctccttcgggcgccaacacatccaggatggggccttaaggctcaccactgagttcgtcaagaggcctggggggtcagcaccggaggggactgggagctggagagtgactgtagaagcctcaggactcaggtacttctgccctccctttggtctcctgttcttctatgtggtgacagatggcaaggaagtcctactaccagaggttggggcaaggggcagttgaagttatcagtgggcacacagtgaacttgtaacttcgctttacacttttgcaccancantcaggggatnanccccaagtatgnagctacangtctcntgacntcaaccagnctgccctctgnnananatgtaaannngctaaaagctggttagatcggccc

SEQ ID NO: 350248 - DNA, 1017 bp, Homo Sapiens
  misc_feature (49)..(49): n is a, c, g, or t
  misc_feature (234)..(234): n is a, c, g, or t
  misc_feature (903)..(903): n is a, c, g, or t
  misc_feature (906)..(906): n is a, c, g, or t
  misc_feature (930)..(930): n is a, c, g, or t
  misc_feature (938)..(938): n is a, c, g, or t
  misc_feature (940)..(940): n is a, c, g, or t
  misc_feature (945)..(945): n is a, c, g, or t
  misc_feature (947)..(947): n is a, c, g, or t
  misc_feature (951)..(951): n is a, c, g, or t
  misc_feature (972)..(972): n is a, c, g, or t
  misc_feature (975)..(975): n is a, c, g, or t
  misc_feature (979)..(979): n is a, c, g, or t
  misc_feature (981)..(981): n is a, c, g, or t
  misc_feature (985)..(985): n is a, c, g, or t
  misc_feature (987)..(987): n is a, c, g, or t
  misc_feature (991)..(991): n is a, c, g, or t
  misc_feature (1011)..(1011): n is a, c, g, or t
aggtgtcgctaaccggacggtggtcgccagggcgagaggcgggagccgnagaggtgaggcaggacccgggctccactgccgcctctccgagctcttgtgacgcggacctcagtgccaggatggctcggggcgagcggcggcgccggcagtgccggcagagggagtgcggacagccgagagggcggctcggggaggccccgggcgacgggacggccggggcggcgggccgcgtanacggctggaggagtggctctggccgtcgtggtcctgtctttggccctgggtatgtcggggcgctgggtgctggcgtggtaccgtgcgcggcgggcggtcacgctgcactccgcgcctcctgtgttgcctgccgactcctccagccccgccgtggccccggacctcttctggggaacctaccgccctcacgtctacttcggcatgaagacccgcagcccgaagcccctcctcaccggactcaggtacttctgccctccctttggtctccctgttcttctatgtggtgacagatggcaaggaagtcctactaccagaggttggggccaaggggcagttgaagtttatcagtgggcacaccagtgaacttggtaacttccgctttacacttttgccaccaaccagtccaggggatacagcccccaagtatggcagctacaatgtcttctggacctccaacccaggactgcccctgctgacagagatggtaaagagtcgcctaaatagctggtttcagcatcggcccccaggggcctcccctgaacgctacctcggcttgccaggatccctgaagtgggaggacagaggtccaagtgggcaagggcaggggcagttcttgatacagcaggtgaccctgaaaattcccatttccataaagtttgtgtttgaatnagnagtgcccaggcaggaggaatcaancctgccanantggcngnagtntatgaccaggcctggagagcntgntgangnttananaggnttgagaaacttcagtgaagngaaggg

SEQ ID NO: 350249 - DNA, 1149 bp, Homo Sapiens
gggtaaaggtcaattactgtgtattatgctttatacttcaaatgtttttcttattttatcaaatattacatttaaaaagaactgcaattttctggatgctttactttagtacgttgagtttattgatgatgcttggcacatctaaagagctgctgataaatgtttctaattaagtaacttgactcgcaaatttctagttaaagtcccttcaataaacttggagaaaaacattttgttgacaaatgtccttgaactctgacctacccaagcagtggacgtggtcccgcaccgtgcagttggcagggtagcgctgccgaggacaggacaccgtcatgcagctggtggagttggtacactcgtaatctgtttcaggaagctgccagcaaaatctgcaagtcatgttaatgatgaagttcttttgggatttgaagtcttgatcaacacaggtaacagatggtttcactgcacagtcaaaagtgacaggcttcccataggtacaggagaaatttgttgtgcagtctatacagtctgcaggaagcctgctacacaaaccattgctcggacacttcatcacataaggtgggatttcagtactttctgctgccctgggaactactgtgaatgtgcgtgttgggcccggatcctttattgactgagccagcgcctgcgattgctctaaatttaaggatcgtacaattagagaaacacgttaacccgggacaagaaaaccttattttgtgtggttaacacggcgggtctacaccaggccaataagctgctcatgaaaacctcacggctggtcagccagaaaacacaaagcttagggacgaaacgtcaacagagtagacatcagttcaggtcagccggcaacgagggaccgaaggatgacatcgcgctccagttccgcctccccggcccagcccccaagcgctccatctccgtgccagggctccgcagccgcgatggcgggctcggtgtcgccggagcggaggggcggcctcgggccgggcggccagggcgccagactccagatgcagcgacaagcggcccggagcccggcactcggcctcctccccgcgtcagcgtccgcccgtgggcccggcctcctcgcagctcccggggcctgctgccactcagccccacccggcg

SEQ ID NO: 350250 - DNA, 1128 bp, Homo Sapiens
  misc_feature (47)..(83): n is a, c, g, or t
  misc_feature (1005)..(1005): n is a, c, g, or t
  misc_feature (1047)..(1047): n is a, c, g, or t
  misc_feature (1067)..(1067): n is a, c, g, or t
tgatagactcactataggggaatggagcttatcgcggtggcggccgnnnnnnnnnnnnnnnnnnnnnnnnnnnnnnnnnnnnnatcaggccaaatcggccgagctcgaattcgtcgagagcggaagtgcgcaggcgctggcaagatggcgggaggggtgcgcccgctgaggggcctccgcgccttgtgtcgcgtgctgctcttcctctcgcagttctgcattctgtcgggcggtgaaagtactgaaatcccaccttatgtgatgaagtgtccgagcaatggtttgtgtagcaggcttcctgcagactgtatagactgcacaacaaatttctcctgtacctatgggaagcctgtcacttttgactgtgcagtgaaaccatctgttacctgtgttgatcaagacttcaaatcccaaaagaacttcatcattaacatgacttgcagattttgctggcagcttcctgaaacagattacgagtgtaccaactccaccagctgcatgacggtgtcctgtcctcggcagcgctaccctgccaactgcacggtgcgggaccacgtccactgcttgggtaaccgtacttttcccaaaatgctatattgcaattggactggaggctataagtggtctacggctctggctctaagcatcaccctcggtgggtttggagcagaccgtttctacctgggccagtggcgggaaggcctcggcaagctcttcagcttcggtggcctgggaatatggacgctgatagacgtcctgctcattggagttggctatgttggaccagcagatggctctttgtacatttagctgtggtgtgtgcttcagaaaggagcagggcttagaaaaagcccttttgtccgtaggagttgatgtggtgtgagtgatatatttctatgtttttaatgtacagcatctgtactttgtttgccttgataaaggtaagataaatgaaacgctgaactatgctaatctggaatttgtttttatttgccctgaaatatnatttttttctgtgaaaaaaattaatacgtactttaagccagngagaaatgaattaatacagntggattgaaaaatccatttaaattcctatggaacttttgggttttggaattgggcccaagt

SEQ ID NO: 350251 - DNA, 1404 bp, Homo Sapiens
ggggaagtgcgcaggcgctggcaagatggcgggaggggtgcgcccgctgcggggcctccgcgccttgtgtcgcgtgctgctcttcctctcgcagttctgcattctgtcgggcggtgagcaatcgcaggcgctggctcagtcaataaaggatccgggcccaacacgcacattcacagtagttcccagggcagcagaaagtactgaaatcccaccttatgtgatgaagtgtccgagcaatggtttgtgtagcaggcttcctgcagactgtatagactgcacaacaaatttctcctgtacctatgggaagcctgtcacttttgactgtgcagtgaaaccatctgttacctgtgttgatcaagacttcaaatcccaaaagaacttcatcattaacatgacttgcagattttgctggcagcttcctgaaacagattacgagtgtaccaactccaccagctgcatgacggtgtcctgtcctcggcagcgctaccctgccaactgcacggtgcgggaccacgtccactgcttgggtaaccgtacttttcccaaaatgctatattgcaattggactggaggctataagtggtctacggctctggctctaagcatcaccctcggtgggtttggagcagaccgtttctacctgggccagtggcgggaaggcctcggcaagctcttcagcttcggtggcctgggaatatggacgctgatagacgtcctgctcattggagttggctatgttggaccagcagatggctctttgtacatttagctgtggtgtgtgcttcagaaaggagcagggcttagaaaaagcccttttgtccgtagagttgatgtggtgtgagtgatatatttctatgtttttaatgtacagcatctgtactttgtttgccttgataaaggtaagataaatgaaacgctgaactatgctaatctggaatttgtttttatttgcctgaaatatatttttttctgtgaaaaaattaaaacgtacttaagccaggagaatgaattatacagtgattgaaaatccatttaattcctatgacttttgttttgtattgcccaagtcaaactacatcacttgtatctccagcccaaatgtagtctgccttgaaaagtctttcagctgtgactgcaggaagtgggagtgtttttattgttagctaattgctgtgactgcaggaagtgggagtgtttctgttgttggctaattgaagttattaggctcagcttcagtcatgtgtaagttttgcagtgtaatacatatgtagtctggtctgtatatatgaaaatttgaattaaactgcagaatgtttatgtctagttatggtttaaattttcttagtagtatataaaaggtaagagtactgaaaaattaataaaattgcaagttaagaaaaaaaa

SEQ ID NO: 350252 - DNA, 526 bp, Homo Sapiens
  misc_feature (514)..(514): n is a, c, g, or t
aggggtgcgccgctgcggggccttccggccttgtgtcgcgtgctgctcttcctttcgcagttctgcattctgtcgggcggtgaaagtactgaaatcccaccttatgtgatgaagtgtccgagcaatggtttgtgtagcaggcttcctgcagactgtatagactgcacaacaaatttctcctgtacctatgggaagcctgtcacttttgactgtgcagtgaaaccatctgttacctgtgttgatcaagacttcaaatcccaaaagaacttcatcattaacatgacttgcagattttgctggcagcttcctgaaacagattacgagtgtaccaactccaccagctgcatggacggtgtcctgtcctcgggcagcgctaccctggccaactggcacggtgcggggaccacgtccactgcttggggtaaaccgtaattttttcccaaaatggttataattggcaattgggattggagggtattaaggtgggtttaaggggttttgggttttaagggantcaaccttggtt

SEQ ID NO: 350253 - DNA, 389 bp, Homo Sapiens
cccccatgaacttttgttttgtaattgcccccaagtccaaacctaccatccaccttgtatcctcccagcccccaaatgtaagtcctgcccttgaaaagtcctttccagcctgtgaactgcaggaagtgggagtgtttttattgttagctaattgctgtgactgcaggaagtgggagtgtttcctgttgttggctaattgaagttattaggctcagcttcagtcatgtgtaagttttgcagtgtaatacatatgtagtctggtctgtatatatgaaaatttgaattaaactgcagaatgtttatgtctagttatggtttaaattttcttagtagtatataaaaggtaagagtactgaaaaattaataaaattgcaagttaagaaaaaaaa

SEQ ID NO: 350254 - DNA, 1865 bp, Homo Sapiens
caagaacaaagcacaagagtgaagctcctggaggaactcagatggagaagtatccagtatgcatctcggggagagagacattcagcctataatgaatggaaaaaggccctcttcaagcctgcggatgtgattctggatccaaaaacagcaaaccccatcctccttgtttctgaggaccagaggagtgtgcagcgtgccaaggagccccaggatctgccagacaaccctgagagatttaattggcattattgtgttctcggctgtgagagcttcatatcagggagacattactgggaggtggaggtaggggacaggaaagagtggcatataggggtgtgcagtaagaatgtgcagagaaaaggctgggtcaaaatgacacctgagaatggattctggactatgggcctgactgatgggaataagtatcggactctaactgagcccagaaccaacctgaaacttcctaagccccctaagaaagtgggggtcatcctggactatgagactggacatatctcattctacaatgccacggatggatcgcatatccacacattcctgcacgcctcctcctctgaggctctatatcctgttttcagaattttgaccttggagcccacggccctgaccatttgcccaacgtgaaaagaagtagagagttcccccgatcctgacctagtgcctgatcattccctggagacaccactgaccccgggcttagctaatgaaagtggggagcctcaggctgaagtaacatctctgcttctccctgcccagcctggagctaagggtctcaccctccacaacagccagtcagaaccataaagctacaggcacacactgaagcactttactgatattcattcaattattccataggacagttgtttgagtttggtgccaccttattggcccctttatacagataaggaaactggggtgtagaaaagtgtattgactttacaaagcagacaggaatagtgaacaacagagctgggatctgaacaacaatgactaacattaatggagaatttaaaacgttctgagtgctgtgttatgagctttggtgggtgtcactcctttaatcctcacaacaccctgtcgggtagtctcatttagcaagtatggaagctgaggcagggcaacattaagtaacttacataactcatacagtaatttgtgcagttgggagatgttcagcttcagtccctggccaattgcccgttcttttccagcctgatttcttcccccataggaagagcccacatgtagccctgaggttcccttcccaggacagctccaggatagagatcactgtaagtggttgtggagttaagacccctatggactccttcccagctgattatcagagccttagacccagcactccttggattggctctgcagagtgtcttggttgagagaataacgttgcagttcccacagggcatgtgactttgaaagagactagaggccacactcagttaataatggggcacagatgtgttcccacccaacaaatgtgataagtgatcgtgcagccagagccagccttccttcagtcaaggtttccaggcagagcaaataccctagagattctctgtaatattggtaatttggatgaaggaagctagaagaattacagggatgtttttaatcccactatggactcagtctcctggaaaaggatctgtccactcctggtcattggtggatgttaaacccatattcctttcaactgctgcctgctagggaaaactgctcctcattatcatcactattattgctcaccactgtatcccctctactgggcaagtgcttgtcaagttctagttgttcaataaatttgttaataatgctaaaaa

SEQ ID NO: 350255 - DNA, 806 bp, Homo Sapiens
agttgcatcacaatcctgcaggatgaccacgaccacaaagtccaagaattgatgtccactcatgagcttgaaaagaaagaattggaagaaaattttgaaaaactgcggctgtcattgcaggaccaggtggacacgctgaccttccagagccagtctctgcgggacagagcccgccgcttcgaagaggccttgaggaagaacacagaggagcagctggagattgcattggctccttatcagcacttggaagaagacatgaagagtctgaagcaggtattagaaatgaagaatcagcaaatacacgagcaagaaaagaagattcttgagctggaaaagctggcagaaaagaacattatcctagaagaaaagatccaggttctccaacagcagaacgaagacctcaaagcaaggattgaccaaaacacagttgtcaccagacagctgtcggaggaaaatgctaacctccaggaatatgttgagaaggaaacccaggagaagaagagattgagccgaaccaatgaagagctgctttggaagctccaaactggggacccgaccagtccgattaaactctcgcccacatctcccgtttaccgcggctcctcctcggggccctcctctccggccagagtcagcacaacacccagatgacgccactacacggcctgcgggagctccggcttctcgtcctccggtctccaccctgagggagcaccgacccggtgccgccggagctggccctgtgcgcatgctcagtagctgcgaatgcatcctaggcgcgtcctcctctgatccccgtgtaagac

SEQ ID NO: 350256 - DNA, 1583 bp, Homo Sapiens
aaataccaaaatggtttaaggggtaccctaaccggcaaaaatggagaaagaaccccccctcagacctctgccccacattggtcctaatgggaatccaagcttgcctaaaacaagcacattaactcacaggtaaatagcttcccatcaattctggactgggatttgactggctagtaaagccaaggagaatgtttccatcacacctggcacatattgtgccccagggtagcaatctattcaggaggactgattaaagagtccagctgtatccaagggagcaaacaggtagctcaagtacctgacagactatagcaagcaccttagcatttattttttaaaaagcaatctggacataatgcagaaccgggaaatgtgagaagatgtaagtagtgaaaaagtaagctcacctggggcaaaacaattcctgtggtttaagagctaccaacctttgagtaaaaccaaaatattctcatgtacatctgtacaatatttacttttcactgcagcttaaaatttttttatgaaagatgctttatatcacatttttatggagtcaaaaagatttcttagacaagaaagaattagttaaaatctactaatacttaccgaagagtctctgaactgagttctcctgttaaatcatccaactatgttacaacgtactgagctgcacgctgctgctaattaatactgcccctttgtgatggaacctcactgttaggacacagaacagtcgtaagtcccatcctgaaaaggttcttcctcctctgcttgggctgtgtcctcctctttccggctgaccatattgctgcttccaacttcaccctgggggatgcttccatggctggaggagcccctgctctcctctgcccgggggctagtctgttctggagtcttacccatagttaattggttggaagggcatctgggctggaccctgctcttctgttatctcactgagcttccgcaagtggtggcttaatgatgtttaaaaatggcttatatccaggacagtctgtagaggcccatcggtccactgcatggagccctgtctttatgttctggtaacatctctccatctacctctgaagactgtgtaataaccaaaatctgattgattattgaggattctctaagaatcaggcctataacgatgcaccagtctaggcaccctgcctccatgaaaatgtgtagcaaataccgaagctggacctgggatttatgaggccctttactggccaactccatggaaatgtgctccagctctgactgagttaaactgagtgtagagaaattttcatccaccattgtccagtcgccatccaccatggagctactttcagtcaagtctgtggctgaaccaatactgcattcatcacctttattagataaaggtgacaagaaggcatcttgcatttgtggtccatgggatgaagctgtgtctatctcatgatgggtggggccaatgttgctgagccagctctgacttcgctggatgttggagatgccagcatccatctcaaggttcaaaaatgggtcagctgattgagactttaacagctgctctcccacagttcggtacc

SEQ ID NO: 350257 - DNA, 1458 bp, Homo Sapiens
  misc_feature (18)..(18): n is a, c, g, or t
  misc_feature (25)..(25): n is a, c, g, or t
  misc_feature (46)..(46): n is a, c, g, or t
  misc_feature (68)..(68): n is a, c, g, or t
  misc_feature (80)..(80): n is a, c, g, or t
  misc_feature (147)..(147): n is a, c, g, or t
  misc_feature (214)..(214): n is a, c, g, or t
cttcccgcaagtcaagtncaaggcnttaagctttctcgcccgtgtncgtgcgccggtgcgtcaccagntcgagtgccaantgaacccttcccgcactgctcgcaccggtagctcttcctgcccacctcactgtcagggccaggcccntcctcgccactcttcccggggcgcccttctcctcctcgttgggctttctccgggacgcggtactccntgggggctccgtgggactggggtctggcggagctgcatccgggtgcgatctggctcagccggctgcccggagtctttgcccggccctgagctccggccgcaggctgcttcctgcgcgcactgcgggacgccccactggactctccctgccctggttctgaagggcttcacattcccaagggctgccacggatgaggtctgcaccctctgccccacctcgacggctcctgtgcacgcgcctctccactccttctcatctccctcctgccggctggagcccgaggcctcacccttgccgtgcgcttgaggggcccagaaaggcctgctgaagggaaagcccagtgacagcccatttttcttctgcaggacatccctgtagaagttctgctgcgtgtggtccagccgtccccactcctcccgggagaggtacaaggccacatcctcgaaagtcactggcatctgggaccaggcagtgaggagcgctgcagccatctgccggtctctggtcctcccctctcgggaaagcacggggatccggggggaggggagggctccgccaggcaggaagagagctttctccttagagccgtgacttaggggtgcccagccccaggcaccttgagccccatcctcctgcgatgccccctcggagtgtggctcttcgggctccatcttaatgtgcagtgactcctgagtgtcccctgaaggtaccgcctcccccagcttagaaggcatttcctgatgaggatgtccacgatctggaacctccgggggtgtctccttgtcctgggtgtcctggatgcctccgccgtctgcagacattttctatttcagagctagaaagaacagctgagttgtttctccctctttttggccaagccccctccagcttctggccaggagccggggtggaggcagagggggcacctgcggcagtgggggccccctcccccgggaagggagtctccacagcctgcacggggcgggcgggggagttgggtggagactgggagtagggaagacaggaagtccctcccagatcccattccccatgcagccgcagccctacagcgttcccggttttgagggttccgggtgtggagtctcgagcctgggttgcacctgctcttggccgggaggtgactcccagagccgcaatgccagctcatgaggatggctttacccaggacgcgttcatgatgccagcaaggcagagccaccaaaacagaaaaatggaagatgcaa

SEQ ID NO: 350258 - DNA, 925 bp, Homo Sapiens
accaactcccccgcccgcccgtgcaggctgtggagactcccttcccgggggagggggcccccactgccgcaggtgccccctctgcctccaccccgctctgaaatagaaaatgtctgcagacggcggaggcatccaggacacccaggacaaggagacacccccggaggttccagatcgtggacatcctcatcaggaaatgccttctaagctgggggaggcggtaccttcaggggacactcaggagtcactgcacattaagatggagcccgaagagccacactccgatgggggcatcgccaggaggatggggctcaatggtgcctggggctgggcacccctaagtcacggctctaaggagaaagctctcttcctgcctggcggagccctcccctccccccggatccccgtgactttcccgagaggggaggaccagagacctggcagatggctgcaagcgctcctcacatgcctggtccccagatgccagtgactttcgaggatgtggccttgtacctctcccgggaggagtggggacggctggaccacacgcagcagaacttctacagggatgtcctgcagaagacaaatgggctgtcactgggctttcccttcagcaggcctttctgggcccctcaagctcacggcaagggtgaggcctcgggctccagccgggcaggcaggacgatgagaaggagtggacgaggcgcgtgcacaggagccgtcgaggtggggcagagggtgcaagacctcatccgtggcaagccttggggactgtggaagcccttgcggaacccagggccagggagagtcccattggggcgtccgcactagcgcggcaagaaagcagccgcaggccggagctcaaggacggccaagaatccgggaacgggtgaaccaatcggacccgaagcagtcggcagaaaca

SEQ ID NO: 350259 - DNA, 1104 bp, Homo Sapiens
  misc_feature (996)..(996): n is a, c, g, or t
  misc_feature (1001)..(1001): n is a, c, g, or t
  misc_feature (1016)..(1016): n is a, c, g, or t
  misc_feature (1030)..(1030): n is a, c, g, or t
  misc_feature (1041)..(1041): n is a, c, g, or t
  misc_feature (1049)..(1049): n is a, c, g, or t
  misc_feature (1051)..(1051): n is a, c, g, or t
  misc_feature (1059)..(1059): n is a, c, g, or t
  misc_feature (1064)..(1064): n is a, c, g, or t
  misc_feature (1074)..(1074): n is a, c, g, or t
atggagttcccgttcgatgtggacgcgctgttcccggagcggatcacggtgctggaccagcacctgaggcccccagcccgccgacccggaaccacaacgccggcccgtgttgatctacagcagcaaattatgaccattatagatgaactgggcaaggcttctgccaaggcccagaatctttccgctcctatcactagtgcatcaaggatgcagagtaaccgccatgttgtttatattctcaaagacagttcagcccgaccggctggaaaaggagccattattggtttcatcaaagttggatacaagaagctctttgtactggatgatcgtgaggctcataatgaggtagaaccactttgcatcctggacttttacatccatgagtctgtgcaacgccatggccatgggcgagaactcttccagtatatgttgcagaaggagcgagtggaaccgcaccaactggcaattgaccgaccctcacagaagctgctgaaattcctgaataagcactacaatctggagaccacagtcccacaggtgaacaactttgtgatctttgaaggcttctttgcccatcaacatcctccagcaaggaagctgccacccaagagagcagagggagacatcaagccatactcctctagtgaccgagaatttctgaaggtagctgtggagcctccttggcccctaaacagggcccctcgccgcgccacacctccagcccacccacccccccgctccagcagcctgggaaactcaccagaacgaggtcccctccgcccctttgtgccagagcaggagctgctgcgttccttgcgcctctgccccccacaccctaccgcccgccttctgttggctgctgaccctgggggcagcccagctcaacgtcgtcgcaccagctcccttccccgctctgaggagagtcgatactaacagctaccctctccctgccctgggagacctggggtgggcagggacccctccctgagaactcanacccntttccattgctcctntggaccagtggacntgaaaaaccanagattctntntatttttnaaagngggtgtaggnttaaatgctaaattttagtttcttacaaaa

SEQ ID NO: 350260 - DNA, 1144 bp, Homo Sapiens
  misc_feature (9)..(9): n is a, c, g, or t
  misc_feature (18)..(18): n is a, c, g, or t
  misc_feature (22)..(22): n is a, c, g, or t
  misc_feature (38)..(41): n is a, c, g, or t
  misc_feature (47)..(47): n is a, c, g, or t
tccacagtncctccccgnttgngagagtgatattaacnnnnccttcncctgcctgggagacctgggtgggcaggaacccctccctgagaccctcagacccactcctcccattgcatcctgtaggacccagtggaacctgacagagcccatagattccctcttctactttcttagacagcagggatgtcagggtctcaaactgcctaacactttgtagcttttcttaacacaaaagcaccccttctctcctaacttgggctctgaatactttcccaacaggaagtctgatctgttgccagacttcttggttagatggctcatacatttatctagagaagcacactcttgcttgctgtcaaactttagaacaccatggaaggtctaagggcatcctgtgccagggaaactttttaaggaattttatctatgggataaaccccatattccctctagtgtctactggtggctctaatactgctttgtgctgcctgccacacttgccctttgagcctgcgaatggccgctagtgagcaagctctgcttcagagcagtctagttaggtagaacagggacttaccagcttcccaaagggatctactcaccattgccaaactcttcatttccacattttgtgtaggtgtcagggaaccccaaactggtgttgctttggggtctctaaaggagattggctgacaccaccatttcccccagatccagattctctgagggaggttgtttcttgagagtagatccagagtgtcaaggatctgttagatcctggaatcccttcttgcatccatccctccctggtagctaggtcccgatatactcctgtcttgtgagattgtcgagatgagatgggggaccactcttcctctgtccttcctctctcctttcctccatagcaaggacgaccttccctgctccatgcccagagtatagctagatcccttcccctccctaccctctgaatgtgtgctagatcaggtgccccactgtgtttcctgaaatccttgggagccggatctccccatctcccctactcactcttcccttttcttctctcagtgttgtctgaataaagtgtgaaatcttttgtgttttctaaattgacattttcaatgaaaaaaagaatcccaaaaaa

SEQ ID NO: 350261 - DNA, 1364 bp, Homo Sapiens
  misc_feature (28)..(28): n is a, c, g, or t
  misc_feature (42)..(43): n is a, c, g, or t
  misc_feature (66)..(69): n is a, c, g, or t
  misc_feature (71)..(73): n is a, c, g, or t
  misc_feature (76)..(76): n is a, c, g, or t
  misc_feature (83)..(83): n is a, c, g, or t
  misc_feature (89)..(89): n is a, c, g, or t
  misc_feature (92)..(92): n is a, c, g, or t
  misc_feature (97)..(97): n is a, c, g, or t
  misc_feature (101)..(101): n is a, c, g, or t
  misc_feature (103)..(103): n is a, c, g, or t
  misc_feature (110)..(111): n is a, c, g, or t
  misc_feature (116)..(116): n is a, c, g, or t
  misc_feature (123)..(124): n is a, c, g, or t
  misc_feature (139)..(140): n is a, c, g, or t
  misc_feature (158)..(158): n is a, c, g, or t
  misc_feature (163)..(163): n is a, c, g, or t
  misc_feature (165)..(165): n is a, c, g, or t
  misc_feature (171)..(171): n is a, c, g, or t
  misc_feature (198)..(199): n is a, c, g, or t
  misc_feature (203)..(205): n is a, c, g, or t
  misc_feature (209)..(211): n is a, c, g, or t
  misc_feature (218)..(218): n is a, c, g, or t
  misc_feature (220)..(223): n is a, c, g, or t
  misc_feature (226)..(226): n is a, c, g, or t
  misc_feature (228)..(228): n is a, c, g, or t
  misc_feature (231)..(231): n is a, c, g, or t
  misc_feature (234)..(234): n is a, c, g, or t
  misc_feature (239)..(239): n is a, c, g, or t
  misc_feature (241)..(242): n is a, c, g, or t
  misc_feature (249)..(249): n is a, c, g, or t
  misc_feature (251)..(255): n is a, c, g, or t
  misc_feature (260)..(260): n is a, c, g, or t
  misc_feature (262)..(264): n is a, c, g, or t
  misc_feature (270)..(270): n is a, c, g, or t
  misc_feature (272)..(272): n is a, c, g, or t
  misc_feature (277)..(277): n is a, c, g, or t
  misc_feature (283)..(283): n is a, c, g, or t
  misc_feature (287)..(288): n is a, c, g, or t
  misc_feature (295)..(295): n is a, c, g, or t
  misc_feature (301)..(301): n is a, c, g, or t
  misc_feature (304)..(304): n is a, c, g, or t
  misc_feature (308)..(308): n is a, c, g, or t
  misc_feature (321)..(321): n is a, c, g, or t
  misc_feature (781)..(781): n is a, c, g, or t
  misc_feature (787)..(787): n is a, c, g, or t
  misc_feature (798)..(798): n is a, c, g, or t
  misc_feature (800)..(800): n is a, c, g, or t
  misc_feature (860)..(860): n is a, c, g, or t
  misc_feature (941)..(941): n is a, c, g, or t
  misc_feature (1012)..(1012): n is a, c, g, or t
  misc_feature (1017)..(1017): n is a, c, g, or t
  misc_feature (1041)..(1041): n is a, c, g, or t
  misc_feature (1087)..(1087): n is a, c, g, or t
  misc_feature (1096)..(1096): n is a, c, g, or t
  misc_feature (1163)..(1163): n is a, c, g, or t
  misc_feature (1166)..(1166): n is a, c, g, or t
  misc_feature (1170)..(1171): n is a, c, g, or t
  misc_feature (1178)..(1178): n is a, c, g, or t
  misc_feature (1295)..(1295): n is a, c, g, or t
  misc_feature (1313)..(1313): n is a, c, g, or t
  misc_feature (1344)..(1344): n is a, c, g, or t
ttctgaaggtagctgtggagcctccttngcccctaaacaggnnccctcgccgcgccacaccaccannnnannnacnccccggnaccaanagnttggnaaantnaccaganngaggnccccttnntccctttttgccagnntaggtgctgcggtgggtnggggntngggganataaaataaataaagaaagaattatgnnggcnnntgannntgggggnannnnatntnaanttngttgnannatttttntnnnnngatangnnnagaggncnttaanaattgntaannttataantgtaantgntttnatttggggtgggnagggaacccctccctgagaacctcagacccactcttccattgcatcctgtaggacccagtggaacctgacagagcccataggattccctcttctactttcttagacagcagggatgtcagggtctcaaactgcctaacactttgtagcttttcttaacacaaaagcaccccttctctcctaacttgggctctgaatactttcccaacaggaagtctgatctgttgccagacttcttggttagatggctcatacatttatctagagaagcacactcttgcttgctgtcaaactttagaacaccatggaaggtctaagggcatcctgtgccagggaaactttttaaggaattttatctatgggataaaccccatattccctctagtgtctactggtggctctaatactgctttgtgctgcatgccacaacttaccctttgagcctgcgaatggccgctagtnaacaanctctacttcanancagtctaattaagtagaacagggacattaccaacttcccaaagggatctactcaccattnccaaactcttcatttccacattttgtgtaggtgtcagggaaccccaaactggtgttgctttggagtctctaaaggagattngctgacaccaccatttcccccagatccagattctctgagggaggttgtttcttaagaataaatccagagtntcaangatctgttagatcctggaatcccntcttgcatccatccctccctggtagctaggtccccatatactcctntcttttganattgtcgagatgagatgggggaccactcttcctctgtccttcctctctcctttcctccatagcaagnacnaccnnccctgcnccatgcccagagtatagctagatcccttcccctccctaccctctgaatgtgtgctagatcaggtgccccactgtgtttcctgaaatccttgggagccggatctccccatctcccccnctcactcttcccttttcntctctcagtgttgtctgaataaagtgtgaantcttttgtgttttctaaatt

SEQ ID NO: 350262 - DNA, 1953 bp, Homo Sapiens
  misc_feature (1125)..(1125): n is a, c, g, or t
  misc_feature (1855)..(1911): n is a, c, g, or t
gatcgcgcacaatgggccatggagttcccgttcgatgtggacgcgctgttcccggagcggatcacggtgctggaccagcacctgaggcccccagcccgccgacccggaaccacaacgccggcccgtgttgatctacagcagcaaattatgaccattatagatgaactgggcaaggcttctgccaaggcccagaatctttccgctcctatcactagtgcatcaaggatgcagagtaaccgccatgttgtttatattctcaaagacagttcagcccgaccggctggaaaaggagccattattggtttcatcaaagttggatacaagaagctctttgtactggatgatcgtgaggctcataatgaggtagaaccactttgcatcctggacttttacatccatgagtctgtgcaacgccatggccatgggcgagaactcttccagtatatgttgcagaaggagcgagtggaaccgcaccaactggcaattgaccgaccctcacagaagctgctgaaattcctgaataagcactacaatctggagaccacagtcccacaggtgaacaactttgtgatctttgaaggcttctttgcccatcaacatcggccccctgctccctctctgagggcaactcgacactctcgtgctgctgcagtcgatcccacgcccgctgctccagcaaggaagctgccacccaagagagcagagggagacatcaagccatactcctctagtgaccgagaatttctgaaggtagctgtggagcctccttggcccctaaacagggcccctcgccgcgccacacctccagcccacccacccccccgctccagcagcctggggaaactcaccagaacgaggtccctccgcccctttgtgccagagcaggagctgctgcgttccttgcgcctctgccccccacaccctaccgcccgccttctgttggctgctgaccctgggggcagccagctcaacgtcgtcgcaccaggggactcccccaggtctggtagcccaaagctgctgctacagccgccatgggggggtgaattcctcatcccccaatacaggcaaccaagactccaagcagggagaacaggaaacaaagaataggtgaggtcgaaacccctntggcccctaaacagccccccacgcaccaccacacccccagcccaacaacacccccactcacagcagactcggaaatctcaccagaacgaactccacaccagcccctttgtcccagagcaagacctgctaccttacatcctgcaagcccctgccccccacaccctcaacgcccgcacttccctttggaatacggattccctgagaggcagcaaagctcaacatagcactaatcgcaccagcggcacacccatcaggtctcctacaccaaaactgctgccacagacaccatgaagaggctgaaatcctaatcccccaatacaggaaaccaagaacccaagcagggacaacaccaaacaaagaacaggtctgccagtgaggagcaggccttgtcacaggatgggtctggggagaagcccatgcacacagctcctccacaggccccggccccgccagcccagtcctggacagtgggtggggacatactcaacgccaggttcattcgaaacctgcaggaacgtcgcagcaccaggccttggtgaccgcagccccgtcaaacatcttcaaagtattatttctccctcactacaggaaagagccaaagcccaaccctcataatagatggatacattcattcattcattcattcagcaggcttatcagattcaagtcatttgtatcttttaaccagaccaataaaagtatttatttttatccccggaaaaacacaaannnnnnnnnnnnnnnnnnnnnnnnnnnnnnnnnnnnnnnnnnnnnnnnnnnnnnnnnaacaatccaaacagtccccaacataggggggcgccgcctccc

SEQ ID NO: 350263 - DNA, 459 bp, Homo Sapiens
aggatcaagtaggccacattcactgtctactcctgccttcccatgcctgatatttccacaggcaaccaagactccaagcagggagaacaggaaacaaagaataggtctgccagtgaggagcaggccttgtcacaggatgggtctggggagaagcccatgcacacagctcctccacaggccccggccccgccagcccagtcctggacagtgggtggggacatactcaacgccaggttcattcgaaacctgcaggaacgtcgcagcaccaggccttggtgaccgcagccccgtcaaacatcttcaaagtattatttctccctcactacaggaaagagccaaagcccaaccctcataatagatggatacattcattcattcattcattcagcaggcttatcagattcaagtcatttgtatcttttaaccagaccaataaaagtatttatttttatcacaaaa

SEQ ID NO: 350264 - DNA, 968 bp, Homo Sapiens
  misc_feature (332)..(332): n is a, c, g, or t
  misc_feature (384)..(384): n is a, c, g, or t
  misc_feature (386)..(386): n is a, c, g, or t
gcttcacccagggtttagggtccgagggaaggatgggggggactcaaaatgccccttgcataggaatcgttgcatcgagaatcgtgctcagtgacgccccccaatccccctcgggtggggggttcctgaggccgtgggagcagagggagggaggtggctaattccgtgggaccccggctccaaaaggggggtccgctaaaaagtctgggaaccggtgtggtctctgggcttgggggaggtagcgcatccttgagcccaggataggaggtgggaaatgattttccaaccgcgagcgtggaccggtgaggaccgctggggaaggggggctgggnatccagccgagctgggtgttgtcggttcccaatcttctgatactccagtgtntncctcttcgggaacagcctctgtgaatcatcctatggactactttaaatggaaacactcttaacctaaataaaccgtgtcctagccaagcagcgatgcctgcacttatcggcttctgtacaaaatgcgtattagagacaaaacttttaaaacaagtgtttgtcctcatactgcctcaaaccttagcacaccaccaaaggtacaaatacaaccctctgggaaacactggtgtctgtgaagagggtacctttggggcaccatctcagggaagggactcagggttaggcgtaagacaaagagggtgcttggggagggtctggttccctggaattgcagacaggttgcgcctatcttggaagttctagcatcaagccaacctgggctggacaagtctgttagggcaatggggatatgggtgcggaacaggctcatacacatctccataaggtgctggtttattttcccagtaagcattgcagtagcattcacacatctagttatcaagaagttttccccgtccccatcaaaaacagtaccgtgtcacatggatgcctctaaattttgttgtgacaaaaaatacttaa

SEQ ID NO: 350265 - DNA, 2397 bp, Homo Sapiens
  misc_feature (21)..(21): n is a, c, g, or t
  misc_feature (97)..(97): n is a, c, g, or t
  misc_feature (179)..(179): n is a, c, g, or t
  misc_feature (181)..(181): n is a, c, g, or t
  misc_feature (212)..(212): n is a, c, g, or t
  misc_feature (829)..(896): n is a, c, g, or t
ttatgctttatttaaagccanaaagtttaattttttcatttacagaagtgatatcaagtttctgttttaggtaaattcatgtaaataagcatatganttgatttaagggaagatattgattgaacaatatttctcatgatgtgtacatgtggaagaaacagtggaatcagatgagaganangtttgcagctgctcagtccctgagggcaggngtcccccgggttggacacatctgttccatcttcaccactaacaactcatgggacttccaggaatggaagccacaaacaaaacaggctttcaaacaaattaaaggaaaatgtaagatgtgtaaaatgaaaacgcacacatttacactttctaatctctgcctcacacacagacatgtacactcacacacattttcaaagtggaaatatgtctgtagtaaggccatgggtggttcatcgctgaaacacattatcccgtttcatgaacaatgttaccccagtgaatttaatgtgatttcttgtcataaccatccagcaacctcacattgacacggcaatgtgaagttttcgaagtctccttcattggttggatctctacggatctgatggtctggttcctgtttgacagataagaacctagagctctgtgaggcaaaaggatttcgcaaaagtcacacagatttaggaccaggtctctgcatgcccaaccccgatgtggcttctctttccactgtcccatctataaattgtaagaagatggtaagactgtctcttgttcctgttcttgtccattgctgcattatcatttctcctgggaacatcactctaaataaaaacannnnnnnnnnnnnnnnnnnnnnnnnnnnnnnnnnnnnnnnnnnnnnnnnnnnnnnnnnnnnnnnnnnnaagcttactgaaaattagaatgcaggattttaattctaagggaaaggaaaattctccatgtatctaatcgaaaaaaaacatggaagtcatcatgagtttgtttctgggggatgatatcagatgaaaatgggcccttaggtagtaggaggtggcaggtctcagttcagtgtttacacatgggctccacgcagagctacagactgagttccttagcagcttccgtaggaggtcctttgaagaagggctgctctgcattcgatatgtagaaacttgtggagaagatgaggaaactgaggaaaaccaccaatgcaatccacaatccaatcccttgactctctgttttccccaacagtgaaaattcgtgtacagagtattccccaatgacttctctcaggcaatgtagaaagggagaagtcgattcagcattgactagttggtactgtggctcaacaggctccatctctgaaagtgttgattcttccttttctttctggtgaattcattcataaagcgatggaggttgagaagcggggctcctgcaagtccagcactctgtgcagtgtgatccttccgtatccagaagatacgcagctgaacacatgcagattagagattttcaggttttgtcttctccccaaatccaggaggaacccaaggcaagattaaaattctgattgcattccagatatggaaaaaagaacttgaagtaaaggcaaaactgaaataggctttcttcccatcatgggtggggtttctcatctcctttatcgtttaggtagatatttttataccttttgatttatgaaaaatttaagaatgcagtttcttttttctttcagttttgtggcaaaatcctctgctttgtgtgaaatagctgcagtaaaatgctgtgtaaattttatctgaaaggttctacggaaagccataaacatcacttgtctatgggcctcactttgtccaagggccagatcgcaacaaaatatttttgaatttagacatatatattgaattttataaagccacaaaaatatgtcttgaggaatacatggtagtctgacaagccaacacctctctccttaatccaaaattcaaaaggtagtataattctttctttcccagcagcagaggaagtgactattgcaacccacattctgagtgtgaaatgaggcctcattcagtttcctaatttccaagattctttttcagcacccagctgaataaagtatgtcccggagctggaactgcctgtccgcgtggaccctctcctctggcacggaaactccgtgtctgcagactgcctcagtcctggagacttctgccgggaacccgggacaccgagaggggcccagcccttccccacctctctcctgaccgttactccggacaggtagggtctgcgctcctcttcctctctaaattgcgggtcacatttgcggatgccaggcgagctcgtgccttcggaaattaacaatcctatccagttgattcggaccatcttccg

SEQ ID NO: 350266 - DNA, 1175 bp, Homo Sapiens
gcggccgctcgttgatcctctgtgggagccgctccagcagccccacgggcacgtaccggcacaggaaggacagccactcgagcagaaagcgccgggtcttctccacgccctgcgtgtccgagccccagtgctccaggccgtagttggtgaagtcccgcaggatgtccaggcgctcggacgacgagatgtcccagtgccgctgctccttgatctccgtgaagagccacggcttgagcagggcgccacgggcaatcatgatcccggtgacaccagtctgcatggcgcggttggcatcctcaaatgacaagatgtccccatttccgaacaggggcatggggctggcggcctgcacgcactcctcgatgtactgccagtcggctagcttggtgtagcgctgctcccgagagcggccgtggagcgtgacgagtgccacgccccagtcccgcagctcgggcagcaggcggtgcgccaggttcacacgctcctggacgcctgtgcggatcttcacagtcagcggcacatccagcacctggttcatgccacggacgatctgctggaacttggtggagcgattcatgagggcacagcccccacccttcttgtacacgaggtcgatggggcagccgacgttgatgtccacaaagtccacctccacggtgcggctcagcagctcggcacacttggtcatggtgtcggggaaggcgccctccagctggacgccaaagatgtcctcacactggtggcgtttgagtagggcccactcggacatctggccctgcagcaggttggtgcagacggccatctctccacatgtcacatccgccccgaagcgcttgcagatccgtcggaagggcaggttcccacacgtggtgaggggggccaggtaaagtttgccacggatgtccagccgcttcttctcacagggccgcagcctgaccacgtcctcatccgtcaggggcccgcaggtccgcacggggctgctgggaggggtgctagtgcccggccctgcggggacctgctgggcaccacagttttcctgcctgggagcgccctcggctgccgtgccctcggggacagcggcagcgggtgtcgggcctggctgaaccggcgcagggcctcctcgtgccggaattcaccacccagcctcgctacctatacccgtaggagtactgcca

SEQ ID NO: 350267 - DNA, 1192 bp, Homo Sapiens
tcccgggatgcacaatcagggaagacacgcgtgacccggaaggtcttcccgccacactccagagcggatgtgaggggcgccgatggcggagggaacggcggaggctcctctagagaatggtggtggtggcgactcgggagccggagctttggaacgaggagtggcgcccattaagcgtcaatacctcaccaccaaggagcagtttcaccaattcctggaagccaaagggcaggagaagacttgccgggaaaccgaggtaggagaccctgctggcaatgagctggctgagcctgaggctaagcggatccgactggaggatggacagacggcggacgggcagacggaggaggcagcagagcccggggagcagctacagactcagaagagggcccggggacaaaacaagggccggccccatgtgaagcccacgaactacgacaagaacaggctgtgtccctccctaatccaggagtcggctgctaagtgtttcttcggtgatcgctgccgctttctgcacgacgtggggcgctacctggagaccaagccggccgacctgggcccccgctgcgtgctcttcgagaccttcggccggtgcccctacggcgtgacctgccgcttcgctggggcccacctgaggcccgagggacagaacctggtgcaggaggagttggcggcccgcgggacccagcccccgtccatccgcaacgggctggacaaagccctgcagcagcagctgcggaagcgcgaggtccgcttcgagcgagctgagcaggccctgcgccggttcagccagggccccaaacccgctgccgctgtccccgagggcacggcagccgagggcgctccaggcaggaaaactgtggtgcccagcaggtccccgcagggccgggcactagaaccctcccagcagcccgtgcggacctgcgggcccctgacagatgaagacgtggtcaggctgccgccctgggaagaaaaaccggctggacatccgggccaaactttacctggccccccctcaccaggggggggaacctgccccttccggagggatctgtcaagggctttcgggggcggatggtgaacatgtggaaaaaaatggcccttcttggccccaacctgtcttgcaggggcccaaaattgcccccaaaggggggcccccatccttaaacgcccccaccccggggtgggaggg

SEQ ID NO: 350268 - DNA, 1105 bp, Homo Sapiens
gtggaccggtccggaatttcgggatacactccagagcggatgtgaggggcgccgatggcggagggaacggcggaggctcctctagagaatggtggtggtggcgactcgggagccggagctttggaacgaggagtggcgcccattaagcgtcaatacctcaccaccaaggagcagtttcaccaattcctggaagccaaagggcaggagaagacttgccgggaaaccgaggtaggagaccctgctggcaatgagctggctgagcctgaggctaagcggatccgactggaggatggacagacggcggacgggcagacggaggaggcagcagagcccggggagcagctacagactcagaagagggcccggggacaaaacaagggccggccccatgtgaagcccacgaactacgacaagaacaggctgtgtccctccctaatccaggagtcggctgctaagtgtttcttcggtgatcgctgccgctttctgcacgacgtggggcgctacctggagaccaagccggccgacctgggcccccgctgcgtgctcttcgagaccttcggccggtgcccctacggcgtgacctgccgcttcgctggggcccacctggggcccgagggacagaacctggtgcaggaggagttggcggcccgcgggacccagcccccgtccatccgcaacggcctggacaaagccctgcagcagcagctgcggaagcgcgaggtccgcttcgagcgagctgagcaggccctgcgccggttcagccagggccccacacccgctgccgctgtccccgagggcacggcagccgagggcgctcccaggcaggaaaaactgtgggtgccccaccaggtcccccccagggcccgggcactagcacccctccagcaggcccggggcggacctgcggggccctgaacggtattaagacctggttcaggcttgcgcccctgggaaaaagaacggctgggacatccgtgggcaaactttacctgggccccctcacccaggtgtgggaaacttgccccttccaaaggaacggcaagggccctcccgggcgggaatgtacaaccgtggtgaaaaatgggcctcctggaccccaccgtct

SEQ ID NO: 350269 - DNA, 1378 bp, Homo Sapiens
  misc_feature (181)..(181): n is a, c, g, or t
  misc_feature (1228)..(1228): n is a, c, g, or t
tctcattgctcaggaccactccggagccccgcttcatccagacgatggtcagggatgggttgccggtccaggcgcagctgaagatggcatcagagcccagatccacgagcaaggattggggttctgtggtcatccggggcccaaagtagacgtcaaccgtgcggctgaggttggtgctgcncagggcgttggtcacctcacaggagacgggctctgagaagtacgtgtagtccactgtggtcctgtacacctctccagatgcctccttgatgatctggccccgcttggcccacctgtactgggtgacagctgggttggcctttgcagagcagtggaaagtgacgacgttgttcctccagcactggctgtggctccacccgagaggttgaccagtggagggtgccttggatgtcaatggtgaccgacgtctcctttcctccggggatggctttgtttggtggcacgacacacgatgctctggccattctccacgtcaccaggggagatgaagagggtgctgacgatgctctcccgcttgccgtcccgaagcagggtcttggagtagtggccccattgatgacctctccctttcgcaaccagatgatggaggctgcaggcttggcattgtctgcgtggcaggtgaggttgagagggtcccccgcacgcaggctgatcacagggccccccaggatgacggggtcatcagcggcaccaggactgtgaggcgtgcggggcgggagcggatggcggcctggatggcctggcactcgtacaccgcatcgtcttgcagctctgccctcaggatcttcaggtggtgctcccctgacaggtggttccctaccaccaggtactgtgggtaacttgagaggtccctgcccacacccagagccaagccgtccttgatccacagaacgaagccatcgtattcggggatggcgcaagtagcgtcactggctgtcccgacaccaccacctggtccctggggctgctggctgaaaggaaataagacttggccttcaattcaattctccgaaacttgtccttggccatgtagcccagcaccagacagcatcctctcttctggaggcccagctcttgacctgaagaggaagaagcagacgaagagcagatcgagctggaagggtttcattccttagcgcagcgaaggaaagccggcggggtaacttggctgtggttagtttctcttccttggcggctctcggtgctnagcctccgccggtcctctcgggttcgcgcctaccatctgtccgtccgtggcgtctccgggtggcttcggtctctttgtgcctctgggtatctgcagccagccgacacaaactgcctgttcttagccgcctcgggaagccgggattgtcag

SEQ ID NO: 350270 - DNA, 2358 bp, Homo Sapiens
  misc_feature (2329)..(2329): n is a, c, g, or t
tagcgaggcctgggtggcgaattcggcacgagggagtgacggaagttgtgctcttggtgaatggggttcttccttttttatttaccggtggctgtgcttccaatttaggaagaccccggcgacctgttcctcacccccgcttcgccctcacactttcgggatgtctgcgattcctgctgaggagagcgaccagctgctgatccgaccccttggagctgggcaagaagtaggaagatcatgtattattctcgagttcaaaggaagaaaaataatgctcgactgtgggatccaccctggcctagaaggaatggatgctcttccttatattgatttaattgacccagctgagattgatctcctattaattagtcatttccatttggatcactgtggagctctgccctggtttctacagaagacaagtttcaaaggaagaacatttatgactcatgccacaaaagctatttatagatggcttctttctgattatgtcaaagttagtaacatatcagcagacgacatgctgtataccgagacagatttggaagaaagcatggacaaaattgaaactatcaactttcatgaagttaaggaagttgcgggaatcaagttttggtgttaccatgcaggtcacgtcctaggagccgccatgttcatgattgagatcgcaggcgtgaagcttttgtacactggtgatttctcaagacaagaagataggcacttaatggcagctgaaattcctaatattaagcctgatattcttatcattgaatctacttatgggacccatatccatgagaaacgtgaagagcgagaagcaagattctgtaacactgtccacgatattgtaaacagaggaagcaggggtctcattcctgtctttgctcttggaagggctcaggagctgctcttgattctagatgagtactggcagaatcacccagaactacatgacattccaatatactatgcatcatctttggcccaagaagtgtatggcagtgtaccagacatatgtaaatgccatgaatgacaaaatccgcaaacagatcaacatcaataatccctttgttttcaaacacattagtaacctcaagagcatggatcattttgatgacattggtcccagtgttgtaatggcctccccaggcatgatgcaaagtggcttatccagagaattatttgaaagctggtgtactgataagaggaatggtgtcattatagcgggatactgtgtagaagggacacttgccaagcacatcatgtctgaacctgaagaaatcactactatgtctggacagaagttaccactgaaaatgtctgttgattacatttctttctcagctcacacggattaccagcaaaccagtgaatttattcgtgctttgaaaccgcctcatgtgattttagtccatggagaacagaatgaaatggccagattgaaagcagcactgattcgagaatatgaagataacgatgaagttcacatagaggttcataatcctcggaatacagaagcagtgaccttaaacttcagaggagaaaaactagccaaggttatggggatttttagcagacaaaaaaccagaacaagggccaggcgggtctcaggaatacttgttaaaagaaactttaatttatcaccatacttttctccttgcgacctgtccaattatactgaccctggccatgagcacggtgaagcagacccaagactattccatatactggtccctttaatttgctctgttaccagtctgcagaaattgacaggtgatgtggaagtatacttagaaattcaagaaacaacctgctctgaaagtcgttcagaaaatattactgtgaatacaagaaccaggcatggtggtattagaatggctggcatacccttctaatgatatgtatgcagatacagtaacaactgtgatattggaagttcagtcaaatccccaaaataagaaaaggtgcagtacagaaggtttctaaaaaattagataatgcagcgtttacagtcaagaggttggagatcatgctccaggacatattatggagtaagactgctgtaagtgtaaaggtatgagcatctagttcttagcgtcacagtggacgggaaaactgccaaccttaacttggagacacggactgtagaatgtgaagagggaagtgaagacgatgaatccctccgagaaatggtggagctggctgcacagagactgtacgaggccctgacgccagttcactgagactgtgcctgtatatgaactttgaaaaaatacttgactctacttttgttacctaaaataaaatgcattcgtttctctgggaaacncccaagagcccccaaaacaaaaaatatgt

SEQ ID NO: 350271 - DNA, 761 bp, Homo Sapiens
tttgaaacgtttggtcttaccgtgaacggaggctggcttggcttagtccacgctgatgagtaagtgagggatgtctccatcttgcagatcaccaggcaagagagttgcctgcaccaggtaagaggccaaagcccctggggtaacagtccccaccgctacccgaggtaaaacaataaaagctatgtggttagagctcaggcctctcggtgcctggtgtcagagaaggcacgagcccacagataggtgcacggtgcaaggacctgggatgggcactggccagggaacggtggtatagatggcgcctcagattgcggggacccgagcagctccccactctgcccgtacacatttccctggcatccagccatcaatacatctactgttaggtgtaactactgcaacagacgaggaggctcgagcagctgcttcatggcacgcctggcacgctcaggcacccctctgatccctgcaccctagccccatccggaactgcggcagcccaaccttgctcgctcaccgcagagccacagccagatagtaccaacgtgtaactggacgaatccacaaggctgtaaccacaacatgtatgataaggagccagcgaaccaggcaaacatccatgacgtgtgaacccgcgagctatgcacaggggcaaggatctcgatacaaccattcgtcgtacccaccatgaggccacccacactagcctgaggaaaacataaatagggagacgcgtgcccttatgaccacaaaaaacgccc

SEQ ID NO: 350272 - DNA, 1429 bp, Homo Sapiens
gttcgccttacatgaggcgcacggccatgcccgttgccctgggaaggtttgcctgccttcccacggtatagcgagtccttccgcactgcgcacctgagctgcgggatttcctgcggtttcccagaccagctgggcacccacagcgcgaagctccacacccatggccactgcctcggcttcttgtccatctgtcacctccccacctccttcgtgtgcctcgccgatgccctgcacttttcctagcgcaccctcatcagcttgtcttcagggctgaccggcacccccatgactgtgcctgagttccaaggggacagagcccatccctgcacactgccctcccagggcattgcaccctgcacctactgtgggctctgccttctctgacaccaggcacgagaggcttgagctcaaccacatagcttttattgttttacctcgggtagcggtggggactgttaccccaggggctttggcctcttacctggtgcaggcaactctcttgcctggtgatctcaagatggagacatccctcacttactcatcagcgtggctaagccaagccagcctccgttcacggtaagaccaaacgtttcaaaactggctctaacgagcttaagaacaggacattaaacaaagcatcatgctgcaactgtttacatgtattggaaaaataacagatgcacataataaccttggcaggactaggcaacaatttaaaatcgattttaaaaaggatcctattgtggaattcatccttacggtctacagggagaagtttgaaaaactggattaagaaagtattaaacttctgtaccctgacaataagcaggcgatgttggaccagtatagctgtcaccttaaaataaattcttctcattattttgcatgttattaactatggaaagtgaaaacaaagatcaattctaatctggatccaagccatagggaaacccactgccaatgcccaaggttaccttcctggatgagaaactgaaactgaaggccaccaggggcctctgccgaagtcatgagagacgaacatgcccgggtggaaacgggccgtggacagggcaggctccagctgctccgtggtttgacagcaggcagtctggggaggggatgccggactctgcccgtagaggctgacaatttccacaaaagccctgcacccacaaaggcaccatctgctctcagaaacccccgatttctttctccttagtcgcagcccaggcctctcctggttcggctgatacagccaaagaaaacagaagagaagtttcagattgcgccagagagctcaggatttacgggaggcgcctgcagggacagccattctcctaattcttgcttaatacagggaagtccaagaactaaagctgatgggggactcagcctctgaaaccctcgtgccgaattcgccacccaggcc

SEQ ID NO: 350273 - DNA, 1296 bp, Homo Sapiens
cgaggacttgtgtgtctggagctcagaaaggatgacttccttatgggcccctacccctgcgttgctgttggccccatcacggtggccatgaccttctgctcggcctgtctgcctaccagcctgcttcacatgacacagtagggttctctgggaccgggcacctcctgtgccccagcagggggcgtgagtcctcaggcacttcttgaggtccttgttgagcaggaagcagacaattgggttgacggcagcctgggcgaagctcatccaaacagcagtggccaggtagcggtggggcacagcacaggctttcacaaacactcgccagtagcaggccacgatgtagggtgaccagaggagcagaaagagcagtgtgatcgcgtagaacatgcggcccagctgcttttcacccttgacctcgtccatgcccagtagccgccggctggctgcatgcccattctgccggatacccagcagggttggtggcatgggcccacggccaaagccggcgatccagttggcagcagcctggccggtggccccgggaccatggaatgtccagttctggctgatggctggcaccatctgcactggcttcatcttgcggtgacgatactcgaagaggtagcagcttgccgtagacagcatgggtagctgccatgagcacagccaacataagcatgaagcccagcgtgtcattggccttgaagtagcgatgctcaaagatgcactggtcctcctcccgaataaacttgtaggtgcccacgtcaaagacaggtgggaaggccatggccacagacagggtccaggccatgcagatgacagccgcgcatgtccagagtgtcatgcgcttggcgtagaagcggtggtgggcgatggccatgtagcgggtgacgctgatgcagaacagcatgaaggccgcatggaagcaaaagagcacggccataaaggccacaatcttgcagctgagtgcactgaaggtccatgaagagccgtggcgcacagaagccagcacaaaggggaagcagacggcagagcgtatgccatcggccaggcacaggtccagcaggaagtagtaaggagccttgtgcagggcacgctccttgagcaccagcagggacaagatggcgttacccgccaggctcacgcacataatcagtcccagcagtaccagcttcacataagctgatgcggacggtggggacagagcgccgctcacctcctcaggctctccggtagtgttggccatactgagggtcaggggctactgccaaccctagggggtcagccagtcccgct

SEQ ID NO: 350274 - DNA, 1387 bp, Homo Sapiens
  misc_feature (1346)..(1346): n is a, c, g, or t
gcggcatctttctcgaggagctctcctgggcggctgaagaaggagcttcttctccggagtgcgccggcggtggcgcctgcggacctaactagctccaggacttgaaaatactggaaatctgtccggatccaaattattttgcaagccagatgagtaaccagagggcatgaaaggttgagaacatttgacttccctgcaaaccttggtatagatcacttccttttctgtaggaaaggaaaggcaccaaagagcacaatgagtacaagaaagcgtcgtggtggagcaataaattctagacaagctcagaagcgaactcgggaagcaacctccacccccgagatctccttagaagcagaacccatagaactcgtggaaactgctggagatgaaattgtggacctcacttgtgaatctttagagactgtggtggttgatctgactcacaatgactctgttgtgattgttgacgaaagaagaagaccaaggaggaatgctaggagggctgccccaggaccatgctgacagctgtgtggtgagcagtgacgatgaggagttgtccagggacagagacgtatatgtgactacccatactcccagaaacgccagggatgagggcgctacaggcctcaggccctcaggtactgtcagttgtcccatctgcatggacggatactcagagatcgtgcagaatggacgtctcatcgtttccacagaatgcggccatgtcttctgtagccagtgcctccgtgattccctgaagaatgctaatacttgcccaacttgtaggaaaaagatcaaccacaaacggtaccaccccatttatatatgaagtattcagagccccccaggagagacggatggacagacagacagccaggttctccagtggtatctgcctccattttcctgagatcaaaaagactgtttcgaaaccaacatctgatatgtaaactgctcttttgtttccaaccccttccttttgttatctccagtttgatgctatggcgctggacccagggccctcccaggccatctctgttcctctggggtggtccagttctagagtgggagaaagggagtcaggcgcattgggaatcgtggttccagtctggttgcagaatctgcacatttgccaagaaattttccctgtttggaaagtttgccccagctttcccgggcacaccaccttttgtcccaagtgtctgccggtcgaccaatctgcctgccacacattgaccaagccagacccggttcacccagctcgaggatcccaggttgaagagtggccccttgaggccctggaaagaccaatcactggacttcttcccttgagagtcagaggtcanccgtgattctgcctgcaacttatcattgatctgcagtgatt

SEQ ID NO: 350275 - DNA, 931 bp, Homo Sapiens
  misc_feature (29)..(29): n is a, c, g, or t
caaatcaagagaaactctgcagggcactnccctgtttcctaagaacgaaaaagtgcaataaaggccattcgttacctacttttcagcagcccacaagatgtagcactattagtgtccccctcagaggcttaatgttgcctgtggagcagtgcccatcccagcccgtttctgcccaccagttgttctcaggaaccttacccatgctccagcgtccttcacctggcacaggacatgcaagataaatagggcaggcacgtgtttgggtgtcctctcttttctgataaaatccatcccgtgtttgccacacgccctccagtcctcagttcccactgcctaacgtctgcccccgtgtagatactgagaggtggtggcagtaattgtggccttatcagccgctcagttccagggcttttgcccagggtcactgttgccccatgttcggagaacctgggcccacctgtcttggctttctcatccttcccaacccagtgccgtttatttcagaagcttcctgggccactgggcttgggatgcttcgggcttctgaatgcttccatagggttttgaatggtgaaacaggggcccagatgacaacctctccttcgctccacaggtacgcggggagcctcagtttctctcaggggcagccaagtggcccaagctgccccctgacagcacaggggcctgggggtggcttaacaaagagccttacagtgccgggatgcctcctcttccactgtcggcccttcctcgagggccctcccccccaaaaaaccggcctttttcgggggaaaacttctttcggggccggaaaaggggcccctttcgggcttttgtaaaaataaattgaactttcagttttccctttttgaagggggcggggggctcccccccagaaattcccttttaaaacggggccttaaaaagaagt

SEQ ID NO: 350276 - DNA, 716 bp, Homo Sapiens
agcgggaagcggaagtgggttgctgttgaggcggcggcatctttctcgaggagctctcctgggcggctgaagaaggagcttcttctccggagtgcgccggcggtggcgcctgcggacctaactagctccaggttaggccgagctttgcgggaaagcagcggacttgaaaatactggaaatctgtccggatccaaattattttgcaagccagatgagtaaccagagggcatgaaaggttgagaacatttgacttccctgcaaaccttggtatagatcacttccttttctgtaggaaaggaaaggcaccaaagagcacaatgagtacaagaaagcgtcgtggtggagcaataaattctagacaagctcagaagcgaactcgggaagcaacctccacccccgagatctccttggaagcagaacccatagaactcgtggaaactgctggagatgaaattgtggacctcacttgtgaatctttagagcctgtggtggttgatctgactcacaatgactctgttgtgattgttgacgaaagaagaagaccaaggaggaatgctaggaggctgccccaggaccatgctgacagctgtgtggtgagcagtgacgatgaggagttgtccagggacagagacgtatatgtgactacccatactcccaagaaacgccaggatgagggcgctacaggcctcaggccctcaggtactgtcagttgtcca

SEQ ID NO: 350277 - DNA, 547 bp, Homo Sapiens
tatgagtgtgtattctggatactgacagacagatgtgggggtcttgagattctccccaaaccacttttgtgcccaggtgtggcaaggtcaggttacacagacctactccataggcgacaaggctataacaaatgattttccagaaacatttttcattttgggctctcgtcactgaatgcatgaacttctttgttattattattgttactgtttattttctttctaaaagctcaattccacaagatgcatgaacttctttagcataagctgtaaccttgacttgaagtctgtgaccaaggctgtcagatgctggcactggccagggacccatacccaagaaacagccgactctcacactccaacacttaccacaacagagtcattgtgagtcagatcaaccaccacaggctctaaagattcacaagtgaggtccacaatttcatctccagcttcaaaagaaagtatttcaacaagccattagattaagaggaaagtaaggttgtatccctctacactttagtatgactgctaatgtaatataggctta

SEQ ID NO: 350278 - DNA, 689 bp, Homo Sapiens
  misc_feature (22)..(22): n is a, c, g, or t
  misc_feature (33)..(33): n is a, c, g, or t
  misc_feature (56)..(56): n is a, c, g, or t
  misc_feature (89)..(89): n is a, c, g, or t
ggaacttaacggccttaataanggccccaaaantacttgcccacccaccttcttantatcctaacagggggccaagacgttaaggccantgggaaactgaaggaactggagggccgtgtggcaaaacacgggaatggatttttatccagaaaaaaagaggacaccccaaacacgtgccctgcccctatttatccttgccatgtccctgtgcccaggtgaaggacgctggagcatgggtaaggttcctgagaacaactggtgggcagaaacgggctgggatgggcactgctccacaggcaacattaagcctctgagggggacactaatagtgctacatcttgtgggctgctgaaaagtaggtaacgaatggcctttattgcactttttcgttcttaggaaacaggggagtgccctgcagagtttctcttgatttgcagaaatcactgcagatcaatgataaggtgcaggcagaatcacgggtgacctctgactctcaagggaagaagtccagtgattggtctttccagggcctcaaggggccactcttcaacctgggatcctcgagctgggtgaaccgggtctggcttggtcaatgtgtggcaggcagattggtcgaccggcagacacttgggacaaaaggtgaaaagcagctgggccgcatgttctacgcgatcacactgctctttctg

SEQ ID NO: 350279 - DNA, 752 bp, Homo Sapiens
cgctgcccgcgcggggaccacaaccaaagtcgcggccgccgcagccatgcgctgggtgtgggcgctgctaaagaaggcgtccctggcaggggcgccaaagtacatagagcacttcagcaagttctccccgtccccgctgtccatgaagcagtttctggacttcagatccagccaatgcctgtgagaaaacctccttcaccttcctcaggcaggagctgcctgtgcgcctggccaacatcatgaaagagatcaacctgcttcccgaccgagtgctgagcacaccctccgtgcagctggtgcagagctggtatgtccagagcctcctggacatcatggagttcctggacaaggatcccgaggaccatcgcaccctgagccagttcactgacgccctggtcaccatccggaaccggcacaacgacgtggtgcccaccatggcacaaggcgtgcttgagtacaaggacacctacggcgatgaccccgtctccaaccagaacatccagtacttcctggaccgcttctacctcagccgcatctccatccgcatgctcatcaaccagcacagtgggtgccggccacagcggcggggagcggacggtggagggggcggtgctggggcccacggccgggctgctgaggggacctagaccactcttcagaaccccacaaagggagtctttgaatagctactccagtaactatggagttaatggctccaacatggaaaaaaaaaattttttcttttctcattg

SEQ ID NO: 350280 - DNA, 3239 bp, Homo Sapiens
  misc_feature (47)..(83): n is a, c, g, or t
  misc_feature (2843)..(2843): n is a, c, g, or t
  misc_feature (3120)..(3120): n is a, c, g, or t
ggatagatcatatagggcgaattggcgctcaccgcggtggcggccgnnnnnnnnnnnnnnnnnnnnnnnnnnnnnnnnnnnnnatcaggccaaatcggccgagctcgaattcgtcgagagcggatgcccgccaggcaagggtagggaggaggcggccgaaccgcgtcgctgggccgaaaggtgcgcgagcgctgcccgcgcggggaccacaaccaaagtcgcggccgccgcagccatgcgctgggtgtgggcgctgctgaagaatgcgtccctggcaggggcgcccaagtacatagagcacttcagcaagttctccccgtccccgctgtccatgaagcagtttctggacttcggatccagcaatgcctgtgagaaaacctccttcaccttcctcaggcaggagctgcctgtgcgcctggccaacatcatgaaagagatcaacctgcttcccgaccgagtgctgagcacaccctccgtgcagctggtgcagagctggtatgtccagagcctcctggacatcatggagttcctggacaaggatcccgaggaccatcgcaccctgagccagttcactgacgccctggtcaccatccggaaccggcacaacgacgtggtgcccaccatggcacaaggcgtgcttgagtacaaggacacctacggcgatgaccccgtctccaaccagaacatccagtacttcctggaccgcttctacctcagccgcatctccatccgcatgctcatcaaccagcacaccctcatctttgatggcagcaccaacccagcccatcccaaacacatcggcagcatcgaccccaactgcaacgtctctgaggtggtcaaagatgcctacgacatggctaagctcctgtgtgacaagtattacatggcctcacctgacctggagatccaggagatcaatgcagccaactccaaacagccgattcacatggtctacgtcccctcccacctctaccacatgctctttgagctcttcaagaatgccatgagggcgactgtggaaagccatgagtccagcctcattctcccacccatcaaggtcatggtggccttgggtgaggaagatctgtccatcaagatgagtgaccgaggtgggggtgttcccttgaggaagattgagcgactcttcagctacatgtactccacagcacccaccccccagcctggcaccgggggaacgccgctggctggctttggttatgggctccccatttcccgcctctacgccaagtacttccagggagacctgcagctcttctccatggaaggctttgggaccgatgctgtcatctatctcaaggccctgtccacggactcggtggagcgcctgcctgtctacaacaagtcagcctggcgccactaccagaccatccaggaggccggcgactggtgtgtgcccagcacggagcccaagaacacgtccacgtaccgcgtcagctaagggccgccgtgcatctgcacctgagaggacggactgccgcctctgggtccccccaccgtggtgcccctcaccatcctcctgggggagcagggggtgggttctccctgatgaccaggttctgtctctatggaagtcactgcggtgataggtctgtgatggtccctaagtgccagtccatctctgtggagacccctcggtggcctccctatctctgtgggcgatgcctgagggttagggatgtctccaccctgatggggtgtcccagagacattttcccatggcagtcctcctctctgagaccagggctgtcacttttctgccaggggtactgggtccccctcagcaccctccacagcacaggccttccaagtggatgtcccgttgccttattcccccagcccacaaaggcaccatggccttggcctgctgaagtgttaggaagagggtgggtgccctccagacctggggactgagtggggaaaggagttacacccgtgagtggggaatgaggctggtcctgcagcctctccctccgctcagggcttgaaggtcggtggcggagggggtggctctcacagggcccaactctaaagtggaagaaccttgttagaccgagagcttgccatccagccaagctgctcgaggccctgcagtggccttggcaatgtctgtgccacctcctgagccctcccagcatgtcctcacatgctcatgcccacccgctcctccacaagcctagtccatcctgcctgagctccagcccccagcccccactgtgcccagacatgtgtgctcagggtggctttctccctaggaccttctgtgtatatagttagttttataaccctgaatgcccccacccttcccctaagcacacaggggttaaagctgtgtgtccctcccagtggctgtggcagtgacagtgacacccacacccacagtaaagaggagactgaatgagactggcctggctgcatccctgggggaggggacccacacgtgcgcacgtacacacgcacactgcggggcacagtgaccaccacatgacgcaccgggggacgtccggccccagctcggactgtagaaacaacactgcgcaaaagcatctgtaacaagaccccggagggcccccgcccttggggacagaacctgaaggtcccacacatatgccggggcccacccaaagtactgccagaaggaaagagcggcaccatcgactaaaatactgggaacaggcgcgccccggaacggaccacaccccagagaagatcgcgacacatgactttcaccgtaccgcagggcgcgggagagcgaaacacgtacctacgtagagaagacagaatgatgcgcaccatgtggaaaccatgcgcgcgggcacggatgntcggtccgcgcgacgtgacgacgggacgggtaactcgagttgacttatatctcgagtatgcacctacagccgcgtgtggtgcgatcgtcaaacatcggcacacagtcgatagagcgagcgaaggagacatcggaagcccccaaaaagaaggacagtcgacgagagaaatctgaagaggtggcgccacatgaggacgacgccgttaacgaatggtgcctcgggagcgcagcatgggcattaataccacgcagacaaccacctaactataggatgtacnacatgcaattatatacacgctacgaaatcacacacgaccacgatacgatctctctcacatctgaccggccgagcgcatgtgatactcgctacttcgcggtcatctgtccccccaccccc

SEQ ID NO: 350281 - DNA, 930 bp, Homo Sapiens
  misc_feature (10)..(10): n is a, c, g, or t
  misc_feature (28)..(28): n is a, c, g, or t
  misc_feature (33)..(33): n is a, c, g, or t
  misc_feature (170)..(170): n is a, c, g, or t
  misc_feature (411)..(412): n is a, c, g, or t
  misc_feature (523)..(523): n is a, c, g, or t
  misc_feature (546)..(546): n is a, c, g, or t
  misc_feature (548)..(548): n is a, c, g, or t
  misc_feature (817)..(825): n is a, c, g, or t
tttgtctganactgccactgaaacctgnagttngctgtattctgtggaatcaataatactactgtgtgatggagaaggagcttcaaattgaggcactgtgctatcctcactgacaggagagtataaagccactcatttcctctctcttatttcttcttgcaaccttgagnattccataagaatctgtagttgggctgcatgtgattccaaaagctgtggccacattttgtcatgtatgcttcttcaatcatatcaaagcagatggggcatacgaagtcgttgcttttgtcctcgtaggagttgatgagcccgttgcagaggggggcgaggagaggtcgcttcctgtgccgctgcctaggctggagctgctgcctcctacgccggcgctgggcctggccgcgcagctgtgcnnggacaggcccgtggacaccgccccgccgccgctacccgatacggcgggcgccaccaacacaggccgcaccgggcccccgaggccgcccgagccggcggcctgggccacccnaccggacaccagcgctgccgccnanaccgccacggaaggcggcaacggggaagaggataaagacgaggaggcggaagtcaacgaggagcccgccgaggacccggggcttgtcccaacggagcccgacccggcctggcgaataccagacatcgtgactccctcccctccagccgggcgctcggaggagagggaccgcgacctcgaccctccgccgcctcccctcccctcagcctcagtgcatcctgaggacgcccgccgagccggaggtggggctgaggaacaataaagttgcgnnnnnnnnnaaggcagccacacaacagcgtcacacgggagggggaggaggaaaataaaaaagcggagtagaaggcactaccgctgtcgaggccgccgccgccaccgcggatccc

SEQ ID NO: 350282 - DNA, 1271 bp, Homo Sapiens
  misc_feature (114)..(122): n is a, c, g, or t
  misc_feature (284)..(284): n is a, c, g, or t
  misc_feature (377)..(377): n is a, c, g, or t
  misc_feature (516)..(516): n is a, c, g, or t
  misc_feature (524)..(524): n is a, c, g, or t
  misc_feature (597)..(597): n is a, c, g, or t
ggctggtaccggtccggaattcccgggatggcctcgacagcggtagtgccttctactccgcttttttagtttcctccgccccctcccgtgggacgctgttgtgtggctgccttnnnnnnnnncgcaactttattgttcctcagccccacctccggctcggcgggcgtcctcaggatgcactgaggctgaggggaggggaggcggcggagggtcgaggtcgcggtccctctcctccgagcgcccggctggaggggagggagtcacgatgtctggtagccgccagncgggtcgggctccgctgggacaagccccgggtcctcggcggcctcctcggtgacttccgcctcctcgtctttatcctcttccccgtcgccgcnttccgtggcggtttcggcggcagcgctggtgtccggcggggtggcccaggccgccggctcgggcggcctcgggggcccggtgcggcctgggttggtggcgcccgccgtatcgggtagcggcggcggggcggtgtccacnggcctgtnccggcacagctgcgcggccaggcccagcgccggcgtaggaggcagcagctccagcctaggcagcggcagcagngaagcgacctctcctcgcccccctctgcaacgggctcatcaactcctacgaggacaaaagcaacgacttcgtatgccccatctgctttgatatgattgaagaagcatacatgacaaaatgtggccacagcttttgctacaagtgtattcatcagagtttggaggacaataatagatgtcccaagtgtaactatgttgtggacaatattgaccatctgtatcctaatttcttggtgaatgaactcattcttaaacagaagcaaagatttgaggaaaagaggttcaaattggaccactcagtgagtagcaccaatggccacaggtggcagatatttcaagattggttgggaactgaccaagataaccttgatttggccaatgtcaatcttatgttggagttactagtgcagaagaagaaacaactggaagcagaatcacatgcagcccaactacagattcttatggaattcctcaaggttgcaagaagaaataagagagagcaactggaacagatccagaaggagctaagtgttttggaagaggatattaagacagtggaagaacatgagtggcttatactctcctgtcagtgaggatagcacagtgcctcaatttgaagctccttctccatcacacagtagtattattgattcccgcaaaatacagccaacctcc

SEQ ID NO: 350283 - DNA, 907 bp, Homo Sapiens
cgccggcgtaggaggcagcagctccagcctaggcagcggcagcaggaagcgacctctcctcgcccccctctgcaacgggctcatcaactcctacgaggacaaaagcaacgacttcgtatgccccatctgctttgatatgattgaagaagcatacatgacaaaatgtggccacagcttttgctacaagtgtattcatcagagtttggaggacaataatagatgtcccaagtgtaactatgttgtggacaatattgaccatctgtatcctaatttcttgggaatcacatgcagcccaactacagattcttatggaattcctcaaggttgcaagaagaacataagagagagcaactggaacagatccagaaggagctaagtgttttggacagaggatattacgagagtggcaagaaatgagtggcttatactctcctgtcagtgaggatagcacagtgcctcaatttgaagctccttctccatcacacagtagtattattgattccacagaatacagccaacctccaggtttcagtggcagttctcagacaaagaaacagccttggtataatagcacgttagcatcaagacgaaaacgacttactgctcattttgaagacttggagcagtgttacttttctacaaggatgtctcgtatctcagatgacagtcgaactgcaagccagttggatgaatttcaggaatgcttgtccaagtttacctcgatataattcagtacgacctttaagccacattgtcatattgctaagtgatctctataatgggttccaagtatagtctcaaatattgaatttgaccgggaattggtgactaattagacattgatgggagttaccaacgaagattacagactaagaactatgaccctgctgtcatgaatcactgcata

SEQ ID NO: 350284 - DNA, 245 bp, Homo Sapiens
cttctttaaaatacatacgaagtgtaaagagaaaatggccaaaacctcaaaactaccattgttgaaaacaatattaaaaggacacaatctaaaatcatgctacaaaaatagtgttatcttgtttaactaaatgtacatctttttttccaattccatgattgacaagagtgcttatgcgacgcatggaaggcaccagaggtgaagtgattatttgccttaaaatatacaaagaattgcctactttg

SEQ ID NO: 350285 - DNA, 973 bp, Homo Sapiens
atcaggccaaatcggccgagctcgaattcgtcgagagcggaagttgggcggatggcagcaaaccggctccgctagaggaccgagccgcccagccccgctcccccggacccatcggcgcgctgcccacacctccaggcgaccggccaactgggtcctgaagtagctgaaatgcgaaaaaggcagcagtcccaaaatgaaggaacacctgccatgtctcaagcgcctggaaaccagaggcccaacaacacctgttgcttttgttggtgctgttgttgcagctgctcctgcctcactgtgaggaatgaagaaagaggggaaaatgcgggaagacccacacacactacaaaaatggagagtacccaggtcctagaggaatgccaaaaccccactgcagaggaagtcttgtcctggtctcaaaattttgacaagatgatgaaggccccagcaggaagaaaccttttcagagagttcctccgaacagaatacagtgaagagaacctacttttctggcttgcttgtgaagacttaaagaaggagcagaacaaaaaagtaattgaagaaaaggctaggatgatatatgaagattacatttctatactatcaccaaaagaggtcagtcttgattctcgagttagagaggtgatcaatagaaatctgttggatcccaatcctcacatgtatgaagatgcccaacttcagatatatactttaatgcacagagattcttttccaaggtttttgaactctcaaatttataagtcatttgctggaaagtactgctggctcttcttctgaatcttaatgttcattttaaaaccatcattttggaggctgagatgcgacatcaaagtagttaaatacactcgaaactgagttcctggagacttacaggttaacattctcagctactgtgaaacccaaccggatggccttgtctccctttatcaaggttccaggggtagttgggagatcc

SEQ ID NO: 350286 - DNA, 1836 bp, Homo Sapiens
  misc_feature (54)..(54): n is a, c, g, or t
  misc_feature (78)..(80): n is a, c, g, or t
  misc_feature (84)..(137): n is a, c, g, or t
  misc_feature (162)..(162): n is a, c, g, or t
  misc_feature (193)..(193): n is a, c, g, or t
cgcggcgccggtgcaccgggcgggctgagcgcctcctgcggcccggcctgcgcnccccggcccgccgcgcggcccagnnnccannnnnnnnnnnnnnnnnnnnnnnnnnnnnnnnnnnnnnnnnnnnnnnnnnnnnnagggagccggctgctggcatgggtnctgtggttgcaggccatggcaggtggcagcncccatgcccaggtgcctgcgtatgctacaatgagcccaaggtgacgacaagctgcccccagcagggcctgcaggctgtgcccgtgggcatccctgctgccagccagcgcatcttcctgcacggcaaccgcatctcgcatgtgccagctgccagcttccgtgcctgccgcaacctcaccatcctgtggctgcactcgaatgtgctggcccgaattgatgcggctgccttcactggcctggccctcctggagcagctggacctcagcgataatgcacagctccggtctgtggaccctgccacattccacggcctgggccgcctacacacgctgcacctggaccgctgcggcctgcaggagctgggcccggggctgttccgcggcctggctgccctgcagtacctctacctgcaggacaacgcgctgcaggcactgcctgaatgacaccttccgcgacctgggcaacctcacacacctcttcctgcacggcaaccgcatctccagcgtgcccgagcgcgccttccgtgggctgcacagcctcgaccgtctcctactgcaccagaaccgcgtggcccatgtgcacccgcatgccttccgtgaccttggccgcctcatgacactctatctgtttgccaacaatctatcagcgctgcccactgaggccctggcccccctgcgtgccctgcagtacctgaggctcaacgacaacccctgggtgtgtgactgccgggcacgcccactctgggcctggctgcagaagttccgcggctcctcctccgaggtgccctgcagcctcccgcaacgcctggctggccgtgacctcaaacgcctagctgccaatgacctgcagggctgcgctgtggccaccggcccttaccatcccatctggaccggcagggccaccgatgaggagccgctggggcttcccaagtgctgccagccagatgccgctgacaaggcctcagtactggagcctggaagaccagcttcggcaggcaatgcgctgaagggacgcgtgccgcccggtgacagcccgccgggcaacggctctggcccacggcacatcaatgactcaccctttgggactctgcctggctctgctgagcccccgctcactgcagtgcggcccgagggctccgagccaccagggttccccacctcgggccctcgccggaggccaggctgttcacgcaagaaccgcacccgcagccactgccgtctgggccaggcaggcagcgggggtggcgggactggtgactcagaaggctcaggtgccctacccagcctcacctgcagcctcacccccctgggcctggcgctggtgctgtggacagtgcttgggccctgctgacccccagcggacacaagagcgtgctcagcagccaggtgtgtgtacatacggggtctctctccacgccgccaagccagccgggcggccgacccgtggggcaggccaggccaggtcctccctgatggacgcctgccgcccgccacccccatctccaccccatcatgtttacagggttcggcggcagcgtttgttccagaacgccgcctcccacccagatcgcggtatatagagatatgcattttattttacttgtgtaaaaatatcggacgacgtggaataaagagctcttttctt

SEQ ID NO: 350287 - DNA, 1152 bp, Homo Sapiens
  misc_feature (15)..(15): n is a, c, g, or t
  misc_feature (1040)..(1040): n is a, c, g, or t
  misc_feature (1057)..(1057): n is a, c, g, or t
  misc_feature (1121)..(1121): n is a, c, g, or t
  misc_feature (1129)..(1130): n is a, c, g, or t
  misc_feature (1134)..(1134): n is a, c, g, or t
  misc_feature (1142)..(1142): n is a, c, g, or t
tactacctttcactnttgggccgccgcggcggccgcggggggcggcgggtccagccgccgccacgcatgcgaggcctcttagccgcccccagagcgcgcgcccgcgggcggtgacgggttcggaattcccgggatccgccgccgccctcgccctgtgcgccctgcgcgccctgcgcacccgcggcccgagcccagccagagccgggcggagcggagcgcgccgagcctcgtcccgcggccgggccggggccgggccgtagcggcggcgcctggatgcggacccggccgcggggagacgggcgcccgccccgaaacgactttcagtccccgacgcgccccgcccaacccctacgatgaagagggcgtccgctggagggagccggctgctggcatgggtgctgtggctgcaggcctggcaggtggcagccccatgcccaggtgcctgcgtatgctacaatgagcccaaggtgacgacaagctgcccccagcagggcctgcaggctgtgcccgtgggcatccctgctgccagccagcgcatcttcctgcacggcaaccgcatctcgcatgtgccagctgccagcttccgtgcctgccgcaacctcaccatcctgtggctgcactcgaatgtgctggcccgaattgatgcggctgccttcactggcctggccctcctggagcagctggacctcagcgataatgcacagctccggtctgtggaccctgccacattccacggcctgggccgcctacacacgctgcacctggaccgctgcggcctgcaggagctgggcccggggctgttccgcggcctggctgccctgcagtacctctacctgcaggacaacgcgctgcaggcactgcctgatgacaccttccgcgacctgggcaacctcacacacctcttcctgcacggcaaccgcatctccagcgtgcccgagcgcgccttccgtgggctgcacagcttcgaccgtctcctactgcaccagaaccgcgtggcccatgtgcaccgcatgccttccgtgaccttggccgctcatganatctatctgtttgcaanaatctatcagcgcgcccactgaagcctggccccctgcgtgcctgcagtactgaggtcaagaaancctggggnntgantgcgggangccattttgg

SEQ ID NO: 350288 - DNA, 1144 bp, Homo Sapiens
gggactccgaagtggcagcagccagagagggagtcggtgtggacgcgaggagccgggcgcttagaacagaggcttgcacaggtggagatgtggaagtctgtagtgggccatgatgtgtctgtttccgtggagacccagggtgatgattgggacacagatcctgactttgtgaatgacatctctgaaaaggagcaacgatggggagccaagaccatcgaggggtctggacgcacagaacacatcaacatccaccagctgaggaacaaagtatcagaggagcatgatgttctcaggaagaaagagatggagtcagggcccaaagcatcccatggctatggaggtcggtttggagtagaaagagaccgaatggacaagagtgcagtgggccatgagtatgttgccgaggtggagaagcactcttctcagacggatgctgccaaaggctttgggggcaagtacggagttgagagggacagggcagacaagtcagcagtcggctttgattataaaggagaagtggagaagcacacatctcagaaagattactctcgtggctttggtggccggtacggggtggagaaggataaatgggacaaagcagctctgggatatgactacaagggagagacggagaaacacgagtcccagagagattatgccaagggctttggtggccagtatggaatccagaaggaccgagtggataagagcgctgtcggcttcaatgaaatggaggccccgaccacagcttataagaagacgacgcccatagaagctgcttctagtggtgcccgtgggctgaaggcgaaatttgagtccatggcctggaggaaaacaggaaacccagcagggaaaaggaaaagggcacccccaggggggcccaggaaggcaaccagggaacgaaaaggcttgtggacaaaaaaggaaccccttgaaggttcccacagcccaggggataagctattggaaaaaacccagcagataacccggcccccacatgcccccacaaaaatatctcctccagaaggcccggggccccttcagattgggggatctcctccccttaatctcaagccttgagacccgtggggaaaaacccccacggggcaaacaacccaggggcccctgtgcgcggcccaaaaaa

SEQ ID NO: 350289 - DNA, 2278 bp, Homo Sapiens
  misc_feature (44)..(85): n is a, c, g, or t
aatgacaaccaaaccaatctcggtggaaactcctatcctatcannnnnnnnnnnnnnnnnnnnnnnnnnnnnnnnnnnnnnnnnnaaagtgctaagaactgtgcattgacatccaaacatttcttgtacaaaatttccctagcaaagcaaacctgctttgacttaatttatttgttaaatgttgcactttgtttatgtatgttttgtttttggtggggaataaggagagagaggacgacaaattctattgaagtatttattttgtgaagatggcaattttgcatttgtttaaatttttttcattctttaattttgttatcagtgccagcccaatatacctgctctaccattatttgcggtctgataaaagggtccttgtggggcaggttttgcaaagcttatcaggtaataacatatgccacataaccttgttgatatgtttgcttctgatttgggaagctaaacattggtgtttgagaggattgccaattattaattgtcattaccactactctccattactttttgtttggaaattgaacaaaggtcagtaatggtttttggctcttgttaatatccatcataaaatagattgttttagattctttccagggtgatttttccctgggtaccccgtttctacttctaaagaattgcttggcactttcatgtttcaaagggaaacattcgcttgtagttccattttacttgatctctacaagggactgacaacatttgctttacttttattcacagagaaagttggctttgatgtctcttaaagataattctgctagttgctgatcagccagtcagttcacctagcttcaatctttataggacttctaatctaattttcctatagtgtgactaaaagggaggcaaattattggaacggattattcaaatggatccttaaatattgctatgtataataagccagttattatatcaggaccatgttctctgtaggccactttctaaaaaagccacatatgtgcaattttcaggtttttagactattgctccctgtactttaaatgtaaaaaccacacttctgaacaactaagctcatgaatatgattttggttatatgcagcttttgactagcatgtattgtgtctttttctcctctatgaataattttatatttcatgctacttcttgaaagtttactctttgatgctctaagagaacagccagatggtttatatgaataatctttatctgcaggatggtggattggtaaattaggagaatgttgtttgagatatcaagatttatgtctgggaactaaaatatataatgccaaatgtgtttttgtcaattactagagaattctgtgcaaacatatcatctcttcaaatgctgcacactttgcttttgttaaacagcaggtagtagacagaacaataacagtttcgcgttaagacttttaaaggaaatagaatcgtgattaagaaatcagaatttatagatatattgggataaatgaagaaataaaaatgtttgtctagaatgtagcatctagtgactttttaaagccctaacgtttacataaagaagctctagttcttatagaaataacaaagcaaataaaagttcttaacaatcccctctttcgaagtgcatttttttaaagcagggcaggagacatttggactctagctatatgacatactgggaaaggcagagggtggagggaagatttcacttcattgtctagcccagaatcttgagcaagctaaagaaaccatcataatctaaaattgcttcatttaacactaacaatttagactttttaaaccaagcattgaataatggctggataactgccgaagtaagcgccgctccatgaagtctgcttacttatttaaaaattgtgtatcagttttaaatactgttcattgtgtgcagatataaggggaatagggcattctgtagaattatacatgtctagtttgtaaagtgtgtcctgtgtactgcagatgtgtgttctctgggctttatgtatctgtacagtagctttcacattaaaaaaattgtggacaaacttgtccggggggtttgaggggagaatggtggtttatatcaataacgatgctgtactatagtccatgtaacaaaagatctggaagtcaccctcctctggcccacggaaaattttggtaatcttctaggttctaaaatgaagatgtatgggtactctggcagactgcatgttgtataatttgaaaaatactaaaagtggaaaataaaattgaattaaactttgaaa

SEQ ID NO: 350290 - DNA, 818 bp, Homo Sapiens
agcggggggggcctggtctgcctgaatggggatgacatttcagagatcaggatatggggtgctttgattctgggtcttcttgcttcaaaacctttcaccaggaagagctgggaaaatgtaaaatcatctcctccgccaaggccggccggctgtgcaggcctcccacgagcttgaggtcgtggcaactgaatacgagcaggacaacatggtggtgagtggagacatgctggggtttggccgcgtcaagcccatcggcgtccactcggtggtgaagggccggctgcacctgactttggccaacgtgggtcacccgtgtgaacagaaagtgagaggttgtagcacattgccaccgtccagatctcgggtcatctcaaacgatggagccagccgcttctctggaggcagcctcctcacgactggaagctcaaggcgaaaacacgtggtgcaagcacagaagctggcagacgtggacagtgagctggctgccatgctactgacccatgcccggcagggcaaggggccccaggacgtcagccgcgagtcggatgccacccgcaggcgtaagctggagcggatgaggtctgtgcgcctgcaggaggccgggggagacttgggccggcgcgggacgagcgtgttggcgcagcagagcgtccgcacacagcacttgcgggaacctacaggtcatcgccgcctaccgggaacgcacgaaagccgagagcatcgccagcctgctgagaccgggccatcaccacggagcacacgctccacgccacgctggggggtcgccgagttctttgagtttggtgctaagaaccccc

SEQ ID NO: 350291 - DNA, 1114 bp, Homo Sapiens
  misc_feature (1)..(1): n is a, c, g, or t
  misc_feature (3)..(3): n is a, c, g, or t
  misc_feature (9)..(9): n is a, c, g, or t
  misc_feature (11)..(11): n is a, c, g, or t
  misc_feature (19)..(19): n is a, c, g, or t
  misc_feature (25)..(25): n is a, c, g, or t
  misc_feature (33)..(33): n is a, c, g, or t
  misc_feature (47)..(47): n is a, c, g, or t
  misc_feature (50)..(51): n is a, c, g, or t
  misc_feature (53)..(53): n is a, c, g, or t
  misc_feature (58)..(58): n is a, c, g, or t
  misc_feature (63)..(63): n is a, c, g, or t
  misc_feature (67)..(67): n is a, c, g, or t
  misc_feature (70)..(70): n is a, c, g, or t
  misc_feature (79)..(79): n is a, c, g, or t
  misc_feature (83)..(83): n is a, c, g, or t
  misc_feature (87)..(87): n is a, c, g, or t
  misc_feature (102)..(102): n is a, c, g, or t
  misc_feature (104)..(105): n is a, c, g, or t
  misc_feature (201)..(201): n is a, c, g, or t
nanaatctngnacccatgncacccncctttttntttaatgttttttnggnngnaatcngggcngganccnggagagatngcanaggnccaagggagaagcantnncagagactcagaagccagaagggaatgggctatggattctaaggcctctctggcttcattcatacgaacattcttgatgtcttctgaggtgattgntttccattcttgtcaattgcaccctcagccacaatgatgatgttgagacgagaaccacgggtccttgtctcgctgagtcggcgacaaaggtgttcctcccagtcgtcatctggtggacattcaggaataaaaacccagtcggccccacaggacagagaggtgacaagggccaggtatccacagtggcggcccattacttctaacacaaatgtcctctggtggctctgggcagtggtagtgatggcatctacaatttccatgatccgatgcagggcagagtcagtgccaatggtcatatcggtgccacagaagtcattgtcaattgacccaaccaggcccacaatgttcaggtagctggacttcgtagcctcctcatctgtgatcttacctgctttctggaggtcactcaacaagtcactccactcagaacggaaggtgtcagccccagtgaggctgccatcacccccaatgacacagagattggtgatcccacgcttcaccaggttgtaggcagctcggagtcgtccttctcgttcccgaaagtccttgcaccgggcacttccaatcaccgtgcctcccagctgaagcatcatcgaaacgctctcccaggtggcttccttgatgtgatctccaccatccaccaggccttgataaccctcatggacaaagaagacacgggcaccggtgaagataccaactcgaaccacagccctgacagcagcattcataccttgggcatctccaccagaggttaagacagcaatggctttgccaatccccagggttttggctgcatggtgctcttcatgggtcatgatccactcttttagtcttagctctcctccgccgctgctttcttgcagattgtccttgggaaaggggggaggggtcctcgtgccgaattcgccaccca

SEQ ID NO: 350292 - DNA, 2419 bp, Homo Sapiens
gagcgaggcctgggtggcgaattcggcacgaggggcagcctcactggggctgacaccttccgttctgagtggagtgacttgttgagtgacctccagaaagcaggtaagatcacagatgaggaggctacgaagtccagctacctgaacattgtgggcctggttgggtcaattgacaatgacttctgtggcaccgatatgaccattggcactgactctgccctgcatcggatcatggaaattgtagatgccatcactaccactgcccagagccaccagaggacatttgtgttagaagtaatgggccgccactgtggatacctggcccttgtcacctctctgtcctgtggggccgactgggtttttattcctgaatgtccaccagatgacgactgggaggaacacctttgtcgccgactcagcgagacaaggacccgtggttctcgtctcaacatcatcattgtggctgagggtgcaattgacaagaatggaaaaccaatcacctcagaagacatcaagaatctggtggttaagcgtctgggatatgacacccgggttactgtcttggggcatgtgcagaggggtgggacgccatcagcctttgacagaattctgggcagcaggatgggtgtggaagcagtgatggcacttttggaggggaccccagataccccagcctgtgtagtgagcctctctggtaaccaggctgtgcgcctgcccctcatggaatgtgtccaggtgaccaaagatgtgaccaaggccatggatgagaagaaatttgacgaagccctgaagctgagaggccggagcttcatgaacaactgggaggtgtacaagcttctagctcatgtcagacccccggtatctaagagtggttcgcacacagtggctgtgatgaacgtgggggctccggctgcaggcatgaatgctgctgttcgctccactgtgaggattggccttatccagggcaaccgagtgctcgttgtccatgatggtttcgagggcctggccaaggggcagatagaggaagctggctggagctatgttgggggctggactggccaaggtggctctaaacttgggactaaaaggactctacccaagaagagctttgaacagatcagtgccaatataactaagtttaacattcagggccttgtcatcattgggggctttgaggcttacacagggggcctggaactgatggagggcaggaagcagtttgatgagctctgcatcccatttgtggtcattcctgctacagtctccaacaatgtccctggctcagacttcagcgttggggctgacacagcactcaatactatctgcacaacctgtgaccgcatcaagcagtcagcagctggcaccaagcgtcgggtgtttatcattgagactatgggtggctactgtggctacctggctaccatggctggactggcagctggggccgatgctgcctacatttttgaggagcccttcaccattcgagacctgcaggcaaatgttgaacatctggtgcaaaagatgaaaacaactgtgaaaaggggcttggtgttaaggaatgaaaagtgcaatgagaactataccactgacttcattttcaacctgtactctgaggaggggaagggcatcttcgacagcaggaagaatgtgcttggtcacatgcagcagggtgggagcccaaccccatttgataggaattttgccactaagatgggcgccaaggctatgaactggatgtctgggaaaatcaaagagagttaccgtaatgggcggatctttgccaatactccagattcgggctgtgttctggggatgcgtaagagggctctggtcttccaaccagtggctgagctgaaggaccagacagattttgagcatcgaatccccaaggaacagtggtggctgaaactgaggcccatcctcaaaatcctagccaagtacgagattgacttggacacttcagaccatgcccacctggagcacatcacccggaagcggtccggggaagctgccgtctaaacctctctggagtgaggggaatagattacctgatcatggtcagctcacaccctaataagtccacatcttctcagtgttttagctgtttttttcattaggtttccttttattctgtaccttgcagccatgaccagttctggccaggagctggaggagcaggcagtgggtgggagctccttttaggtagaatttaacatgacttctgccccagctttatctgtcacacaaggctgggcacctctagtgctactgctagatatcacttactcagttagaattttcctaaaaataagctttatttatttctttgtgataacaaagagtcttggttcctctactacttttactacagtgacaaattgtaactacactaataaatgccaactggtcactgtgaaaa

SEQ ID NO: 350293 - DNA, 646 bp, Homo Sapiens
aacaactatacggctaggtagcgaggcctgggtggttgaatcggcacgaggatgaagagcaccatgcagccaaaaccctggggattggcaaagccattgctgtcttaacctctggtggagatgcccaaggtatgaatgctgctgtcagggctgtggttcgagttggtatcttcaccggtgcccgtgtcttctttgtccatgagggttatcaaggcctggtggatggtggagatcacatcaaggaagccacctgggagagcgtttcgatgatgcttcagctgggaggcacggtgattggaagtgcccggtgcaaggactttcgggaacgagaaggacgactccaagctgcctacaacctggtgaagcgtgggatcaccaatctctgtgtcattgggggtgatggcagcctcactggggctgacaccttccgttctgagtggagtgacttgttgagtgacctcccagaaagcaggtaagatcaccagatgaggaggctacgaagtccagccacctgaacattgtggggcctggttggggccatttgacaatgacttctgggggcaccgatatgacccattggcacctgactcctgccctgcatcggatcctggcacttgtggatgccatcactaccactggccagagc

SEQ ID NO: 350294 - DNA, 1078 bp, Homo Sapiens
cagcgcagcctgtaacttcagcaacattctagtgaatcaggagcggctcaacatcaacactgccacggaggaggagctgatgaccctgcctggggtgacgcgtgccgtggcacgcagcatcgtggagtaccgagagtatatcggtggcttcaagaaggtggaggacctggcattggtcagtggtgtaggcgccaccaagctggagcaggtcaagtttgagatctgtgtgagcagcaagggcagctcagcgcacactctcccagttccctgcggcgggacctgctagcggacagcagcctcaccacctggccacagctgtgcccctcaccccacgtgttaacatcaacacagccaccccggcccagctcatgagcgtgcgaggcctctcggagaaaatggccctcagcatcgtggacttccgccgtgagcatgggccctttcgcagcgttgaggacctagtgaggatggatggtatcaatgccgccttcctggacaggatccggcaccaggtgtttgctgagaggtccaggcccccatccacccacacgaacgggggactgaccttcaccgccaagcctcacccgagccccacttccctgagcctgcagagtgaggacctggacctgccgccagggggcccacccagattatctccactcggccgtccgtggaggcctttggaggcacaagggatgggaggcctgtgctgaggctggccacctggaacttgcagggctgttccgtggagaaggccaacaaccccggggtgcgagaggtggtgtgcatgacactcctggaaaacagcatcaagcttctagctgtgcaagaactgcttgacagagaggccttggaaaagttctgcacggagctaaaccagccgaccctgcccaacatccgcaagtggaaggggccccggggatgttggaaggtttttgtttcttgagaagccctcgaatcagctccagaagggagctgggtatgcaggattcctatgggactcggctgccggcatggagctgagagacgcgggttcacaggagagctcgccaaagcaacgggcacgggaagctggcgggcc

SEQ ID NO: 350295 - DNA, 1903 bp, Homo Sapiens
  misc_feature (308)..(308): n is a, c, g, or t
  misc_feature (356)..(356): n is a, c, g, or t
tgcctttgaaggaacagaacttccagggatcattaaagggaccgggtgcacgcacccccgatagatggtgtgaacgcccagtaatcaacaaggcttcagagctgacgggaccgggcaccttctggtcccccacgtggccaagcaacgggcacaagagcacctcgagaaacgctagaaaggtgggctgggctcaaaccaacctgttgtgctccatctgatgccgaacacagccactatacagcctctccctgacaccaagccacagcggggaagggtggcgtgaagctagccgtctcggccctaacctnccggcaggagtgtcgccggcaggtgcaggggccgcacctgctgggggncccccctcccgcccaccccatggacacagagaagccagagcaaggtgtgtgggaggggtgtgtgcggttctcgccaggggcccctggcctcggcgcccggcacacaccagtggggcaggctggcagccgtcagaacaaaagggctttcttcttaaggtcattcctcttccagagggccaggcggtcaaactcctcgatgctcatcccaaacacttcctggaactcctcgggcgacaagtgtctctccagtctcgtccggtccacgtctttgggcagtttcacgcgaattcggtttgtgacgatgagggagtcatacggatagatcttgtattgtgagtgaaagctgtcccctgccatcctttggagagggtctctgtcggtcccgctgctgtgggacaaggactgggtgtccaggtctggagaattggtccttgtgtctgcatcccccttgagcatcagccagctgctcttcttcctgttatcctggtccaagcttccatcctccccatccgatcgcctggcagcatgctgtctgtagatagggggtttcctatagatgttatcttttacgccagtgtctgggacgtggaagtggcgaggtgcctgctggtaggtggaggggggcggcttgctgtcagagagcacggagaggctgggggtgctccggccactttcactgcctcggaagtaggggatgtaatgatgtctgaacacggatgtagggcttgggtgttgggacagggagaggcagctactgtacccacactcacagtaccagctggacggctgtagtgctgtggtgaccgtgaggtcggagtgtagcgcccgaggctaaccgacccagtggagcttgggctggaggtccggcactgcttgtaggaccggtcatcctgatccccctcggtcggcgttggcgagagcaactgaggggactcgccgtagctctgcctgtcccctgcagagtggctgatgtagggtgagtaggagatcatgtcggggcggtcgatgtcatagatggccttacttttaggaagggctgccaagtccctgtagtccaggatctcaccaccaagcttggcataaatcacacggctcggagaccctgaggtgctggaagcagggacagaaatgatgctctctgaggaagttctggtttccttgtttctgtcttcagttctggctgcttgtcgacacgccggatgccagatggaggaaccttgaagatacatctcttcgccttctgcaaacatctggccgcacctgacacatagcgcgcaggaagggtggtagtgcttctctccggcctgcacagcttctgggcaccagagcccagtctgacggccctgcttgagtgccgtgctccctggaacgtgtgcctgcgagggtggacaccctcaccttcagccaacagtctgtcacctgctcctgctgcgccctgggagtccactgtcacccagcggggcaccggcacactgggccgagcatcaggcagtgccaccgcggcggcggcagctccccttctgcggagccaggcttgcccccccgct

SEQ ID NO: 350296 - DNA, 832 bp, Homo Sapiens
ccaaggtgcagcggcagctgccagggcctcctcagtgctgtcttctccactggctgctctgagctgtggccgatggccatttggggaaatggcgccatcagcccactgtgcaatgggtcctctggggacgctcatgtcctcagcctcgctggactcctgagcagccagccgcctagctgcacgggtctgcggtctacgcttccctctcatcttgacacggctcttgtttgcactgtgtaaggtgtctgcctgagctggaagatcaaaactcacaccggcctccccactcccgggaaggacaggcacactttccagaccgtggctccttctgtgttcagatgaaggaaaagccaattctggcaaaacaggctttacttcagagatctgggaagccgctgtgggcagcaaggccgctgggttgatcgctaaatttgcctgaggtgtttccggcttcccatatgccctttttctttactaccttgaatggattcaggatgtttctggtttttgaaagagtcaacagagtggtcttttttcactactctctttttctcttgtaccaaaggctgggacttggcagagctgaaaagatcatcatcttcatcatccccaaacaggctcccaacacttggctctaacagcttggtttttttggtgccagcaaaaaggtcaacatctgggtcattgtccttttggagcttgtggctgaaaagcagctcttcatcctggaagacacctgtgctcttggggtgggcatcaggatcgcggccctttcctacttctttctgtggagcctggataatgttttgatcttccattttatcctcttcct

SEQ ID NO: 350297 - DNA, 921 bp, Homo Sapiens
  misc_feature (313)..(313): n is a, c, g, or t
  misc_feature (335)..(335): n is a, c, g, or t
  misc_feature (350)..(350): n is a, c, g, or t
cagcaggatgtcatattaacaacacaagatatttttgaggatgatatatttgctacggaagcaattaaaccctctcagaaaaccagagagaaggagaaaacattggaatctaatttatttgatgataacattgatatctttgctgacttaactgtaaaaccaaaagaaaagtccaaaaagaaagtggaagccaagtctatatttgatgatgatatggatgacatcttctccactggtatccaggctaagacaaccaaaccaaaaagccgatctgcacaggccgcacctgaaccaagatttgaacacaaggtgnccaacatctttgatgatccccngaatgcctttggagnccagtagagcacacagggtatccacaggttaccctgcagctacattgttgagttagtgatgatattgtatatgctcatggtcttaactggattacaaaaagcaaatactagaacagctagctcatcttttacccaatgtacttagtatttttctgcactggtttaatcatgcttaatactacaaaacaaaaataaatatttcacagtggttggtttgttttgtttttaaaccacagtttgatttagttagccttgctggggccataatatgcttcagggtgtgtaaaagaagaaatctctttgtggctttcatgggcagggaatcccagagatagcaaatgccacctgaccagaagtctttgttatatggatgggaaccctaacttagggcctgggcaggggaaagagaaagaaggtgagagattatacttcatgagtcttagcaatatgggagcaggttttcactgaattctgagggtgcctctgcatgtcctccaaggcaaagtttggcaaactgtggcccccccactgtcatattttgttaataaaattttattggaacacaatcaca

SEQ ID NO: 350298 - DNA, 1693 bp, Homo Sapiens
  misc_feature (1634)..(1634): n is a, c, g, or t
  misc_feature (1641)..(1641): n is a, c, g, or t
gctgggtggcaattcggacgaggatctttcaaaccaaactcctgaatccttcaggtagaaagaaaaggatatggaagccggaaacacctcaggactcatcaggtctcgctccatttaaaaccaaagaaccatccactcggatcgggaagatacaagcaaatttagcgatcaacccagcggccttgctgcccacagcggcttcccagatctctgaagtaaagcctgttttgccagaattggcttttccttcatctgaacacagaaggagccacggtctggaaagtgtgcctgtccttcccgggagtggggaggccggtgtgagttttgatcttccagctcaggcagacaccttacacagtgcaaacaagagccgtgtcaagatgagagggaagcgtagaccgcagacccgtgcagctaggcggctggctgctcaggagtccagcgaggctgaggacatgagcgtccccagaggacccattgcacagtgggctgatggcgccatttccccaaatggccatcggccacagctcagagcagccagtggagaagacagcactgaggaggccctggcagctgccgctgcaccttgggaaggtggtcctgtgcctggagtggacacaagcccctttgcaaagtctctgggtcattccagaggggaggctgacctttttgattctggggacattttttccacgggcactggatctcagtccgtggagagaacaaaacccaaggcaaagatagcagagaatcctgccaacccaccagtgggtggtaaagcaaagagccccatgtttcctgctctaggcgaggccagcagtgatgatgatctctttcagtctgctaaaccaaaaccagcaaagaaaacaaatccctttcctctcctggaagatgaggatgacctctttacagatcagaaagtcaagaagaatgagacaaaatccagtagtcagcaggatgtcatattaacaacacaagatatttttgaggatgatatatttgctacggaagcaattaaaccctctcagaaaaccagagagaaggagaaaacattggaatctaatttatttgatgataacattgatatctttgctgacttaactgtaaaaccaaaagaaaagtccaaaaagaaagtggaagccaagtctatatttgatgatgatatggatgacatcttctcctctggtatccaggctaagacaaccaaaccaaaaagccgatctgcacaggccgcacctgaaccaagatttgaacacaaggtgtccaacatctttgatgatcccctgaatgcctttggaggccagtagagcacacagggtatccacaggttaccctgcagctacattgttgagttagtgatgatgttgtatatgctgatggtcttaactggattacaaaaagcaaatactagaacagctagctcatcgttcacccaatgtacttggtatttttctgcactggtttaatcatgcttaatactacaaaacaaaaataaatatttcacagtggttggtttgttttgtttttaaaccacagtttgatttagttagccttgctggggccataatatgcttcagggtgtgtatgccacctgaccagaagtctttgttatatggatgggaaccctaacttanggcctgngcaggggaaagagaaagaaggtgagagattatacttcatgagtctttagcat

SEQ ID NO: 350299 - DNA, 452 bp, Homo Sapiens
ggtggtttgccttgcaaggtgccctaaaaaagtaccctttcccccaacccctcttcaagcaacccgtttttccttttttcctttcctaaagatgacatccttcctccctctggtatcccaggcctaagacaacccaaacccaaaaagcccgatctgcacaggcccgcacctgaaccaagatttgaacacaaggtgtcccaacatctttgatgatcccctgaatgcctttggaggccagtagagcacacagggtatcccacaggttaccctgcagctacattgttgagttagtgatgatgttgtatatgctgatggtcttaactggattacaaaaagcaaatactagaacagctagctcatcgttcacccaatgtacttggtatttttctgcactggtttaatcatgcttaatactacaaaacaaaaataaatatttcacagtgaaaaaaaaa

SEQ ID NO: 350300 - DNA, 1017 bp, Homo Sapiens
gttcccgacccgacccccgttccccattggctgtcagggcaaaagccgccatctaatgaggagcgaggtgcggtgccccgaagcgctcgcttcccgcggtgcgatctagtcctgcagtaggcggcccggggccacaccgcggccgcccaagccagtgcaaggcccaggggcctgacatcgctcccagcgctcgaggaccgaggcctgctgtggaggacaccgtgctccctcgggacctgctctggattccggcccggacgtccccttggagctctgcatctccaacctggaacccaacccagaagtctcaagtttgacgcatcacgtggcgtgcggatccactgagggtccacagagaggggcgcccatctcctgcgtctcagttatcctggtgttgggaattctgtgccctaaagaattccgactcagatccgaacggggatctggtggaatcgagggtgaaagaccagagggacaatgttctactatcccaacgtgcttcagcgccacaccggctgctttgccaccatctggctggcggcgactcgcggcagccggttggtgaagcgcgaatacctgagggtgaatgtggtgaaaacctgcgaggaaatcctcaattacgtgctggtacgagtgcaacccccgcagcccggcctgccgcggccccgcttctccctctatctctcagcccaacttcagatcggtgtgatccacgtctattctcaacaatgccagtacctcgtggaggacatccagcaccatcttggagcgcctccaccgtgcccagctgcagatccgaatagatatggagactgagctacccagcctgctgcttcctaaccacctggccatgatggaagaccctagaagatgctccagaatccctttttcgggatgatgtcctgtggatcccagacttcctagtcctttccgatacccctcagattcgaccactctttaaaggctgcaatctcagagaaagttcgagagaatcctcctgaagtcctaccgagccag

SEQ ID NO: 350301 - DNA, 1271 bp, Homo Sapiens
ggaaggcaggaggcaatatatgagcatcatagaaaaggaattggataaaagcagaataagaaggagaagagtaagacaagcgtatggactggactttaagcggcagaacatgtgaggagcgaaacggagttagcaggaggagagttagaagatgagtgaagagaaccagtgaaatgagaggaggatacagaaacatgctccgacgaggaggacacctaagcgacaacatacaagggactctgtaacataagcccctatcgccttgcagatgacaggtcaagtaactgcagggtcctccctttagcaagttggaatataaagcccttgtctgcagcagtatccaggtactcccagaaaagcccctggggcatggtgggcactcacccatgagtagggccccagttccccagcctgtcagcctcagctcctcaggacccagtgcctctcctattccttccaccctgaggggaaatgggcaagagaaatgaggagacccttcccagcactgacaccctacctggtctaggagttcttgcccttactctgcaggagctggaggtgggagccgcgggatttctaacaagatagcttcttcttcctctgcgatcagcaggtccagttctcggcggctgacctctgggagctcccgttcaccctcaatctccagcatccgtatgggctctgcctccaggatcgtgatggcctcaggtggcagcacagtgaccggaatcctctctggctccctgggctctgtaggaacttcaggagggatctcttcaactctctctgggattgcagcctctaagaggtgtcgaatctgagggatatcgaaaggactaggaagtctgggatccacagacatcatcccaaaaaagggatctggagcatcttctagggtctccatcatggccaggtggttaggaagcagcaggctgggtagctcagtctccatatctattcggatctgcagctgggcacggtggaggcgctccaagatgtgctggatgtcctctgtgggcagggaggacgaggtagacagccagcttagcagacagctgctcagcccgccccacctttgagggttcccagccttacccacgaggtactggcattgttgagaatagacgcggatcacaccgatctgaagttgggctgagagatagagggagaagcggggccgcggcaggccgggctgcgggggttgcactcgtaccagcacgtaattgaggatttcctcgcaggttttcaccacattcaccctcaggtattcg

SEQ ID NO: 350302 - DNA, 2189 bp, Homo Sapiens
gctggctgtctacctcgtcctccctgcccacagaggacatccagcatatcttggagcgcctccaccgtgcccagctgcagatccgaatagatatggagactgagctacccagcctgctgcttcctaaccacctggccatgatggagaccctagaagatgctccagatcccttttttgggatgatgtctgtggatcccagacttcctagtcctttcgatatccctcagattcgacacctcttagaggctgcaatcccagagagagttgaagagatccctcctgaagttcctacagagcccagggagccagagaggattccggtcactgtgctgccacctgaggccatcacgatcctggaggcagagcccatacggatgctggagattgagggtgaacgggagctcccagaggtcagccgccgagaactggacctgctgatcgcagaggaagaagaagctatcttgttagaaatcccgcggctcccacctccagctcctgcagaggtggaaggaataggagaggcactgggtcctgaggagctgaggctgacaggctgaggaaacctggggccctactcatgggtgagtgcccaccatgccccaggggcttttctgggagtacctggatactgctgcagacaagggctttatatcccaacttgctaaagggaggaccctgcagtttcttgccctggcatctgcaaggggtaaggggcttatgggacagagccccttgggtgttgttgcagaggtgacccccccggaggagctgcgtctgccagccccacccagcccagaggtgagtagcctcccttctaatcctcctcctcctcctctttgccctcccccacaaggactgcctccccaagcccagggccactgctagcttacaggggtccttaatgcagatgataaaagatgcccctttctacgccccatcgtatctggcctacgcttcccagatgggtacccttatgcaaggtatgagctgctcaagtgcatggagaccccgcacaagccctctccaggttcctctaggggcgggtgtggggtcctgttagcagtccaccagaatgacaggaaaaggagtaatgggcagccttgcccctacctgccctccccactcaacagaggaggcccccagtccccccacctcctcgccgccgccgtcgtcgccggttactgttctgggacaaggagactcagatctccccggagaaattccaggaacaactgcaaaccagagcccactgctgggaatgtcccatggtgcagccgcccgagaggaccatcagaggccctgcggagttgttcagaaccccaactctctctggctggctaccccctgaactactgggtctctggacccattgtgcccagccacccccaaaagccctcaggcgagagctgcctgaggaggcagccgctgaggaggaaaggagaaagattgaagttccaagtgagattgaggtcccgagggaggccctggagcccagtgttccccttatggtgtctttagagatctccctagaggcagctgaagaggagaagtcccgcatcagcctcatcccaccagaagaacggtgggcctggctctgaggtggaggcgccagaagctcctgcattgcccgtggtgcctgaactccctgaggtgcccatggagatgcctttggtgctgcccccagagctcgagctgctctcactggaagcagtgcacagggcagtaggcactggaacctgcaggccaacagggagcccgaatcctcagcagcccatggagacacctttggtgctgccccccagagctcgagctgccctcactggaagcagtgcacagggcagtggcactggagctgcaggctaacagggagcccgacttcagcagcctggtgtcacctctcagcccccgcaggatggctgcccgggtcttctacctgctcctggtgctctcagcgcaacagattcttcacgtgaaacaagaaaagccatatggtcgcctcctgatccagccggggcccagattccactgaggttagagtccatttacaaagctgccaggaaaccggccacttctagtaaaccacgtcgtgcctcactgggtcctgcttacctcatttctgaatgtgcatttccagccttcttgctctcagagctattgttcaagcagaaaacaagctgcttttattaaaa

SEQ ID NO: 350303 - DNA, 495 bp, Homo Sapiens
ccaggggcctgacatcgctcccagcgctcgaggaccgaggcctgctgtggaggacaccgagggaggccctggagcccagtgttccccttatggtgtctttagagatctccctagaggcagctgaagaggagaagtcccgcatcagcctcatcccaccagaagaacggtgggcctggcctgaggtggaggcgccagaagctcctgcattgcccgtggtgcctgaactccctgaggtgcccatggagatgcctttggtgctgcccccagagctcgagctgctctcactggaagcagtgcacagggcagtggcactggagctgcaggctaacagggagcccgacttcagcagcctggtgtacacctctcagcccccgcaggatggctgcccgggtcttatacctgctcctggtgctctcagcgcaacagattcttcacgtgaaacaaaaaaagccatatggtcgcctcctgatccagccggggcccagattccactga

SEQ ID NO: 350304 - DNA, 846 bp, Homo Sapiens
ccaagccagtacaaggcccaggtgcctgacatcgctcccagcgctcgaggaccgaggcctgcgtgtggaggacaccgtgctccctcgggacctgctctggattccggcccggacgtccccttggagctctgcatctccaacctggaacccaacccagaagtctcaagtttgacgcatcacgtggcgtgcggatccactgagggtccacagagaggggcgcccatctcctgcgtctcagttatcctggtgttgggaattctgtgccctaaagaattccgactcagatccgaacggggatctggtggaatcgagggtgaaagaccagagggacaatgttctactatcccaacgtgcttcagcgccacaccggctgctttgccaccatctggctggcggcgactcgcggcagccggttggtgaagcgcgaatacctgagggtgaatgtggtgaaaacctgcgaggaaatcctcaattacgtgctggtacgagtgcaacccccgcagcccggcctgccgcggccccgcttctccctctatctctcagcccaacttcagatcggtgtgatccgcgtctattctcaacaatgccagtacctcgtggaggacatccagcacatcttggagcgcctccaccgtgcccagctgcagatccgaatagatattggagactgagctacccagcctgctgcttcctaaccacctggccatgatggagaccctagaagatgctccagatcccttattgggatgatgtctgtggatcccagactttcctagtcctttcgatatccctcagattcgaaacctcttagaggctgcaatcccagaagagagttgaagagaatcc

SEQ ID NO: 350305 - DNA, 1611 bp, Homo Sapiens
  misc_feature (1349)..(1349): n is a, c, g, or t
taggtagcgaggccgggtgttaatcggcacgaggctgcagtaggcggccggggcacaccgcggcgcccaagccagtgcaaggcccagggcctgacatcgctcccagcgctcgaggaccgaggcctgctgtggaggacaccgtgctccctcgggacctgctctggattccggcccggacgtccccttggagctctgcatctccaacctggaacccaacccagaagtctcaagtttgacgcatcacgtggcgtgcggatccactgagggtccacagagaggggcgcccatctcctgcgtctcagttatcctggtaattgtgtatctgcccattgttcgttgcctcattaacttggctttctagtgttgcacccaccttgccaccagagaagtccaaatcctgacttctctccaaggtgttgggaattctgtgccctaaagaattccgactcagatccgaacggggatctggtggaatcgagggtgaaagaccagagggacaatgttctactatcccaacgtgcttcagcgccacaccggctgctttgccaccatctggctggcggcgactcgcggcagccggttggtgaagcgcgaatacctgagggtgaatgtggtgaaaacctgcgaggaaatcctcaattacgtgctggtacgagtgcaacccccgcagcccggcctgccgcggccccgcttctccctctatctctcagcccaacttcagatcggtgtgatccgcgtctattctcaacaatgccagtacctcgtggaggacatccagcacatcttggagcgcctccaccgtgcccagctgcagatccgaatagatatggagactgagctacccagcctgctgcttcctaaccacctggccatgatggagaccctagaagatgctccagatcccttttttgggatgatgtctgtggatcccagacttcctagtcctttcgatatccctcagattcgacacctcttagaggctgcaatcccagagagagttgaagagatccctcctgaagttcctacagagcccagggagccagagaggattccggtcactgtgctgccacctgaggccatcacgatcctggaggcagagcccatacggatgctggagattgagggtgaacgggagctcccagaggtcagccgccgagaactggacctgctgatcgcagaggaagaagaagctatcttgttagaaatcccgcggctcccacctccagctcctgcagaggtggaaggaataggagaggcactgggtcctgaggagctgaggctgacaggctgggaacctggggccctactcatggaggtgacccccccggaggagctgcgtctgccagccncacccagcccagagaggaggcccccagtccccccacctcctcgccgccgccgtcgtcgccggttactgttctgggacaaggagactcagatctccccggagaaattccagggaacaacttgcaaaccagagcccattgctgggaatgtcctatggttgcagccgcccgagaggaccatcagaggccttgcggagttgtttcagaaccccaattttttttgggtgggtaaccccttgaattattgggtttttggacctttgtg

SEQ ID NO: 350306 - DNA, 2493 bp, Homo Sapiens
  misc_feature (208)..(269): n is a, c, g, or t
ccggtccggaattcccgggatctcgcgcaggcgcgctccagcacatggcgccctgctgcagcaagggccgacggcggcggagtccgccgctatcccatcagcccggccaggcaggtccagctctcacccgcccaggtcgtcccgcctcccctatcccgtcttgctctgcggcgcaggggcaagatggctgctgagaagcaggtcccannnnnnnnnnnnnnnnnnnnnnnnnnnnnnnnnnnnnnnnnnnnnnnnnnnnnnnnnnnnnntggacgtggtgccggaggggaagaaaataaagaaaacgaacgcccttcggccggatcgaaggcaaacaaagaatttggggatagcctgagtttggagattcttcagattattaaggaatcccagcagcagcatggtttacggcatggagattttcagaggtacaggggctactgttcccgtagacaaagacgtcttcgaaaaacactcaacttcaagatgggtaacagacacaaattcacagggaagaaagtgactgaagagcttctgaccgataatagatacttgcttctggttctgatggatgctgaaagagcctggagctacgccatgcagctgaaacaggaagccaacactgaaccccgaaaacggtttcacttgttatctcgcctacgcaaagccgtgaagcatgcagaggaattggaacgcttgtgtgagagcaatcgcgtggatgccaagaccaaattagaggctcaggcttacacagcttacctctcaggaatgctacgttttgaacatcaagaatggaaagctgccattgaggcttttaacaaatgcaaaactatctatgagaagctagccagtgctttcacagaggagcaggctgtgctgtataaccaacgtgtggaagagatttcacccaacatccgctattgtgcatataatattggggaccagtcagccatcaatgaactcatgcagatgagattgaggtctgggggcactgaaggtctcttggctgaaaaattggaggctttgatcactcagactcgagccaaacaggcagctaccatgagtgaagtggagtggagagggagaacggttccagtgaagattgacaaagtgcgcattttcttattaggactggctgataacgaagcagctattgtccaggctgaaagcgaagaaactaaggagcgcctgtttgaatcaatgctcagcgagtgtcgggacgccatccaggtggttcgggaggagctcaagccagatcagaaacagagagattatatccttgaaggagagccagggaaggtgtctaatcttcaatacttgcatagctacctgacttacatcaagctatcaacggcaatcaagcgtaatgagaacatggccaaaggtctgcagagggctctgctgcagcagcagccagaggatgacagcaagcgctcaccccggccccaggacctgatccgactctatgacatcatcttacagaatctggtggaattgctccagcttcctggtttagaggaagacaaagccttccagaaagagataggcctcaagactctggtgttcaaagcttacaggtgttttttcattgctcagtcctatgtgctggtgaagaagtggagcgaagcccttgtcctgtatgacagagtcctgaaatatgcaaatgaagtaaattctgatgctggcgccttcaagaacagcctaaaggacctgcctgatgtgcaagagctcatcactcaagtgcggtcagagaagtgctccctgcaggccgcagccatccttgatgcaaacgacgctcatcaaacagagacctcctcctcccaagtcaaggacaataagcctctggttgaacggtttgagacattctgcctgggacccttcccttgtcaccaagcaagccaaccttgtggcacttcccaccagggcttccagcccatttccctggcaagccttttgttctttgacctgggccctcaaaccatgtgggcttttcccaccccttgaggacaagttggaacagaagaccaagagtggcctcactggatacatcaagggcatctttgggatttcaggagctaaccagggctcttcctcgggggccggggggagattctggactctaaatctggattgtgaagaaaattccccagcaagttccatggatattaaaatcccaggtctgcattggcccccggggcaaagaatttaaacattcttccggccctggcataccctaaattttggggtctgggaacccgttcttaaaccagcgggttcagggagagacaccctggttggcctttctgggaaatggtgtgccaggggccctcccgggccctcggtgaccctccccgggaaagagggggccccccttcctgtttttggggggcccctggtggaccctggggaatggaattgccccttttgaggcccagaaaaaagcgcgtttctcgggggagttccccacacccccggggggcccacagaaggggg

SEQ ID NO: 350307 - DNA, 788 bp, Homo Sapiens
agctggtaccggccggaattccgggatatcgtcgaccacgcgtccgctcacccgccttcagagacttcttggcccatcttagctggaagggatctgttccagcgctgagcttttattttgcttagcatctactcagatgccttgactgtgtgtgtctcacagtcctactgactgacaaactccctgggggccgagatggcatggattcaggtctcagatgctctatggcacctgggagcatcttacacaggtgaagtgctcagtgatgatctggggtcactattctctgcagatcagcatgtctgagaggtaggggctcacagactgtggaactggtgtaagacctttgtcttttcccagctactaacaggtccagcttgtcacaagcccttccatgatacaaagttaagtcatttttgtgtctgacacaggcaaaggaaaatgacaggcccttgccttcccggtcctcaagggtcagctgtaagatgatgtcataaagccggatcaggtcctggggccgggggaagcacttgctgtcatcctctggctgctgctgcagcagagccctctgcagacctttggccatgctctcattacgcttgatttgccattgacagcttgatgtaagtcaggtaggtggaatgcaccacacgtcagctcaagttatactcagagacagcagaggaactgggaggactgcactacgagttggggctgacccagaggaagtccgggggtgagttggggcaaggccacagcagggccattttggctgggcttcaagggac

SEQ ID NO: 350308 - DNA, 1499 bp, Homo Sapiens
caggcctgggtggcgaattcggcacgagggagaacatggccaaaggtctgcagagggctctgctgcagcagcagccagaggatgacagcaagcgctcaccccggccccaggacctgatccgactctatgacatcatcttacagaatctggtggaattgctccagcttcctggtttagaggaagacaaagccttccagaaagagataggcctcaagactctggtgttcaaagcttacaggtgttttttcattgctcagtcctatgtgctggtgaagaagtggagcgaagcccttgtcctgtatgacagagtcctgaaatatgcaaatgaagtaaattctgatgctggcgccttcaagaacagcctaaaggacctgcctgatgtgcaagagctcatcactcaagtgcggtcagagaagtgctccctgcaggccgcagccatccttgatgcaaacgacgctcatcaaacagagacctcctcctcccaagtcaaggacaataagcctctggttgaacggtttgagacattctgcctggacccttcccttgtcaccaagcaagccaaccttgtgcacttcccaccaggcttccagcccattccctgcaagcctttgttctttgacctggccctcaaccatgtggctttcccaccccttgaggacaagttggaacagaagaccaagagtggcctcactggatacatcaagggcatctttggattcaggagctaaccaggctcttcctcgggggcgggggagattctgactcttaatctgtattgtgagaaaatcccagcaagttccatgatattaaatccaggtctgcattggcccggggcaagagtttaacatcttcggccctgcattcctacatcttgtgtctgtacacgttcttaagcagcgtgtcaggagagcaccctgttgtcttctggtaaatgtgtgcagggtcatcctgtctcctgtacctcctgggaagggggccgctgctgtctggtgccctgtgagctgtgattgattgcctttggtcagtaatgcgttcaggagtccacaccaggcacagatggggccttgaaacgctttgtcatgcttcttcagtaccatggatttgaaatgaactcatccttgctgtgagcatccaggagcccttgagaagtttatctatgactatgaaactggcaacgtcaccccagaattacggtcagccttattccccttcacctcccagtgaacgctaagaagtttcagacaagcagagagctctatttttagaagaaatatgttacactcagaaatgatgaaaccaaatcttatattaaaaggcaaagatgacggcaaaacacacaaagtacacaacaaagaaaaagacaactcccgagggaactcctacagagggcgcgcgggcagaaacaggggtcaacggcaacggcgccggtgggtcaacacacgcgctcaccgggaccccaagattcctggccccacgggggcaaacctctgcggggcccc

SEQ ID NO: 350309 - DNA, 577 bp, Homo Sapiens
tgccgctcttcctccgtgggcatcatggtcagtagcttctgaggatgtagccagagcctgacatggccccctcaatgcaggcctgaggcctgaggcattggtcttgacccctcagtcatctaggggaggccccagtgtctggggactgccctgcagaaatgccaagcccatgcccaccaccagagggacaggaaatgcccacctaccaaaggagaaggccagacctccccccaacacccatagctgggtgacctcacctcaatgccatccttgctgacagcaaactcatcaaagttgagcagagcagccttaatgacatgcacaggtggcagtgtggttaggccgatgttgatggcgttgctgcgcttggggtccagcactgtggtcattgtccggcggccctctccagctttcttggagggcagcacctctttggcacgagactcaaagaggtgttccagtcgggccgtgtccactgagacagggtccagtgaagcccagagggtggcgcagggcccaaagcggcttgcagagactccatggcccccagccagcttcagctcacgccagaaaagtt

SEQ ID NO: 350310 - DNA, 1295 bp, Homo Sapiens
  misc_feature (1138)..(1138): n is a, c, g, or t
  misc_feature (1148)..(1148): n is a, c, g, or t
  misc_feature (1152)..(1152): n is a, c, g, or t
  misc_feature (1157)..(1157): n is a, c, g, or t
  misc_feature (1159)..(1159): n is a, c, g, or t
  misc_feature (1187)..(1187): n is a, c, g, or t
  misc_feature (1190)..(1190): n is a, c, g, or t
  misc_feature (1201)..(1201): n is a, c, g, or t
  misc_feature (1204)..(1204): n is a, c, g, or t
  misc_feature (1206)..(1206): n is a, c, g, or t
  misc_feature (1212)..(1212): n is a, c, g, or t
  misc_feature (1217)..(1217): n is a, c, g, or t
  misc_feature (1225)..(1226): n is a, c, g, or t
  misc_feature (1228)..(1228): n is a, c, g, or t
  misc_feature (1241)..(1241): n is a, c, g, or t
  misc_feature (1246)..(1246): n is a, c, g, or t
  misc_feature (1249)..(1249): n is a, c, g, or t
  misc_feature (1252)..(1252): n is a, c, g, or t
  misc_feature (1254)..(1254): n is a, c, g, or t
  misc_feature (1256)..(1257): n is a, c, g, or t
  misc_feature (1266)..(1266): n is a, c, g, or t
  misc_feature (1277)..(1277): n is a, c, g, or t
  misc_feature (1281)..(1281): n is a, c, g, or t
  misc_feature (1285)..(1285): n is a, c, g, or t
ggaggtttgtgtcttattatcctccgggtccctcgctggctagtaggagagactggtgcttgccccgcccggtggactaactcgcttaattttaaataaaaagtcgaggacacggcggtcgttttcccgaagacatgggccctcccatgggccatttgctccctggaggccctcgcgtcttgctgagcccggggagttaggatgacgcgagcggtgagggagcccggaacgattccttcgcggaacaattgaggcgaggcctttgggagtactttgtgggacggaccctggcgggccctgccagacgcacagggatggcggcggaggcggccgatttggggctgggggccgccgtccccgtggagctgaggcgggagcgacgcatggtgtgcgtggagtacccgggagtggtgcgtgatgtggctaagatgctgccgactctgggcggcgaggaaggcgtctcccggatctacgcagaccccaccaagaggctggagctgtacttccggcccaaggacccatactgccacccagtgtgcgccaaccgcttcagtaccagcagcctgctgctccgcatcaggaagagaacgaggcggcagaaaggggtgctgggcactgaggcccactccgaggtcacatttgacatggagatccttggcatcatctccaccatttacaaatttcaggggatgtctgacttccagtacttggctgtgcatacggaagcaggcggcaagcatacgtcaatgtatgacaaggtgctcatgctccggcccgagaaggaggcctttttccaccaggagctgccgctctacatccccccacccatcttctcccggctggacgccccggtggactacttctaccgaccagagacccagcaccgggaaggctacaacaatccccccatctcaggtgagaatctgattggcctgagcagagcccggcgcccccacaatgccatctttgtcaactttgaggatgaggaggtgcccaagcagccactggaggctgcagcccagacgtggaggagagtctgcactaaccccgtggaccggaaggtggaggaggagctgaggaagctgtttgacatccgtcccatctggtcccgaaatgctgtcaaggccaacatcagcgntcatccaganaagntcaangnctgcttcccttcataggctattacatgntanagggccctggngcncnaatggntttcntttggggnngnaccccgaaaaaanccaantgnaanantnntaagtcctnatttcgaatcntttnggangaaaacggta

SEQ ID NO: 350311 - DNA, 1582 bp, Homo Sapiens
ccccctttggaaatttcccccgcatgggggaattttttaaactttccccatcagtcaatgtgtaaaacccgcaagggggcaagcccctcccaaattttacaaattcttttcaaggggaaaaaacaggaaagtgacccaaaccctgggctccaagttcaaaccccattgagcccccatggggtctttcaggagttgctggtcacaaaagcaggtggccaacaggctggaagccccggagaggtggggaaaaaacaaatgtccacctcccccaagagctcttggagaggcagaggagcacccaggccctcctggggccactggaaacggtaagcccgcccgtgcagcaggccatggcgcccatggcatggggctggcactagccttgtgccgggctctgctctctgtgccctcctgcactctgaccctatccctcacccactgctgctaatttgtcaccctatgtccccctatgggctgccctgacatcttttctgggaaaagcagggcttagtgagtgtttgctctctcccttccgtacccagccatgtagttctagagtaaggataacggcctcctaggagaggcctcgagaaggaaggccgcacaggctgtggcatgatcgcccctcactgggaaggcagcaaaggtctaaaaaacctagaaaataggcagggccccagacactgggggacagcaagtccctcgcatcacccgtctctgctgcactcatctctgccacccactccctcagcaggtgattccaccgtgcgggatgcccccttctcggcctcccccagggctgtggagcggcttgcgggagcctgaatgtgggaacagctctggaaaccgccaacccccgctgggcaaccgcactgacggaaacgtgagccagtgaggctcctgccacagctgcagcccacatggcctgctctggctctgtcctcctgtgtgtgcccaattccgatcattcccggagtggtcacgtggctcagtgggggcccaggctcccaaagggctcgagaaggacaaccacatgcagctgctggtgccagacttccctgagacttgtcaccacctcttcgccagatgtccccacacacacagcctggggctttgcacccgagttctcaccctcagtgtctgaaggctgacctaaaaggaagcaaggtgccgaggcccggtgggcagagctgccctaatcacagccccccaggtgtcacccacaaggtgcccggccccaagagggaagtcctcccctccattcctgcctccaggggcgcccacttgaggcttgtacttgctgaaagctggtttccgagcaccactcgtccccgacgggcccaggccctgcttcaggtcatgcatggtgacaagctggctgatgtcttcttggacggtgatggggaggctgtagttgtaggtgctgcgctttgctttgaccgcaagtcactgggggcgtaaccgtgtttcattccacacgattcgcgacgcgtggtcaacatatcccgtattccggaccgacacctgcttatagtaacccacacggggtttcaaaagtgcaccaaaatcgatgggagggggt

SEQ ID NO: 350312 - DNA, 1440 bp, Homo Sapiens
  misc_feature (346)..(346): n is a, c, g, or t
ggcggaggcggcgatttggggctgggggccgccgtccccgtggagctgaggcgggagcgacgcatggtgtgcgtggagtacccgggagtggtgcgtgatgtggctaagatgctgccgactctgggcggcgaggaaggcgtctcccggggatgtctgacttccagtacttggctgtgcatacggaagcaggcggcaagcatacgtcaatgtatgacaaggtgctcatgctccggcccgagaaggaggcctttttccaccaggagctgccgctctacatccccccacccatcttctcccggctggacgccccggtggactacttctaccgaccagagacccagcaccngggaaggctacaacaatccccccatctcaggtgagaatctgattggcctgagcagagcccggcgcccccacaatgccatctttgtcaactttgaggatgaggaggtgcccaagcagccactggaggctgcagcccagacgtggaggagagtctgcactaaccccgtggaccggaaggtggaggaggagctgaggaagctgtttgacatccgtcccatctggtcccgaaatgctgtcaaggccaacatcagcgtccacccagacaagctcaaggtcttgcttcccttcatagcctattacatgataacaggcccctggcgcagcctatggattcgatttgggtatgacccccgaaaaaacccagatgccaagatttatcaagtcctcgatttccgaatccgttgtggaatgaaacacggttacgcccccagtgacttgccggtcaaagcaaagcgcagcacctacaactacagcctccccatcaccgtcaagaagacatccagccagcttgtcaccatgcatgacctgaagcagggcctgggcccgtcggggacgagtggtgctcggaaaccagcttccagcaagtacaagctcaaggactctgtctacatcttccgggaagggggccttgccaccctaacggcagatgttctaccagttatgccacttgaatgtggaagagttgcagaagatcattcaccgcaatgacggggcagagaattcctgcacagaacgggatgggtggtgcctccccaagaccagcgacgagctcagggacaccatgtccctcatgatccggcagaaccatccgctccaagaggcctgctctcttttccagctcagccaaggctgatggccggaaaagagcagctgacgtacgagtctggggaagacgacgaggatgacgacgcgaggagcgcaagacggaggacggaggactccaagccatccgaccggcacgtgaaaccgcaactggcgacagagattcctggacctaacgtgtgacagggccccaaggcctgggcctccctgacccggcacggactggatcgtctggccctactgacgggaccccggggctcaccacttgcacac

SEQ ID NO: 350313 - DNA, 1054 bp, Homo Sapiens
tggcggcggaggcggcgatttggggctgggggccgccgtccccgtggagctgaggcgggagcgacgcatggtgtgcgtggagtacccgggagtggtgcgtgatgtggctaagatgctgccgactctgggcggcgaggaaggcgtctcccggatctacgcagaccccaccaagaggctggagctgtacttccggcccaaggacccatactgccacccagtgtgcgccaaccgcttcagtaccagcagcctgctgctccgcatcaggaagagaacgaggcggcagaaaggggtgctgggcactgaggcccactccgaggtcacatttgacatggagatccttggcatgatctccaccatttacaaatttcaggggatgtctgacttccagtacttggctgtgcatacggaagcaggcggcaagcatacgtcaatgtatgacaaggtgctcatgctccggcccgagaaggaggcctttttccaccaggagctgccgctctacatccccccacccatcttctcccggctggacgccccggtggactacttctaccgaccagagacccagcaccgggaaggctacaacaatccccccatctcaggtgagaatctgattggctgagcagagcccggcgcccccacaattgccatcttttgtcaactttgaggatgaggaggtgcccaagcagccactggaggctgcaagcccagacgtggaggagagtctgcactaacccccgtggaccggaggtggaggaaggagctgagggaagctgtttgacatccggtcccatctggtcccgaaatgctgtcaaggccaaatcagggtccacccagaccaagccccagggtctggattcccttacttagcctattacattgattaaccggccctggggcagaccatgggattcgcttggggaattatccccgaaaaaaccccaatgccacagattatccaaccccagatccaaacagctgggaaatgaacacgggtactccccatgaattgcgggccaaaataggacactatatatggtctcaatcgcaaaaaatc

SEQ ID NO: 350314 - DNA, 1000 bp, Homo Sapiens
gcctggggggcccctctggggcgggagaggaaccggggtccacggtgggcgggcgcggagaaactcggggcgagtggaggtgttggagccgcgttctcaggcctaggatggccccctcagaccgtgccatgggtgacagtgatgacgagtacgatcgaaggcgcagggacaagttcagaagagagcgcagcgactacgaccgttcccgcgagagagatgaaagacgtcgaggggacgattggaatgacagagagtgggaccgtggccgtgagcgccgtagtcggggtgaatatcgggactatgaccggaatcggcgagagcgcttctcgccacctcgccacgaactcagcccgccacagaagcgcatgaggagagactgggatgagcacagctctgacccataccacagtggctatgagatgccctatgctggggggggtgggagcccaacttatggcccccctcagccctggggccaccctgacgtccacatcatgcagcaccatgtcctgcctatccaggccaggctgggcagcattgcagagattgacctgggtgtgccgccgcccgtgatgaagaccttcaaggagtttctcctctccctggatgactcggtggatgagacggaggccgtcaagcgctataatgactacaagctggatttccggaggcaacagatgcaggatttcttcctggcgcacaaagatgaggagtggtctccgtctaagtaccacccagatgaggtggggaagcgtcggcaggaggcccggggggccctgcaaaaccgacctgagggtcttcctgtccctcatggcagactggctggtttgataaccttctcctggacatagacaaagctgatgccatggtcaagaagctggatgcagccgtgatttaggatggaaggaggcacggacgaatggactccggatcctggagcaggaggaggcaggagaacaacggacgggaaagacggggagggcagacaggaaagaagaag

SEQ ID NO: 350315 - DNA, 2715 bp, Homo Sapiens
  misc_feature (32)..(32): n is a, c, g, or t
  misc_feature (57)..(57): n is a, c, g, or t
tggaaatgaacagaaaatgggaaccttggccnttgaacgcccttaatcggggtgaantatcgggaactatgaaccggaaatcggcgaagaacgcttctcgccacctcgccacgaactcagcccgccacagaagcgcatgaggagagactgggatgagcacagctctgacccataccacagtggctatgagatgccctatgctgggggggggtggggcccaacttatggcccccctcagccctggggccaccctgacgtccacatcatgcagcaccatgtcctgcctatccaggccaggctgggcagcattgcagagattgacctgggtgtgccgccgcccgtgatgaagaccttcaaggagtttctcctctccctggatgactcggtggatgagacggaggccgtcaagcgctataatgactacaagctggatttccggaggcaacagatgcaggatttcttcctggcgcacaaagatgaggagtggtttcggtctaagtaccacccagatgaggtggggaagcgtcggcaggaggcccggggggccctgcaaaaccgactgagggtcttcctgtccctcatggagactggctggttagataaccttctcctggacatagacaaagctgatgccattgtcaagatgctggatgcagccgtgattaagatggaaggaggcacggagaatgatctccgcatcctggagcaggaggaggaggaggagcaggcaggaaagcctggggagcccagcaagaaagaagaaggacgggctggagcaggcctaggggacggggagcgcaaaaccaacgacaaggatgagaagaaggaagacggcaagcaggctgagaatgacagttctaatgatgacaaaacaaagaagtcggagggtgatggggacaaggaagagaagaaagaagactccgagaaggaagccaaaaagagtagcaagaagcggaaccggaagcacagtggtgacgacagctttgacgagggcagcgtgtcagagtctgagtcggagtcagagagcggccaggctgaggaggagaaggaggaggccgaagaagcgctcaaggagaaggagaagcccaaggaagaagaatgggagaagcccaaggacgccgcggggctggagtgcaagccgcggccgctgcataagacctgctccctcttcatgcgcaacatcgcgcccaacatctcccgggccgagatcatctccctttgtaaaaggtacccaggctttatgcgggtggcgctctcagagccccagccagagaggaggtttttccgtcgtggctgggtgaccttcgaccgcagtgttaacattaaagagatctgttggaacctgcagaacatccgtctccgggagtgtgagctgagccctggtgtgaacagggacctgacccggcgcgttcgcaacatcaacggcatcacccagcacaagcagattgtgcgcaacgacatcaagctggcggccaagctgatccacacgctggatgacaggacacagctttgggcctcagaaccagggacgcctcccctgcccacgagcctgccctcgcaaaacccgatcttgaagaatatcaccgactacctgatcgaggaagtaagcgccgaggaggaggagctgctggggagcagcgggggcgctcctcctgaggagcctcctaaggaagggaacccggcagagatcaacgtggagcgggatgagaagttgattaaggtcttggacaagctcctcctttacctgcgcatcgtgcattccttggattattacaacacctgtgagtaccccaacgaggacgagatgcccaatcgctgtgggatcatccacgttcgggggcccatgccacccaaccgcatcagtcacggggaagtgctggagtggcagaagacttttgaggagaagctcacgccgttgctgagtgtgcgggagtcactctcagaggaagaggcccagaagatggggcgcaaagacccagagcaggaagtggagaagttcgtcacctccaacacgcaggaactgggcaaggataagtggctgtgtcctctcagtggcaagaaattcaagggtcctgagtttgtgcgcaaacatatcttcaacaagcatgcagagaaaattgaggaagtgaaaaaggaagtcgcgttttttaacaacttcctcactgatgctaagcgcccagctctgcctgagatcaagccagcccagccacctggccccgcccagatactccccccaggtttgaccccaggactcccctacccacaccagactccccagggcctgatgccctatggtcagccccggcccccgatcttgggctatggagctggtgctgtccgccctgcagtccccacaggaggccctccatacccccatgccccgtatggtgctggtcgagggaactatgatgccttccgaggccagggaggttatcctgggaaacctcgcaacaggatggttcgtggagacccaagggccattgtggaatatcgggacctggatgccccagacgatgttgatttcttttgagccgtcccccgttcctcagtcctgtatcatccatacttgtactaccttgtcctatgaagctctgagaattttttgtacgatcagccttactgctaataaaagcacttccacagggaaaccaaaacccaccacctctataacaccaatcggaatacctcccttattttcacatacataatccttcg

SEQ ID NO: 350316 - DNA, 821 bp, Homo Sapiens
  misc_feature (556)..(570): n is a, c, g, or t
gagcgaggcctgggtggcgaattcggcacgaggtgacgcaggcgcagcgcgggctgcgcgcgctactgcccatccccggttgtcccacttttgttcgcctctcttcggtcctctactcaagagctccgtctccgtctcgccctcctcgaagtcctcgtcgcgcgcccgcgacccaggtcgccctgaaatctagcccgtccgagcgcgagtccaacggccgcggccgcaccaaggccccctcagaccgtgccatgggtgacagtgatgacgagtacgatcgaaggcgcagggacaagttcagaagagagcgcagcgactacgaccgttcccgcgagagagatgaaagacgtcgaggggacgattggaatgacagagagtgggaccgtggccgtgagcgccgtagtcggggtgaatatcgggactatgaccggaatcggcgagagcgcttctcgccacctcgccacgaactcagcccgccacagaagcgcatgaggagagactgggatgagcacagctctgacccataccacagtggctatgagatgccctatgcctnnnnnnnnnnnnnnnccccaacttatggcccccctcagccctggggcccaccctgacgtccacatcatgcagcaccatgtcctgcctatccaggcccaggctgggcagcattgcagagattgacctgcgtgtgccgccgcccgtgaagaagaccctcaaggagtttctcctcttccctggatgactcggtggatgagacggaggccgtcaagcgctataatgactacaagctggatttccggaggcaacagatgcaggatttcttc

SEQ ID NO: 350317 - DNA, 393 bp, Homo Sapiens
  misc_feature (299)..(299): n is a, c, g, or t
  misc_feature (383)..(383): n is a, c, g, or t
gtgatgacgagtacgatcgaaggcgcagggacaagttcagaagagagcgcagccttacgaccgttcccgcgagagagatgaaagacgtcgaggggacgattggaatgacagagagtgggaccgtggccgtgagcgccgtagtcggggtgaatatcgggactatgaccggaatcggcgagacgcttctcgccacctcgccacgaactcagcccgccacagaagcgcatgaggagagactgggatgagcacagctctgacccataccacagtgggctatgagatgccctatgctggggggngtgggggcccaacttatggcccccccttcagccctgggggcccaccctgaacgttccacattcattgcaggcaccatgttcctngcctattcca

SEQ ID NO: 350318 - DNA, 2005 bp, Homo Sapiens
  misc_feature (869)..(869): n is a, c, g, or t
  misc_feature (1887)..(1888): n is a, c, g, or t
  misc_feature (1940)..(1940): n is a, c, g, or t
  misc_feature (1948)..(1948): n is a, c, g, or t
  misc_feature (1950)..(1950): n is a, c, g, or t
  misc_feature (1952)..(1952): n is a, c, g, or t
  misc_feature (1960)..(1960): n is a, c, g, or t
  misc_feature (1962)..(1963): n is a, c, g, or t
  misc_feature (1980)..(1980): n is a, c, g, or t
  misc_feature (1984)..(1984): n is a, c, g, or t
  misc_feature (1996)..(1996): n is a, c, g, or t
ggttctaacaccggctctgggtacagaggagaaagagtgaccccccggcccaaccagcaacccagttgaggaagagcactggccttgaaagaacgcggtaaccgaaagaagccagtaggcggacttccaaccaacaggcacatgatgccagacgagggccgcaagtgcctgggtaccttgcgcctccaggggctgttcacaaggtgcaccccagaaggcatcatctggctcagggggcagcagctggaaccgcagtgttgccacagtccccggcatagtgctgggctggaggcgacctgagcttctgagtgaaagaggctgtgcagaggcccgaggggccggggttgcggggcgccagaggctccaactgactggggtccagggaaagtccgtcgtgcgaggaagggggctgctgggccggagagaatggtgtcggcgcggtgccggcgccgctccacgtccaacaccggctggcactccagtcccgcggcgtccgggaactcgggctgggccatccaggcaggggcgggctgcttctgacgtcacctgggacgcaccaaccacgccgcgggaggcaggggactccgcccccggcgtctccctctcctgcactgaggagggggcacttccgggggtccttcccctttaacctcccccttctcctccctctccggtagcgagagcccgagaccccaccccgggggcggggcccttgcagtgacacgtcggacagctgcggccgcggctgaggctccagtgccgagcgcaagaaccctgcgcagcccagagcagctgctggaggggaatcgaggcgcggctccggggattcggctcgggccgctggctctgctctgcggggagccagcggncccgcccgcggggcccgagccctccggatccgccccctccccggtcccgccccctcggagactcctctggctgctctgggggttcgccggggccggggacccgcggtccgggcgccatgcgggcatcgctgctgctgtcggtgctgcggcccgcaggcccgtggccgtgggcatctccctgggcttcaccctgagcctgctcagcgtcacctgggtggaggagccgtgcggcccaggcccgccccaacctggagactctgagctgccgccgcgcggcaacaccaacgcggcgcgccggcccaactcggtgcagcccggagcggagcgcgagaagcccggggccggcgaaggcgccggggagaattgggagccgcgcgtcttgccctaccaccctgcacagcccggccaggccgccaaaaaggccgtcaggacccgctacatcagcacggagctgggcatcaggcagaggctgctggtggcggtgctgacctctcagaccacgctgcccacgctgggcgtggccgtgaaccgcacgctggggcaccggctggagcgtgtggtgttcctgacgggcgcacggggccgccgggccccacctggcatggcagtggtgacgctgggcgaggagcgacccattggacacctgcacctggcgctgcgccacctgctggagcagcacggcgacgactttgactggttcttcctggtgcctgacaccacctacaccgaggcgcacggcctggcacgcctaactggccacctcagcctggcctccgccgcccacctgtacctgggccggccccaggacttcatcggcggagagcccacccccggccgctactgccacggaggctttggggtgctgctgtcgcgcatgctgctgcaacaactgcgcccccacctggaaggctgccgcaacgacatcgtcagtgcgcgccctgacgagtggctgggtcgctgcattctcgatgccaccgggggtgggctgcactggtgaccacgagggggtgcactatanncatctggagctgagcctggggagcagtgcaggagggggacctcatttccgantgcctganancnacctgtgngnncctgtgcaatgtacagngcanaagtttgccgantgaatggaa

SEQ ID NO: 350319 - DNA, 1409 bp, Homo Sapiens
tggatggtgcgccctgatgtgacgtcaggagcagaggccggagctgtccatcagcaccaaaggccgcgggcgggctcaggtcatggggccgcggttctggggcggcccgagccccggctcctgcgccttccccttcctcaggcccagcccgagttcccggacgccgcgggactggagtgccagccggtgttggacgtggagcggcgccgccaccgcgccgacaccattctctccggcccagcagcccccttcctcgcacgacggactttccctggaccccagtcagttggagcctctggcgccccgcaaccccggcccctcgggcctctgcacagcctctttcactcagaagctcaggtcgcctccagcccagcactatgccggggactgtggcaacactgcggttccagctgctgccccctgagccagatgatgccttctggggtgcaccttgtgaacagcccctggagcgcaggtaccaggcactgccggccctcgtctgcatcatgtgctgtttgttggagtcgtctactgcttcttcggttaccgctgcttcaaggcagtgctcttcctcactgggttgctgtttggctcggtggtcatcttcctcctctgctaccgagagcgggtgctagagacacagctgagtgctggggcgagcgcgggcatcgctctgggcatcgggctgctctgcgggctggtggccatgctagtgcgcagcgtgggcctcttcctggtggggctgctgctcggcctgctgctcgcagctgctgccctgctgggctccgaaccctactaccagccaggctccgtgtggggtccactggggctgttgctggggggcgggctgctctgtgccctgctcactctgcgctggccccgcccactcaccaccctggccaccgccgtggactggggctgccctgatcgcccactgccgcctgactacttcgccgagctgctactgctggggcgctacgtggtggagcgactccgggctgctcctgtgcccccactctgctggcgaagctgggccctgctggcactctggcccctgctcagcctgatgggcgttctggtgcagtggagggtgacagctgagggggactcccacacggaagtggtcatcagccggcagcgccgacgcgtgcaactgatgcggattcggcagcaggaagatcgcaaggagaaaaggcggaaaaacgagacctcctcgggctcccctcagaggtccccgggctcctcccaggcctgggccaccagatcccgcttatcggcgcaggccagtgcccatcaaacgcttcaatggagacgtctctccccgagctatatccagagcttccgagacggcagaccgggagctcctgagctccttcatggctcaccacagatgcggactatgagtatgg

SEQ ID NO: 350320 - DNA, 1197 bp, Homo Sapiens
  misc_feature (1045)..(1053): n is a, c, g, or t
  misc_feature (1092)..(1100): n is a, c, g, or t
  misc_feature (1134)..(1142): n is a, c, g, or t
attttccggatcgcccctgcctggatggtgcttcctgagtgacgtcaggagcagaggccggagctgtccatcagcaccaaaggccgcgggcgggctcagggcatggggccgcggttctggggcggcccgagccccggctcctgcgccttccccttcctcaggcccagcccgagttcccggacgccgcgggactggagtgccagccggtgttggacgtggagcggcgccgccaccgcgccgacaccattctctccggcccagcagcccccttcctcgcacgacggactttccctggaccccagtcagttggagcctctggcgccccgcaaccccggcccctcgggcctctgcacagcctctttcactcagaagctcaggtcgcctccagcccaggttaacttgggagggtgactcccttctattcccagcactatgccggggactgtggcaacactgcggttccagctgctgccccctgagccagatgatgccttctggggtgcaccttgtgaacagcccctggagcgcaggtaccaggcactgccggccctcgtctgcatcatgtgctgtttgtttggagtcgtctactgcttcttcggttaccgctgcttcaaggcagtgctcttcctcactgggttgctgtttggctcggtggtcatcttcctcctctgctaccgagagcgggtgctaaagacacagctgagtgctggggcgagcgcgggcatcgctctgggcatcgggctgctctgcgggctggtggccatgctagtgcgcagcgtgggcctcttcctggtggggctgctgctcggcctgctgctcgcaactgctgccctgctgggctccgaaccctataccagccaagcttccgtggggggtccactgggggctggttgctgtgggccggcctgttctggggcctggttcctttgccttggtccgcccacttcccaccctggccaccgcccctactcggggttttcttgctcccccctgcgtttcccacttccccgaattgcaacggccgcgggccttacagttgtcagtnnnnnnnnngctttttttggggcccccctttttccgtccaaaattttnnnnnnnnngaccattggtacccgcctccttcctatttttctnnnnnnnnnttgcttatccttacatccaataatcaccccaataaccgtggaagtccaaaaagaa

SEQ ID NO: 350321 - DNA, 1700 bp, Homo Sapiens
gcttttctcaggcttgcgcggctctaggccgaagcggcggatgacgcaaccgggccgcgccgcgagaaggtcacacgattctccaacatggcggcggcggccctgcggagtggctggtgccgctgtccacggagatgcctcggcagtggaatccaatttctttccagccacaacctaccccatgggtcgacctatcagatgcgccggccgggcggagagctgccactgtccaaatcatattcttctggaaacagaaaaggctttctgtccggcttgctagataatgtcaaacaagaattagccaaaaacaaagaaatgaaagaaagtataaacaaattccgtgacgaggccagaaggctagaagaatcagacgtgctccaggaggccagaaggaaatacaaaaccatcgagtcagaaaccgtgcggacgagcgaggtgctacggaagaagcttggggagctgacgggcaccgtgaaggagagccttcacgaagtcagtaaaagtgatctcggccggaaaatcaaggagggcgtggaggaagcagccaagacggccaagcagtcggccgagtcggtatccaaaggcggggagaagctgggcaggacagcggccttcagagccctctcccagggggtggagtccgtgaagaaggaaattgacgacagcgtcctgggacagaccgggccctaccggaggccccagcgactccggaagagaacggagtttgcgggagataagttcaaggaggagaaagtgtttgagccaaacgaggaggccctgggggtcgtgctgcacaaggactccaagtggtaccagcagtggaaggacttcaaggagaacaacgtggtgtttaaccggttcttcgagatgaagatgaagtatgacgaaagcgacaacgcgttcatccgggcatcccgggcccttacggacaaggtcaccgacttgctggggggcctgttctccaagacagagatgtcggaggtgctcacggagatcctccgggtggacccggcctttgacaaggaccggtttctgaaacagtgcgagaacgacatcatccccaatgtcctggaggccatgatttctggagagcttgacattctcaaagactggtgctatgaagctacttacagccagctggcccaccccatccagcaggccaaggcactgggtctccagttccattctcgcatcctagacattgacaacgtcgacctggccatgggcaagatgatggagcaggggccggtgctgatcatcaccttccaggcacagctggtgatggtggtcaggaaccccaaaaggcgaggtggtggagggtgacccggacaaggtgctgcggatgctgtacgtgtgggcgctctgccgagaccaggacgagctcaacccctacgcggcctggcgggctcctggacatctcggcctccagcaccgagcagattcttctgagtgtgggggccggacccaggaacccccggcctgggtcatcaggcacagagggcaccgcaacaccacctgcggcaactccagacctctgggaacaagactgcgggctctgcccccagctctgccaggacggctgcaagacagcttggccccggggaggggacaacgggcctggttgccggtggcgccgcaaactgggggacactccccccgcagggcccaacccctggcctggttggttctggccctggaag

SEQ ID NO: 350322 - DNA, 2913 bp, Homo Sapiens
gcacatctggttccaacttgcctgatgcttagctcatctgcaaatatgtgatcagtgccggtaatttgtaatgaatgaagcggtaggcaggttctaatttcttttaaccttttaattatgtacaggcaaaaatgcagcattccgcttttaactatctgcttaaaagagctaacgttcttattaaggctttgtggtttttagagttgcatctatgaacctggggagattatgtgctttcccaagcgtcccaccaccctctcagttttgtccctctgaaaataattttggatcaccttgaatttccttttggacgttatttgatgaacagaaataaattgataacaagagttatttttaaacagaactcctcttaccccccaaaacagataaacctcagtgtacaattttgaaagaagttttgccttgtaatgagtaataatttagaaagtagacagtggttgtgtttggctctcgttttattccttttacatttgttgcttctgggatttaaaaaattactaaattcataagatagttaggtattaaacacttcagaatatcaatgtaaaattggaaaataaggaactgggggcatttgtttaggccatgacttctacaagcagatttcttttcttttagtttagaagacaaaaaatttcaatacagatacttcttttagaagtaaatttttagattttattgtcagtagaaaaaagttaaactcctactaatttaaactaagacagtttaaaaaggaagcctgaaaaagactcatactacaaataatttaattgatggcatataagaatatgcagtttgaaaaagccaaactcttctctccacttagcttttgatccccactgtttgcttatttgtataagtcatactgtgtagaatttctattttctttttccccattaaaagaggaccaaacaattctttatacaaatggagtagcaactagttttgtagcactacatttaatgtaatgagatacctttgttcatttttttaaatttgaaatatactttacctgatccactttgattgtatactatattctttgttaattttaattttgtcctgttcctagactgctagaatctggcccctggcatcttaaagtgccaacatatgcctgcagggtttataaaaaatggcctggagtgacacattttattatacctaatattcactgcatcagtatcacatctagctcccttacttgtccacagataatgtaaacaaaggagggaaaaacttattaaattctccttcgctgctggcttgtgctggtttagtgcctgtgtccctggcagtgtccagtgtgttcacttccagttgaagtatccatgtgtttctgggcagcttttctgctcagtgtgatcctgagatggcttccccgccgccacccagagtgtggtccttggccgcctcctgctcctgctctgcaagcctgaaactggcttgtctggagccaggagttagtcctggggtgtgtgtgtgcctgcgcacccatgcgcatgcaagtgtgtttgccagctcaggagctgtctcctctctacctggctagtaagaggtgggacagtaatggtcctcctgctggccccagcaaggcccatgagtgactgccctgacgtattcactgtgcctctgggccacttcttcccctgtagatgtgggcttgttgccttcagccggcttccctgagggaggagaacactggattattggaaatgttttaatcactcttgccattacctacatctattagcatagatgatgaaaagctgttactggtgattatagatgagtatttccaggacaacattctaaaagtacaattatttcttattggggagattacaggtagtttggcaaagcattgaagtacaaaggtacattttcaattaaaaagcacacttctacaaaagatttggtttttaaattatggttacacatttcagtaactcatagctgctgtgcaaattggtagaccttataagaaggcacttgtttgtaagccagagaagaaactttaattgcatcctatcagattgttgaggtgggtgtgatagtcttcaggtgcagtgcgttcattcactaacgctcactgtcagtgcccatgtttgctagctgcctccatgtgactagtgagctgctggtgaaagtcgtgtgaaatcctgtacactgtgtatagaacaatgtaattttatgttaattgttattactttaaaacatatctaccatctgattggctggtaccgagagctgtgggtaaaatttgaaaattgtatttagaataagaaattttacattttaaaccctattgtcctttatgcattttcaatgaaatggaatgaaggctaatatgcttgctttatttacttttgtaatcttggattttgtagcttttaaaactagaaaccattgttctaacaaagcaggcaactttattctataaacacaactttattaagcagaatacactgtagatgcttttccccaacgtatctggctggcagtctttgtcgttgttcattctggggataaaggggaactaggctagcagttctaatgtgacattctttaagcatatcttaaaatagtatttaagtaaatggtctaatttctacataattattgcactgaacttttttgtttattaaggtgtttaaataagctcagctaattcaagacactgtagtcacttgtgcatcagtgtgcttgaatttagtagcttacagcattatttatgaaggaaaaaatacataaatatgaagtacctcatgttgaatgttattgtactgtatttttaatgtaacagtgcagatcttgttagacacatgaatgtgtataatcatgttaaatgcaaataaaactagttcatagatttgttttcctttaaaaaaa

SEQ ID NO: 350323 - DNA, 1350 bp, Homo Sapiens
  misc_feature (811)..(848): n is a, c, g, or t
tgattcggccggagctgccagcggggaggctgcagccgcgggttgttacagctgctggagcagcagcggcccccgctcccgggaaccgttcccgggccgttgatcttcggccccacacgaacagcagagaggggcagcaggatgaatgtgggcacagcgcacagcgaggtgaaccccaacacgcgggtgatgaacagccgtggcatctggctctcctacgtgctggccatcggtctcctccacatcgtgctgctgagcatcccgtttgtgagtgtccctgtcgtctggaccctcaccaacctcattcacaacatgggcatgtatatcttcctgcacacggtgaaggggacaccctttgagaccccggaccagggcaaggcgaggctgctaacccactgggagcagatggattatggggtccagttcacggcctctcggaagttcttgaccatcacacccatcgtgctgtacttcctcaccagcttctacactaagtacgaccagatccattttgtgctcaacaccgtgtccctgatgagcgtgcttatccccaagctgccccagctccacggagtccggatttttggaatcaataagtactgagagtgcagccccttcccctgcccagggtggcaggggaggggtagggtaaaaggcatgtgctgcaacactgaagacagaaagaagaagcctctggacactgccagagaatgggggttgagcctctggcctaatttcccccctcgcttcccccagtagccaacttggagtagcttgtagtggggttggggtaggccccctgggctctgannnnnnnnnnnnnnnnnnnnnnnnnnnnnnnnnnnnnngaatagagactccatggagttggtcatggaatgggctgggctcctgggctgaacatggaccacgcagttgcgacaggaggccaggggaaaaacccctgctcacttgtttgccctcaggcagccaaagcactttaacccctgcatagggagcagagggcggtacggcttctggattgtttcactgtgattcctaggttttttcgatgccacgcagtgtgtgcttttgtgtatggaagcaagtgtgggatgggtctttgccttttctggtagggagctgtctaatcccagtcccagggctttggcagcctctctgcaaacccacctggggtccttggttgggaatggggaagggtccagttgggggaaaaatggggtaaaaatggaaaaatggccttgggttccaaagggggaggggggccaagggcttgcttggccatccctggccctggtggggaaggttttggggaacctctttaaaggaaaaaccttaagtgggaagccc

SEQ ID NO: 350324 - DNA, 969 bp, Homo Sapiens
  misc_feature (83)..(84): n is a, c, g, or t
gtccaggggttaaaagtgctttgggttgccggagggcaaaccaaatgaggcaggggtttttccccctggcctcctgtcgcaanntgcgtggtcccatgttcagccccaggagcccagcccattccatgaccaactccatggagtctctattcaaaagcaaaaggaaaagatcaaaaaattcagaaaaggtcagagcccagggggcctaccccaaccccactacaagctactccaagttggctactgggggaagcgaggggggaaattaggccagaggctcaacccccatctctggcagtgtccagaggcttcttctttctgtcttcagtgttgcagcacatgccttttaccctacccctcccctgccaccctgggcaggggaaggggctgcactctcagtacttattgattccaaaaatccggactccgtggagctggggcagcttggggataagcacgctcatcagggacacggtgttgagcacaaaatggatctggtcgtacttagtgtagaagctggtgaggaagtacagcacgatgggtgtgatggtcaagaacttccgagaggccgtgaactggaccccataatccatctgctcccagtgggttagcagcctcgccttgccctggtccggggtctcaaagggtgtccccttcaccgtgagcaggaagatatacatgcccatgttgtgaatgaggttggtgagggtccagacgacagggacactcacaaacgggatgctcagcagcacgatgtggaggagaccgatggccagcacgtaggagagccagatgccacggctgttcatcacccgcgtgttggggttcacctcgctgtgcgctgtgcccacattcatcctgctgcccctctctgcgtgtggggccgaagatcaacggcccgggaacggttcccgggagcggggtcgcgaactgctccagcagctgcctcgttttgaaaagccacccagc

SEQ ID NO: 350325 - DNA, 1142 bp, Homo Sapiens
  misc_feature (973)..(973): n is a, c, g, or t
  misc_feature (989)..(989): n is a, c, g, or t
  misc_feature (1027)..(1027): n is a, c, g, or t
  misc_feature (1077)..(1077): n is a, c, g, or t
  misc_feature (1079)..(1079): n is a, c, g, or t
  misc_feature (1089)..(1089): n is a, c, g, or t
  misc_feature (1091)..(1091): n is a, c, g, or t
  misc_feature (1093)..(1093): n is a, c, g, or t
  misc_feature (1100)..(1100): n is a, c, g, or t
  misc_feature (1104)..(1104): n is a, c, g, or t
  misc_feature (1108)..(1108): n is a, c, g, or t
  misc_feature (1110)..(1110): n is a, c, g, or t
  misc_feature (1130)..(1130): n is a, c, g, or t
agcggggcggcgccccttgtggtccggaagggaagtgacgttgttgctgggaagatggcgaccgcggcgactatcccatcggtagccacggccacagcagcggctctcggcgaggtggaggatgaagggctcctggcgtcgctgttccgggaccgcttccccgaggcccagtggcgcgagcggcccgatgtgggccgctacctccgggagttgagcggctcggggctggagcggctgcggcgcgagcccgagcgcctggcggaggagcgggcgcagctgctgcagcagacgcgcgacttggccttcgctaactacaagaccttcatccgcggcgccgagtgcaccgagcgcatccaccgcctgtttggcgacgtggaggcgtcgctcggccgcctgctcgaccgtttgcccagcttccagcagagctgcaggaactttgtgaaggaagccgaggagatcagctccaaccgccggatgaatagcctgaccctaaaccggcacacagaaattttggaaatactggagattcctcagctcatggacacctgtgtccggaacagttattatgaagaggccctggagcttgcagcctacgtacgccgactggagaggaaatactcttccatccctgtcatccagggcatcgtgaacgaagtgcgccagtccatgcagctgatgctgagccagctgatccagcaactgaggaccaacatccagcttcctgcctgcctccgtgtcattggctacctgcggcgcatggacgtcttcactgaggctgagttgagggtgaagtttcttcaggcccgagatgcttggctccggtccatcctgactgccattcctaatgatgatccctatttccatattacaaaaaccatcgaggcctcccgtgtccatctctttgatatcatcacccagtaccgtgccatcttctcagacgaggaccactgctgccccctgccatgggtgagcnactgtgaatgagagtnccatcttcatggctgggtgctacagaagtctcacaatnctgcagtgctggagacgacctttaccgggcataggcggcactggactctntntgtgcagtcntntntttgtgnttcntcancnggtgggactgattccgggtnaatggtctgttt

SEQ ID NO: 350326 - DNA, 1063 bp, Homo Sapiens
  misc_feature (11)..(11): n is a, c, g, or t
  misc_feature (15)..(15): n is a, c, g, or t
  misc_feature (43)..(43): n is a, c, g, or t
  misc_feature (49)..(49): n is a, c, g, or t
  misc_feature (71)..(71): n is a, c, g, or t
  misc_feature (965)..(965): n is a, c, g, or t
  misc_feature (974)..(974): n is a, c, g, or t
  misc_feature (978)..(978): n is a, c, g, or t
  misc_feature (981)..(981): n is a, c, g, or t
  misc_feature (984)..(984): n is a, c, g, or t
  misc_feature (995)..(995): n is a, c, g, or t
  misc_feature (1002)..(1002): n is a, c, g, or t
  misc_feature (1022)..(1023): n is a, c, g, or t
  misc_feature (1025)..(1025): n is a, c, g, or t
  misc_feature (1027)..(1027): n is a, c, g, or t
  misc_feature (1040)..(1040): n is a, c, g, or t
  misc_feature (1045)..(1045): n is a, c, g, or t
ggcatctgaanaagncgccagtccatgcgctgatgtgaaaaantgatcnacaaatgagaccaacatccagntcctgcctgcctccgtgtcattggctactgcggcgcatggacgtcttcactgaggctgagttgagggtgaagtttcttcaggcccgagatgcttggctccggtccatcctgactgccattcctaatgatgatccctatttccatattacaaaaaccatcgaggcctcccgtgtccatctctttgatatcatcacccagtaccgtgccatcttctcagacgaggacccactgctgccccctgccatgggtgagcacactgtgaatgagagtgccatcttccatggctgggtgctacagaaggtctcacaattcctgtccaggttgctggagtactcgacctttaccggggcataggccggccacctggactctctctctgggccagtgcatgtactttgggctgtccttcagccgtggtggcgagctgatttccgggtgtcatgttggctcctgttttaccacgcgggtggccatcagcactttccagaaagcaattcaggaaacagtggagaaattccaggaagaaatgaactcctacatgctcatctcggctccagccatcctgggcaccagtaacatgcctgctgctgtgccagccacccagccggggacgctgcagccacccatggtgctcctagatttcccacccctcgcctgctttctcaacaatattctggttgccttcaatgatctgcgcctctgctgccctgtggccctggcgcaggatgtgactggggccttggaagatgcccttgccaaggtaactaaaataatcatggccttctcatcgcgctgaagaggctgctctgtcagcagcggggagcaagagctctttgtcacagctctgcaactgtcttcctggaagaccattgttccgtatttaaatcgctgtcnccaaggcgnttgnccnccnggtcagatagnacagacnttaggtaagagaacaaaaanncngnaaactgccttacngatgngtaattcacatactaaat

SEQ ID NO: 350327 - DNA, 3067 bp, Homo Sapiens
  misc_feature (2089)..(2089): n is a, c, g, or t
  misc_feature (2479)..(2479): n is a, c, g, or t
  misc_feature (2489)..(2489): n is a, c, g, or t
  misc_feature (2871)..(2871): n is a, c, g, or t
atttgaagacttgtggcatttgttaagaatccttaatatattttaccaaatttttagtaactattatgaaatacaatggtgttccaaaagaagaaagcactaaaaactcaactagcaggaagcggttttgcttccattgagccacgtcggtggtgtcatcctacatgtagcataatagagtctctcagcctttgcttactggtgtttccgacagtattaacccagtgcgtggcatgtctttgaagcaaagcctgtcccgctagcctgtgtgttcacacaccaaaggagaagggtaggcgaggggttcggagtgtattttcaggttggaatgtgaaggttcctggcttcccatgtgacttgtaagtgtgccttgttttttatttaaactatgtctgtagttgacaaaagtggcttcatcacaaatttttttaaacgtttctactttggggttccatttaggagctttctagaaagttgaggatgtttgaagcttcccttctgtgttccagtttgatatgggttaggttaaggaaaaggagatggtctcgatgtcatggatttaaagtcagcatttggattacaacacacattattgtgtgtcgagaggcagcattggaaagagcctgattttctaaaatatgcatcaagtgcataaattacaaatcagagctgagtggggaggtgcttcagcagcagcgggatcaatacgatttccactgggaagagacaggaattctacctacacataggaaggccaaggttgatccacttaaccttgttattgtaattttaaagctggtatcggtagctgggaagctttatgtgtgtgtatgtcagctcagcatcttttaatcgtgtctgattttactctcgttacttctcgctgttggaagcatctctgggtttcttgtggcgtctggtgtggaatggccttcctctctaggtgcctgaggtgtccgctgacgggtggcctctcacccccctctagagaaacctgacatttacaatggattgtatttgtccggcaaaaaaggcggattcattcatagagcagaaagaacctgttggcgtaaggtcttccactagttagatggtttcttttggggaaatgtttatatttggtaacttctagaaagccagaaaatggactctgatttcatagcattttgataaaatgccacaaaataagggctatagagagatttttacaagtcagattttttgttccccaaatcttttaaatgaagccagtgactcccagttctcaacacatggccccagtcaagacagaacaccatggaaaaaaccctgtaagtattatggcactctccgaatcctcctgaaggcatttcctctacagacatagtgttacaggaagtgaaatgcaaatgtgcaattttttttaaaggagcttttaaacaaagtaataataattggtgttgagaacatcagttgccttattctaagatttcataaggctgagtttgcacgcttggacttcagttctgctagcatgtaaagagtggtggactttaaaaccgtaagaggtatcattacaagtcacctggaacagactcaaagaacaggttctttgggcaacagacaaagaagaatcaagttctgtgctgtcccgtgagtgtgtctgagtaccattcactggagttgctgcttaggtctgggacgtgtgtgtgactcttaacaattgctgtctgaaaatgagagagaagacttcggaagcacattgtgttcataatgtactccacaatggccagtccaattgctatctatttttttatccagaggcttaattaaatgatgtggtaaaatgatgtttgagcattaagacaatgtaattctttatttctgggtggaaagatataccggattaaatttatctgtttaaaaaaatgacaaaagttatcaccaaaaccccctttcccatcttgcactgtttgttttggattgggtttgggggaaagagatgtttttcttagttgtctactttgtttgaacacttttgttgtggttcaagtgctgttttgtgtgttgggaccaaacagttgtcaataaactttacaagcgagcatcnttgacgcagtttaccattcgggattgatttcattaatatatctcactcaaggcagtcccccaaatcgtcagccgctagtagaccatatttcaatcttaaatctcccttttgattcatcccccctcggaccccttgagtggggaggtgtccccaacggccccctttcctcatattgaaacggttccggcgggaccgaactcattcttattatttagacgcgcacgaacgagtggcgagtccccactaagtgtctgtgtttctttcctatacgaaagagcgacgactccgccctctaggagcggtcgtcggctgtcccacctctccgaacgccgagaatgatatcgtaaagcacttattccgccgccactccgctactaaataacatgaaantcaacagaangggttgtttttccgaggatcatgatatcctgacgtctccccctaatctcctcatactacaatatacaaaaacagcgcacttctcctttacgggtcaaaagtatagactaacagggttcctcagcagtcctcagggagaggcagtgatccttctcttctctgataacaaccagaaggaagaaccaatctcacccagacgatcgaggggtacagacgcactctattcctccgagcaaaggaggcggcgtcgtactctcttctctcgcggggggacgcgacactccgtcgcgtccccgaggtagctacggtagatactattcattacgcagacgaccgctgacagccccccgtgtagtaataacaccaaatatagatgatcaaanaccccggaccgccctccctgcttgaacgacaacctcttattactaaaagaagcacacactttgtcttgtgggtctgcaatatcatattctagtagtataataataatctatacttacagaaacgtaagcgataatgtgtgtgtcacacaccatctcattaatcattctacgcgggtgcggtggaagacctcaacaa

SEQ ID NO: 350328 - DNA, 662 bp, Homo Sapiens
agcggctggtggatctctttggagatgcctttgcagcttctcctggggaggcccctgcagcatccgaaggggccgccgcaccagctaccccaacccctgtagcagcagcacttgatgcatgttcaggaaatgacccctttgccccgtctgaaggtagtgcagaggctgcacctgagctggacctctttgcaatgaagccacctgagaccagtgttcctgtagttacccctacagctagcacagcccctccggttcccgcaactgctccttctcctgctcctgccgttgcagctgctgctgctgccactactgctgccaccgccgctgccaccaccactaccaccacctccgctgccaccgccaccactgctcctcctgctctagatatctttggtgatttatttgagtccactcctgaagttgctgcagcgcctaagccagatgctgctcctagcatagacctgtttagtacagatgctttctcctctccaccacaaggggcctctcctgtgcctgagagttctctcactgctgacctcttatctgtggatgcatttgcagcaccatctcctgcaaccactgcctcgccagcaaaggtggattcttcaggtgtcatagacctttatggggatgcatttggaagtaaggcttctggaaccaaa

SEQ ID NO: 350329 - DNA, 584 bp, Homo Sapiens
tccctcgtctagaggatcccaatgcagcggactcggcagcagtagtggcaacagcagcagctgcaacggcaggagcaggagaaggagcagttgcgggaaccggaggggctgtgctagctgtaggggtaactacaggaacactggtctcaggtggcttcattgcaaagaggtccagctcaggtgcagcctctgcactaccttcagacggggcaaaggggtcatttcctgaacatgcatcaagtgctgctgctacaggggttggggtagctggtgcggcggccccttcggatgctgcaggggcctccccaggagaagctgcaaaggcatctccaaagagatccacttcagcagtgacagcagtaacagttgtagtagtggaggcagaagctgaggcagttgcaatttcagcagttgtagtaggaggggtaggttctggtgcaaatggatctgaaatctgtgcttcagagggaacagaggaaagtgcagccaaagaatcctctcccaaaaggtctccccatgcagtggctcctccagcaggtggtggtggtgctggtgccgagtccgctgcattgggatcctctaga

SEQ ID NO: 350330 - DNA, 847 bp, Homo Sapiens
  misc_feature (15)..(15): n is a, c, g, or t
  misc_feature (21)..(21): n is a, c, g, or t
ggattttaccaaaangaaatncctaggggccataaggttggggggaagaccccaattaatggaaatgggcctaagggaccaatgcctaattaaatccgttaaccagtgattttgtccaccataattaccatgaccttatagcctaaaagagcaatatttaatccagtaagatttagagatgggtgtacttggaatccctttgaaagcagcgtgtttagttttcaagcaaatgctaatgttccttaatccctaatagtatattagacttcgttgtgttgaatatatcaaatgaacgaactatgaaccagagctttaaaatagtgatttgtaagactttgttacaatggtacttaaaaaattgctttgtataatttacacactgtaaaattcacccattgtacatgtacaattaattgtttttagtaaacttaagagttgtgcagtccaattttagaacatgtccatcagcccccaaaatttactcctgctgctctgcggttaatttgctcctgcctccagccccacgcagccacactgatctgctttctgtacagatttaccctttctagaaatttcacagaggtagaatcatgcagttagtcttttatatctggcatctttcacttaggcatgtttttgaggttcatccatgttgcagcttatacctgcgtgtagttcctttagttgctgacttagtgttcactgtttgggatataccacattttgtttaatccattcaccagttgataggacattgggctgggcctacaattaggttttttaaaatgcggataataatgctatgaacattcataaatggctttgtgtggacatgttttcatctcag

SEQ ID NO: 350331 - DNA, 1063 bp, Homo Sapiens
ccatcaatctgctctgacaaccctgaggtttgctgacttcgcattgacctcgggctaactcttgcttcttgagttgatcttcgaaaaacagtaactgctccgatttctagctgctgctggcgcatctgagcaatcccgcttcctttctgcctctatcaatctctgatgctccaattttttgagaatttcagctttatatttgtttttgctttgcaaatattcttggtattctacgttatatttctttaaaagctcgtttttcaattcatctgtccttgggaatgcaatctccttcagtttcttcataatatcctgcttttcaggtactgcacattgctggtaatctcgatggttaggaagcttttctacaaataaggttataaatttattataaagaacaaaggcattttccaaatttccttcttccaaatacacagacgccatcctctccatctctactccagacctaaagtaacgtcgtggagtgatgtcttcactgatggtgatattacaaccaagcttgcttagggcacggactcgctcttctgggcttagggaaacatctgtatggtcaggcatagcagctaactttttcagagaattcacagtaaaaggctgatccatgttgtcttatctgtgaaatgaggatgttcactgtttcttctcaatcacttcattagcaacccttggtgtccgcagcccgtgtgggacggcgactgcgacggctgcccccgtggctgccgtgtggccttggcatccgtccggctgctgcaacccgggccgcggtggcttttgctggaaggcgttgcagcggggtgataccggcacccggcgacgaggcgtccgctcgtttgcctcggccgtgcctcctcccccttctcctctgccgacagatggagctttgctggttccagtcgcgcgggctccgtgcgtcgttctcctcctcgctgtcggacaccccagcgcaggggacgaacagcgtcctcgcaagcccacgcgcaggccggccgaccccgaacctgcagcaaccgtccctgctgccgctgctgcaggaaaataaatt

SEQ ID NO: 350332 - DNA, 503 bp, Homo Sapiens
  misc_feature (67)..(67): n is a, c, g, or t
  misc_feature (375)..(375): n is a, c, g, or t
  misc_feature (484)..(484): n is a, c, g, or t
tttcacaataagtataatttattataaagacaaagcatttccaaattccttcttccaaatacacagncgcatcctctccatctctactccagacctaaagtaacgtcgtggatgatgtcttcactgatggtgatattacaaccaagcttgcttagggcacggactcgctcttctgggcttagggaaacatctgtatggtcaggcatagcagctaactttttcagagaattcacagtaaaaggctgatccatgttgtcttatctgtgaaatgaggatgttcactgtttcttctcaatcacttcattagcaacccttggtgtccgcagcccgtgtgggacggcgactgcgacggctgcccccgtggctgccgtgtgnccttggcatccgtccggctgctgcaacccgggccgcggtggcttttgctggaaggcgttgcagcggggtgccaccggcacccggcgacgaggcgtccgctcgtttgccncggccgtgcctcctcccac

SEQ ID NO: 350333 - DNA, 988 bp, Homo Sapiens
gcggatggtcaggtggcggaactgctgctccggcggctggaggcgtctgatggcggcctggacagcgccgagttggcggctgagctgggcatggagcaccaagcggtggtgggcgccgtgaagagccttcaggcgctgggcgaggtcatcgaggctgaacttcggtccaccaagcactgggagcttactgcggagggcgaggagattgcccgggagggcagccatgaggcccgtgtgtttcgaagcattcccccagagggcctggcccagagcgagcttatgcgactgcccagtggcaaagtgggcttcagcaaggccatgtccaacaagtggattcgggtggacaagagtgcggctgacgggccccgggtgttccgagtggtggacagcatggaggatgaggtgcagcggcggctccagctggtccgggggggacaggctgagaagctgggggagaaggagaggagcgagctgaggaagaggaagctgttggctgaagtgactctgaagacctactgggtgagcaaaggcagtgcctttagtaccagcatctccaagcaagagacagagctgagcccagagatgatctccagtggctcttggcgggaccggcccttcaagccctacaacttcttggcccacggtgtcctccccgacagcggccaccttcacccgctgctcaaggtccgctcccagttccgacagatcttcctggagatggggttcaccgagatgccgactgataacttcattgagagctccttctggaactttgacgccctcttccagccccagcagcacccagcccgtgaccagcacgacaccttcttccttcgagatccagcggaggccctggcagcttcccaatgggacttatgttcaggcgggttcaagcgggacccaattttcaggggcgggttaagggttcaacagggggttacaagtattaattgggaaggtgggaagagggcccggaaaaacttatttg

SEQ ID NO: 350334 - DNA, 1717 bp, Homo Sapiens
  misc_feature (658)..(658): n is a, c, g, or t
  misc_feature (737)..(737): n is a, c, g, or t
  misc_feature (1683)..(1683): n is a, c, g, or t
ggtaccggtccggaattcccgggatggctgaacttcggtccaccaagcactgggagcttactgcggagggcgaggagattgcccgggagggcagccatgaggcccgtgtgtttcgaagcattcccccagagggcctggcccagagcgagcttatgcgactgcccagtggcaaagtgggcttcagcaaggccatgtccaacaagtggattcgggtggacaagagtgcggctgacgggccccgggtgttccgagtggtggacagcatggaggatgaggtgcagcggcggctccagctggtccgggggggacaggctgagaagctgggggagaaggagaggagcgagctgaggaagaggaagctgttggctgaagtgactctgaagacctactgggtgagcaaaggcagtgcctttagtaccagcatctccaagcaagagacagagctgagcccagagatgatctccagtggctcttggcgggaccggcccttcaagccctacaacttcttggcccacggtgtcctccccgacagcggccaccttcacccgctgctcaaggtccgctcccagttccgacagatcttcctggagatggggttcaccgagatgccgactgataacttcattgagagctccttctggaactttgacgccctctntcagccccagcagcacccagcccgtgaccagcacgacaccttcttccttcgagatccagcggaagccctgcagctcccnaatggactatgtccagcgggtcaagcggaaccactctcagggcggctacggctcacaggggtacaagtataactggaagctggacgaggcccggaaaaacctactgcgaacccacaccacatcagcccagcgcccgtgcgctctaccgccttgcccagaagaagcccttcactccggtcaagtacttctccatcgaccgcgtattccggaatgagaccctggacgccacgcacctggctgagttccaccagatcgagggcgtggtggcggatcatggtctcaccttgggccacctcatgggcgttctgcgggagttcttcaccaagctgggtatcacgcaactccgcttcaagccagcctacaacccatacacagagcccagcatggaggtgttcagctaccaccaaggcctgaagaagtgggtggaggtcggaaactcgggggtcttccgtccagagatgctgctgcccatggggcttcccgagaacgtgtcggtcattgcctggggcctctccctggagcgcccaacgatgatcaaatatggcatcaacaatatccgggagctggtgggccacaaggtgaacctgcagatggtgtatgacagtcccctgtgccgcctggatgccgagccgaggccccctcccacacaggaggctgcgtgacatgggccactctaggacaggtcatcctccccgagtccctgctgctgcgctcctttgcatccctggccagtgaccttgtatttatgaggcctctgtgaggccagcccccaccttcctctttcccacctgtcccaggaccagaatcccagggacagaggactgggtagcaggttccttctgttgtcctgtgtggtgtgtctactgtgagggtgggccctgaggagacctgtgggccacctattgtctaataaagtgggcagttgcccccatctggtggctttccnccttaacgcgcctctaaactataatccccttgtc

SEQ ID NO: 350335 - DNA, 793 bp, Homo Sapiens
acaggctaagtacgaggccgtggttaactcggcacgagggtcatggcggatggtcaggtggcggaactgctgctccggcggctggaggcgtctgatggcggcctggacagcgccgagtgggctggctgagctgggcatggagcaccaggcggtggtgggcgccgtgaagagccttcaggcgctgggcgaggtcatcgaggctgaacttcggtccaccaagcaagagacagagctgagcccagagatgatctccagtggctcttggcgggaccggcccttcaagccctacaacttcttggcccacggtgtcctccccgacagcggccaccttcacccgctgctcaaggtccgctcccagttccgacagatcttcctggagatggggttcaccgagatgccgactgataacttcattgagagctccttctggaactttgacgccctcttccagccccagcagcacccagcccgtgaccagcacgacaccttcttccttcgagatccagcggaggccctgcagctcccaatggactatgtccagcgggtcaagcggacccactctcagggcggctacggctcacaggggtacaagtataaactggaagctggacgaggcccggaaaaacttactgcgaacccacaccacatcagccagcgcccgtgcagctctaccgccttgcccagaagaagccttcactccggtcagtacttctccatcgaaccgtatccggatgagacctggagcaagcactggtgggtcacgatgaggtgtgggggtcatgctcctggtcaa

SEQ ID NO: 350336 - DNA, 1171 bp, Homo Sapiens
ggcctgggtggcgaattcggcacgagggcggatggtcaggtggcggaactgctgctccggcggctggaggcgtctgatggcggcctggacagcgccgagttggcggctgagctgggcatggagcaccaggcggtggtgggcgccgtgaagagccttcaggcgctgggcgaggtcatcgaggctgaacttcggtccaccaagcactgggagcttactgcggagggcgaggagattgcccgggagggcagccatgaggcccgtgtgtttcgaagcattcccccagagggcctggcccagagcgagcttatgcgactgcccagtggcaaagtgggcttcagcaaggccatgtccaacaagtggattcgggtggacaagagtgcggctgacgggccccgggtgttccgagtggtggacagcatggaggatgaggtgcagcggcggctccagctggtccgggggggacaggctgagaagctgggggagaaggagaggagcgagctgaggaagaggaagctgttggctgaagtgactctgaagacctactgggtgagcaaaggcagtgcctttagtaccagcatctccaagcaagagacagagctgagcccagagatgatctccagtggctcttggcgggaccggcccttcaagccctacaacttcttggcccacggtgtcctccccgacagcggccaccttcacccgctgctcaaggtccgctcccagttccgacagatcttcctggagatgggggttcacccgagatgccgactgataacttcattgagagctccttctggaactttgacgccctcttccagccccagcagcacccagcccggtgaccagcacgacaccttcttcccttccaagatccaagcggaaggccctgcaagcctcccaattgggactatgtccagcggggtcaagcgggaaccacatctcaagtgacggctacggttccacagcgggtaacaagtaataacttggaagcttggaacgaagggcccgggaaaaaaccgtactggcgaaagccagaacacatcaagccagcgcccgttgcggatctaacggcctatgcccaggaagaagcccttcactcccggtcaagtaacttcttcgatcgaacgggtattcggaatgggaccctgaggcaaggacttgcgtgagtcac

SEQ ID NO: 350337 - DNA, 958 bp, Homo Sapiens
ggcctgggtggcgaattcggcacgaggcaagagtgcggctgacgggccccgggtgttccgagtggtggacagcatggaggatgaggtgcagcggcggctccagctggtccgggggggacaggctgagaagctgggggagaaggagaggagcgagctgaggaagaggaagctgttggctgaagtgactctgaagacctactgggtgagcaaaggcagtgcctttagtaccagcatctccaagcaagagacagagctgagcccagagatgatctccagtggctcttggcgggaccggcccttcaagccctacaacttcttggcccacggtgtcctccccgacagcggccaccttcacccgctgctcaaggtccgctcccagttccgacagatcttcctggagatggggttcaccgagatgccgactgataacttcattgagagctccttctggaactttgacgccctcttccttcgagatccagcggaggccctgcagctcccaatggactatgtccagcgggtcaagcggacccactctcagggcggctacggctcacaggggtacaagtataactggaagctggacgaggcccggaaaaacctactgcgaacccacaccacatcagccagcgcccgtgcgctctaccgccttgcccagaagaagcccttcactccggtcaagtacttctccatcgaccgcgtattccggaatgagaccctggacgccacgcacctggctgagttcccccagatcgagggcgtggtggcggatcatggtctcaccctggggcaacctcatgggcggtctgcgggagttcttcaccaagctgggtatcacgcaactccgccttcaagccaggcctacaacccatacacagagcccaagcatgggagtgttcagcctaccaccaagggtcggggcctgaaaaaagggggtgggaggtcggaaaactcgggg

SEQ ID NO: 350338 - DNA, 995 bp, Homo Sapiens
aggtcacggggcggggccgaggcggaagcgcccgcagcccggtaccggctcctcctgggctccctctagcgccttccccccggcccgactccgctggtcagcgccaagtgacttacgcccccgaccctgagcccggaccgctaggcgaggaggatcagatctccgctcgagaatctgaaggtgccctggtcctggaggagttccgtcccagcccgcggtctcccggtactgtcgggccccggccctctggagcttcaggaggcggccgtcagggtcggggagtatttgggtccggggtctcagggaagggcggcgcctgggtctgcggtatcggaaagagcctgctggagccaagtagccctccctctcttgggacagacccctcggtcccatgtccatgggggcaccgcggtccctcctcctggccctggctgctggcctggccgttgcccgtccgcccaacatcgtgctgatctttgccgacgacctcggctatggggacctgggctgctatgggcaccccagctctaccactcccaacctggaccagctggcggcgggagggctgcggttcacagacttctacgtgcctgtgtctctgtgcacaccctctagggccgccctcctgaccggccggctcccggttcggatgggcatgtaccctggcgtcctggtgcccagctcccgggggggcctgcccctggaggaggtgaccgtggccgaagtcctggctgcccgaggctacctcacaggaatggccggcaagtggcaccttggcggtggggcctgagggggccttcctgcccccccatcagggcttccatcgatttctaggcatcccgtactcccacgaacagggcccctgccagaacctgacctgcttcccgccggccactccttgacgacggaggctgggaccagggcctggtcccaatcccactgtatggcaacctgtccgtggaggcgcagccccctggctgcccggactagaggcc

SEQ ID NO: 350339 - DNA, 1051 bp, Homo Sapiens
  misc_feature (438)..(438): n is a, c, g, or t
ctgcagtgaaaagaccagcgtctcttcaagcagccccaggtcccctatggctgtcatcagggtccccacagctgcatccagctccatcagggagtccccaaatggcccgcggcctgaacgctctgcaaagctctgcccactgaactgagggtagtgggtctggtgagaggcataatacaggaagaaggggcgatcctggcgctgggcgtcaggccatgaggtcatgggcgaaacccatgtagcgggcctctagtccggccagccaggggagctgcgcctccacggacaggttggcccaacagtgggatggggaccaggccctggtcacagccaccgttcgcaaggagtggccggcaggaagcaggtcaggttctggcaggggccctggtcatgggagtacgggatgcctagaaatcgatggaagccctgatggggggngcaggaaggccccctcaggccccaccccaaggtgccacttgccggccattcctgtgaggtagcctcgggcagccaggacttcggccacggtcacctcctccaggggcaggcccccccgggagctgggcaccaggacgccagggtacatgcccatccgaaccgggagccggccggtcaggagggcggccctagagggtgtgcacagagacacaggcacgttagaagtctgtgaaccgcagcccccccgccgccagctggtccaggttgggagtggtagagctggggtgcccatagcagcccaggtccccatagccggaggtcgtcggcaaaagatcagcacgatgttggggcggacgggcaacggccaggccagcagccagggccaggaggagggaccagcggtgcccccatggacatgggaccgaggggtcgggagaccgcgggctgggacggaactcctccaggaccagggcaccttcagattctcgagcggagatctgatcctcctcgcctagcggtccgggctcagggtcgggggcgtaagtcacttggcgctgaccagcggagtcggccggggggaaggcgctagagggagcccaggaggagccggtac

SEQ ID NO: 350340 - DNA, 932 bp, Homo Sapiens
aaggatcacccctgggaggtgcgggctcgtgctgggcacctccgggcaagctttgtgacttagaggtgtggggccactggtcaccctcggtggctcagaggctgtggctccatggctcatgagcgcctcctgtgtcccagacctgagaccatgcgtatgtcccgaggcggctgctccggtctcttgcggtgtggaaagggaacgacctacgagggcggtgtccgagagcctgccttggccttctggccaggtcatatcgctcccggcgtgacccacgagctggccagctccctggacctgctgcctaccctggcagccctggctggggccccactgcccaatgtcaccttggatggctttgacctcagccccctgctgctgggcacaggcaagagccctcggcagtctctcttcttctacccgtcctacccagacgaggtccgtggggtttttgctgtgcggactggaaagtacaaggctcacttcttcacccagggctctgcccacagtgataccactgcagaccctgcctgccacgcctccagctctctgactgctcatgagcccccgctgctctatgacctgtccaaggaccctggtgagaactacaacctgctggggggtgtggccggggccaccccagaggtgctgcaagccctgaaacagcttcagctgctcaaggcccagttagacgcagctgtgaccttcggccccagccaggtggcccggggcgaggaccccgccctgcagatctgctgtcatcctggctgcaccccccgcccagcttgctgccattgcccagatccccatgcctgagggcccctcggctggcctgggcatgtgatggctcctcactgggagcctgtgggggaggctcaggtgtctggagggggtttgtgcctgataacgtaataacaccagtggagacttgc

SEQ ID NO: 350341 - DNA, 1080 bp, Homo Sapiens
aagggctggtaccggtccggaatttcgggatatcgtcgacccacgcgtcgaggtcacggggcggggccgaggcggaagcgcccgcagcccggtaccggctcctcctgggctccctctagcgccttccccccggcccgactccgctggtcagcgccaagtgacttacgcccccgaccctgagcccggaccgctaggcgaggaggatcagatctccgctcgagaatctgaaggtgccctggtcctggaggagttccgtcccagcccgcggtctcccgggccgccctcctgaccggccggctcccggttcggatgggcatgtaccctggcgtcctggtgcccagctcccgggggggcctgcccctggaggaggtgaccgtggccgaagtcctggctgcccgaggctacctcacaggaatggccggcaagtggcaccttggggtggggcctgagggggccttcctgcccccccatcagggcttccatcgatttctaggcatcccgtactcccacgaccagggcccctgccagaacctgacctgcttcccgccggccactccttgcgacggtggctgtgaccagggcctggtccccatcccactgttggccaacctgtccgtggaggcgcagcccccctggctgcccggactagaggcccgctacatggctttcgcccatgacctcatggccgacgcccagcgccaggatcgccccttcttcctgtactatgcctctcaccaaacccactaccctcagttcagtgggcagagctttgcagagcgttcaggccgcgggccatttggggactccctgatggagctggatgcagctgtggggaccctgatgacagccataggggacctggggctgcttgaagagacgctggtcatcttcactgcagacaatggacctgagaccatgcgtatgtcccgaggcggctgctcccggtctcttgcggtgtggaaaggggaacgacctcacgagggccggtgtccgagagcctgccttgggccttctggccaggtcatatcgctcccggcgtgacccacgagctgccagctccccggaccacatgaagagggc

SEQ ID NO: 350342 - DNA, 420 bp, Homo Sapiens
ggtacgagcgcccaagtactgcacatacctggagctgccagccctggtgggacggccctggacgtgcaccgcttcttgcccacccaggaacctgagaggtggcgccacttgtgatgccactcagtgcaggaggcactgaggcacagactctcaggcactgcccacactcaccccaggggaaggccaggacaggggccaaggatctgggatcaggggtcaccggccctaccttgcctgtgcccagcagcagggggctgaggtcaaagccatccaaggtgacactgggcagtggggccccagccagggctgccaggctaggcagcaggtccagggagctggccagctcgtgggtcacgcctgggggcaggaggctggtcagtcactcagttcgccatcaacgttggggtggtggggccaggc

SEQ ID NO: 350343 - DNA, 365 bp, Homo Sapiens
  misc_feature (315)..(323): n is a, c, g, or t
ctgagtttgaatgcctttagaccagtacttctcaacggggacaatcctgcctctctcctccccacccctaggacatttggcaatgtctagagacatttttggttgagacaactgtgggtgaaggggtgctactggcatctagtgggtagaggctagggatactgctataataaatacctataaagaacaggataggctggacatggtgggtcacgccagtgatcccaaaactttgggagcgcgaggccagcggatcacctgaggtcgggagttcgagatcagcctgaccaacatggagaaacctggtctctactnnnnnnnnntacgaaattagctggcgtggtgtgcatgcctctaatcccagc

SEQ ID NO: 350344 - DNA, 721 bp, Homo Sapiens
acggtgacagtaccccgggtggggcgagggccagtcatggcggagtcctggtctgggcaggccttgcaggctctgccggccacggtgctgggcgcgctgggcagcgagttcttgcgggagtgggaggcgcaggacatgcgcgtgaccctcttcaagctgctgctgctgtggttggtgttaagtctcctgggcatccagctggcgtgggggttctacgggaatacagtgaccgggttgtatcaccgtccaggtctgggtggtcagaatggatccacgcctgatggctccacgcatttcccttcgtgggaaatggcagcaaacgaacctctcaaaacccacagagaataagggaaggcagcagagggtctccaagggcatcactgggtctgctggcttctacactgggttctgctactccccagacctcagggacaactgccgggggttcagggttggtagcagggagtacccagtgcctacagggctgggcctcttctgcctcttaagcctgctccctcacccaggcactgggcaagtgaagagtttgcctgtactcttatctgggtgccttaaggagagagattgtgttcttcctctctcaggggtgataactcaggaagcctctgggttgggaagaccatcagttcttttgtcttaggtttcttttcctgtccctcttccatccccaagatgtgaccccataaaaatttttcctgagttg

SEQ ID NO: 350345 - DNA, 1065 bp, Homo Sapiens
  misc_feature (19)..(19): n is a, c, g, or t
  misc_feature (26)..(26): n is a, c, g, or t
  misc_feature (29)..(29): n is a, c, g, or t
  misc_feature (46)..(47): n is a, c, g, or t
  misc_feature (51)..(51): n is a, c, g, or t
  misc_feature (53)..(53): n is a, c, g, or t
  misc_feature (55)..(55): n is a, c, g, or t
  misc_feature (58)..(58): n is a, c, g, or t
  misc_feature (63)..(63): n is a, c, g, or t
  misc_feature (70)..(70): n is a, c, g, or t
  misc_feature (75)..(75): n is a, c, g, or t
  misc_feature (90)..(194): n is a, c, g, or t
  misc_feature (722)..(723): n is a, c, g, or t
  misc_feature (997)..(997): n is a, c, g, or t
ccaggtcaacaaatccctnttcaccnctnatagctggatactggtnncccncncnccngctanttttgtnttttnatagagatgggtttnnnnnnnnnnnnnnnnnnnnnnnnnnnnnnnnnnnnnnnnnnnnnnnnnnnnnnnnnnnnnnnnnnnnnnnnnnnnnnnnnnnnnnnnnnnnnnnnnnnnnnnnncaggaaaaatttttatggggtcacatcttggggatggaagagggacaggaaaagaaacctaagacaaaagaactgatggtcttcccaacccagaggcttcctgagttatcacccctgagagaggaagaacacaatctctctccttaaggcacccagataagagtacaggcaaactcttcacttgcccagtgcctgggtgagggagcaggcttaagaggcagaagaggcccagccctgtaggcactgggtactccctgctaccaaccctgaacccccggcagttgtccctgaggtctggggagtagcagaacccagtgtagaagccagcagacccagtgatgcccttggagaccctctgctgccttcccttattctctgtgggttttgagaggttcgtttgctgccatttcccacgaagggaaatgcgtggagccatcaggcgtggatccattctgaccacccagacctggcttagcttccgaggtcagatgcgttcagggtagtaaggccgtgaaccaatgttaagtnnttctgatgagcctcttgcaggatagtggggaacccaatggtacagtcgggagagggtgggggcgggggcggccagcccacggaggttcgtaggaagcctcacctggacggtgatacaacccggtcactgtattcccgtagaacccccacgccagctggatgcccaggagacttaacaccaaccacagcagcagcagcttgaagagggtcacgcgcatgtcctgcgcctcccactcccgcaagaactcgctgcccagcgcgcccagcaccgtggnccggcagagcctgcaaggcctgcccagaccaggactccgccatcctcgtgccgaattcgccacccagc

SEQ ID NO: 350346 - DNA, 543 bp, Homo Sapiens
actacgacagtcccagaacaggcgtactgggatagtccgcagggagttggaacgtaaatgcaaggtctgcagcttccgaaggccatagaagagctctgggtgcagagatgacagccattcttctgagcacattggaggctgcattcagtcgcggttgttagactcaacgcagtgagtctgtaaaaggctctaacatgtaggagcctttgaccagtttcctgttttctgtgtcccaggctttccaagtaaaattgaatccaccaggacgagttgttttttccttaggatatccctctggaaagcattggtttcattttctgtgattgctctgatccctaaatcagttttgaatataagttattaaatttctccacctctaactgctcagctggcttaatcaaagcttcagtctcctttccgcagccgttagttctcttggtcttaacttgttgatggcagatgggtggcttgttccagagaagagctcctggagcagcatgagtgcatttactgaaaagcttttccgagaaacggcacaagaat

SEQ ID NO: 350347 - DNA, 1683 bp, Homo Sapiens
  misc_feature (22)..(22): n is a, c, g, or t
  misc_feature (55)..(55): n is a, c, g, or t
  misc_feature (152)..(152): n is a, c, g, or t
aacccattgttcccgtaattanccgttgagtgaagatggcattgtctggttcagnaaaagtgttcctcggtagtaactgctatgcctgcagtagttgggatttctttgtctcccacatgggtaacttgatgagcttattctttttgtatatncagtggttggatctctataagttgtagccatgacagtgacagtggttgacaaattccagcagagctgaaatccatggactgcatctagaatatcctctccttgggtgtggtcaggactgtggcataggatggagtgttcccaccgaccttggaaactgcccagccaggaggccagagcacatattcgggcgctgcattcccacagattgccagagagaccaacggttgtgagggatctcagggagtttaagatcttggaatcaaggctgtttaacttgttgttatccatgaggagtattttaagattgggcatcgtttcaaacactgtcaagtcgatggctttgatttcatttccagtcaggtctagcttttctaaagtgccccaggtccactccatcccacatgtcaagttgctgattttgttccattgtaagaagagcgtgtgcagactgcttagccgtaggaaatgagcaaaattaatcttcgtcagctggttgtgctctaggtgaagctctctcagtttaattaatcctgcaaatccattgcgagccaaacttcgcaaacgatttgtgctcaaatccagaaactccagactacgacagtcccagaacaggcgtactgggatagtccgcagggagttggaacgtaaatgcaaggtctgcagcttccgaaggccatagaagagctctgggtgcagagatgacagctgattaaaagacaggtccaaattttgcaggttaatcagttgggtaaaagttgtgtttggcaagtaaaatattttgttggaacttaagattaattccttaagtttatatagtccttgaaaagcatcttcttttactgttgaaatttgattgtgatctaagtggagccaagtaagttgactgaagctggcaaattgatctctttcgagctctgtgatgtgattgtgcctcagggacaggcccagagagcccttgtctgtggcgtttggcactgagtggaagccctgagagtcgcagtagaagagcagcttctcgcagcggcatttgggtggacacgccatacccagggcaggcagcatttttaaaaccatactcattgcatatattgctgccagcataggggcccctaatggccacttgaaatgtaagcccattcttctgagcacattggaggctgcattcagtcgcggttgttagactcaacgcagtgagtctgtaaaaggctctaacatgtaggagcctttgaccagtttcctgttttctgtgtcccaggctttccaagtaaaattgaatccaccaggacgagttgttttttccttaggatatccctctggaaagcattggtttcattttctgtgattgctctgatccctaaatcagttttgaatataagttattaaatttctccacctctaactgctcagctggttaatcaaagcttcagtctcctttccgcagccgttagttctcttggtcttaacttgttgatggcagatgggtggcttgttgcagagaagagctcctggagcagcatgagtgcatttact

SEQ ID NO: 350348 - DNA, 2384 bp, Homo Sapiens
  misc_feature (1727)..(1727): n is a, c, g, or t
tgcgcacccacacacacgacccaactaactggctaggtagcgagcgctgggtgttcgaattcggcacgaggatgacacccctgaacctgtcgtcccgggcagagccggtgcgcgacatccgctgtgagttctgcggcgagttcttcgagaaccgcaagggcctgtcgagtcacgcgcgctcacacctgcggcagatgggtgtgaccgagtggtccgtcaatggttcgcccatcgacacactgcgagagatcctcaagaagaagtccaagccgtgcctcatcaagaaggagccaccggctggagacctggcccctgccctggctgaggacgggcctcccaccgtggcccctgggcccgtgcagtccccactgccgctgtcgcccctggctggccggccaggcaaaccaggtgcagggccggcccaggttcctcgtgagctcagcctgacgcccatcactggggccaagccctcagccactggctacctgggctcagtggcagccaagcggcccctgcaggaggaccgcctcctcccagcagaggtcaaggccaagacctacatccagactgaactgcccttcaaggcaaagacccttcatgagaagacctcccactcctccaccgaggcctgctgcgagctgtgtggcctttactttgaaaaccgcaaggccctggccagccacgcacgggcacacctgcggcagttcggcgtgaccgagtggtgcgtcaatggctcgcccatcgagacactgagcgagtggatcaaacaccggccccagaaggtgggcgcctaccgcagctacatccagggcggccgccccttcaccaagaagttccgcagtgccggccatggccgtgacagtgacaagcggccgtccctggggctggcacccgggggcctggccgtggtcggccgcagtgccggaggggagccagggcccgaggctggccgggcagccgacggtggtgagcggcctctggcagccagcccgccaggcaccgtgaaggctgaggagcaccagcggcagaacatcaacaaatttgaacgccgacaagcccgccctccagatgcctccgcagcccggggaggcgaggacaccaatgacctacagcagaagctggaggaggtgcggcaacccccaccccgagtccggccagtcccctccctggtgccccggcccccccagacatcacttgtcaagttcgtgggcaacatctacaccctcaaatgcaggttctgtgaggtggaattccagggccccctctccatccaggaagagtgggtgcggcacttacagcggcacatcctggagatgaacttctccaaagcggaccccccacctgaggagtcccaggccccgcaggcacagacagcggcggcagaggctccctaacacaaaagcattccagatcccctctcgtgccacctctgtctcctcttcttcctcctctgtgtcctcgtccctcttcctctttctttccgtttccaaaggagcaagccaaaacctcaaaccggcgccccttgggggccgggcacactacagccagggcgccgggagccagctagctgcccttcccccagcccgaggactctggggccacagggtgtcttccttcagcccatgcccacctggtccagcaggggcagcagccaggtctctgatggcagccggtctgttcacaggggaggacagcactcccccgtctagcagccaggcagggcgatntctgccatccgtggccatttgcaaagaccccaaagacccctgttctggttccctctctcctcccatgaatatcctctcacacacatgtacatgcgaacacacacaacacgcacctcgtgagacccgggacctgccccggacccccagttcctgggttgaacgaccacatcatgccacggtgcttgctcaggggaagccacgctccctctgtggggcctgctggggcctgggagccccccactgagcccacaatgccacggaaatccttgttggctgcccccgagaggggccttcccagctgggaagagctcagagctgacagctgcctcctgccatgtcaaggccccccaaagagcctcaggggctctggggccctggagggtggggttggggggtgggactctcctcccccactcctgctccctctcccttttcactgttgctttctatgtatagctccctagacctttcacttttttaaaaacgcgttttgtgtagagaataaggaacgtggatctttttattttgcaatcctgggccagctagaagccaggagctgattgaccttttaacttttttcagtggccacattttggttatcgatgtacctagaagtatgtaaattagattaaatttctcttctggaaacaccctggg

SEQ ID NO: 350349 - DNA, 1611 bp, Homo Sapiens
  misc_feature (44)..(52): n is a, c, g, or t
agcccctgtatgggataaaagtgcctcctttctcctcaggagannnnnnnnnttagagcctaaagttacaggttcgggggtgaggccactggcgtgctgggctcataatccctgcccctctcaaagcttttcgtggctgaccagttctgctaggaccgctggtttacactcagcagtggtcaggggcaggtgctactgagagcacagctagggatcctggtgtcccagcactcgggagtggaagctcatagccacagctacagccacagctcctcatcgctgagcgaagaacaagagctctcggggggaccccctcacatcacctcctcagccccagagctccggcagcgcctaacacatgttgacagtccccttgaggctccagccgggcctctgggccaggtgaaactgactctgtggtactacagtgaagaacgaaagctggtcagcattgttcatggttgccggtcccttcgacagaatggacgtgatcctcctgatccctatgtgtcactgttgctactgccagacaagaaccgaggcaccaagaggaggacctcacagaagaagaggaccctgagtcctgaatttaatgaacggtttgagtgggaactccccctggatgaggcccagagacgaaagctggatgtctctgtcaagtctaattcctccttcatgtcaagagagcgtgagctgctggggaaggtgcagctggacctagctgagacagacctttcccagggtgtagcccggtggtatgacctgatggacaacaaggacaagggcagctcctaggagctggcgagtcccagcctgactgctctgtcttcctgccttcgtctcgctccatcaccgcctcaatgtgatgagcctaaagctagggtccaagggcagagcctgtgcccttcagccctttcacctaacaggcccatattcgggcctttgcctgaccaaagagaagaaccgtatgttccctttactgcacggcctttatccttctgggcccctggggcggggacctgagctggctgtttcctgctttgcctgcacattgttctcccttcctcccaactcctcagggccttctgtatctgtgcctggccagtggcagcactagcagtggtattagcttatgccaaatacagctttggaaggatctttttttctttaactagatggtcaccttcttccctaccacacatgggtgggaaggtggacaggctaacctctcccagctgtgagccctcttagactactgcatgtagcaaatgttcagcagctcaggcccccatgtccagttctgtccccactgtcctcaaccctgtcctgaaaattctactgctttgatggctggggccagtctcttgtcactttggaaactgaggacgcgtggattctactcaagcctccaagtagtggcatatcagtcttggagctcctagctggtgatacggagagggctttggaggacttgggacagcagggccaatttttttgcccaagtgcctaggctgctaactcactgactagaacttaatctggtactttacagttttgcaccaactctgccaagccactggatcttacattaaacatcatactcaaaaaaaa

SEQ ID NO: 350350 - DNA, 2344 bp, Homo Sapiens
  misc_feature (2262)..(2262): n is a, c, g, or t
  misc_feature (2273)..(2273): n is a, c, g, or t
  misc_feature (2287)..(2287): n is a, c, g, or t
  misc_feature (2289)..(2289): n is a, c, g, or t
  misc_feature (2304)..(2304): n is a, c, g, or t
  misc_feature (2308)..(2308): n is a, c, g, or t
  misc_feature (2311)..(2311): n is a, c, g, or t
  misc_feature (2313)..(2313): n is a, c, g, or t
  misc_feature (2318)..(2318): n is a, c, g, or t
  misc_feature (2325)..(2325): n is a, c, g, or t
  misc_feature (2327)..(2327): n is a, c, g, or t
  misc_feature (2329)..(2329): n is a, c, g, or t
  misc_feature (2336)..(2336): n is a, c, g, or t
ggagcgaggcctgggtggcgaattcggcacgaggctagacatcaactggacagggatgaccaacctgctggatatcccaggacttagctcactctctgacaccatgatcatggactccattgctgccttcctcgtgttgcccaaccgattactggtgccccttgtgcctgaccttcaagatgtggctcagttgcgttcccctctgcccaggggcattattcgaattcacctgctggctgctcgagggctgagttccaaggacaaatatgtgaagggcctgattgagggcaagtcagacccatatgcacttgtgcgtttgggtacccagacattctgcagtcgtgtcattgatgaagaactcaacccacagtggggagagacttatgaggtgatggtacacgaggtcccagggcaggagattgaagtggaggtgttcgacaaggatccagataaagatgactttctgggcagaatgaagctggatgtagggaaggtgttacaggctagcgttctggatgattggttccctctacaaggtgggcaaggccaagttcacttgaggctagaatggctgtcacttttgtcagatgcagagaaactggagcaggttctacagtggaattggggagtctcctctcgaccagatcccccgtcagctgccatcttagttgtctacctggatcgggcccaggatcttcctctgaagaaggggaacaaggaacccaaccctatggtacaactgtcaattcaggatgtgactcaggagagcaaggctgtctacagtaccaactgcccagtgtgggaggaagcgttccggttcttcctacaagaccctcaaagccaggagctcgatgtgcaagtgaaggatgattccagggccctgactttaggagcactgacgctgcctctggcccgcctgctgactgccccagaactcatcctggaccagtggttccagctcagcagctctggtccaaactccagactctatatgaaactagtcatgaggatcctgtacttggattcatcagaaatatgcttccccacggtgcctggttgtcctggtgcttgggacgtggacagtgagaatccccagagaggcagcagtgtggatgccccacctcgaccctgtcacacgactcctgatagccagtttgggactgagcatgtgcttcggatccatgtattagaggcccaggacctgattgccaaagaccgtttcttggggggactggtgaagggcaagtcagacccctatgtcaaactaaagttggcaggacgaagcttccggagccatgttgttcgggaagatctcaatccccgctggaatgaggtttttgaggtgatcgtcacatcagttccaggccaagagctagaggttgaagtctttgacaaggacttggacaaggatgattttctgggcaggtgtaaagtgcgtctcaccacagtcttaaacagtggcttccttgatgagtggctgaccctggaggatgtcccatctggccgcctgcacttgcgcctggagcgtctcaccccccgtcccactgctgctgagttagaggaggtgctgcaggtgaatagtttgatccagactcagaagagtgcggagctggctgcggccctgctatccatctatatggagcgggcagaggacctcccgctgcgaaaaggcaccaagcacctcagcccttatgctactctcactgtgggagatagttctcataaaaccaagactatttcgcaaacttcagcccctgtctgggatgagagtgcctcctttctcatcaggaaaccacacactgagagcctagagttgcaggttcggggtgagggcactggcgtgctgggctcattatccctgcccctctcagagctcctcgtggctgaccagctctgcttggaccgctggtttacactcagcagtggtcaggggcaggtgctactgagagcacagctagggatcctggtgtcccagcactcgggagtggaagctcatagccacagctacagccacagctcctcatcgctgagtgaagaaccagagctctcggggggaccccctcacatcacctcctcagccccagagctccggcagcgcctaacacatgttgacagtccccttgaggctccagccgggcctctgggccaggtgaaactgactctgtggtactacagtgaagaacgaaagctggtcaagcattgttcatggttgccggtacccttcgacagaatggacgtgatcctcctgatccctatgttgtnaatgttgctantgcacaaaaaaacngnggcacaaaagggggnctcnaananaaganggcctcnantnttaattnatgaacgg

SEQ ID NO: 350351 - DNA, 1982 bp, Homo Sapiens
  misc_feature (1192)..(1192): n is a, c, g, or t
  misc_feature (1316)..(1316): n is a, c, g, or t
  misc_feature (1353)..(1391): n is a, c, g, or t
  misc_feature (1411)..(1411): n is a, c, g, or t
  misc_feature (1414)..(1416): n is a, c, g, or t
  misc_feature (1418)..(1418): n is a, c, g, or t
  misc_feature (1422)..(1422): n is a, c, g, or t
  misc_feature (1437)..(1437): n is a, c, g, or t
  misc_feature (1445)..(1445): n is a, c, g, or t
  misc_feature (1448)..(1449): n is a, c, g, or t
gttgacaaaagcaggctggtaccggtccggaattctacggatgattgaacagcgcgcgtgggtttcccgcagccctggcgcagacgcgtgggctccgtggcgatgcgggtttgatggtgacagtgcctacgtggggatgagtgacggaaacccagagctcctgtcaaccagccagacctacaacggccagagcgagaacaacgaagactatgagatccccccgataacacctcccaacctcccggagccatccctcctgcacctgggggaccacgaagccagctaccactcgctgtgccacggcctcacccccaacggtctgctccctgcctactcctatcaggccatggacctcccagccatcatggtgtccaacatgctagcacaggacagccacctgctgtcgggccagctgcccacgatccaggagatggtccactcggaagtggctgcctatgactcgggccggcccgggcccctgctgggtcgcccggcaatgctggccagccacatgagtgccctcagccagtcccagctcatctcgcagatgggcatccggagcagcatcgcccacagctccccatcaccgccggggagcaagtcagcgaccccctctccctccagctccactcaggaagaggagtcggaagtgcatttcaagatctcgggagaaaagagaccttcagccgacccaggaaaaaaggccaagaacccgaagaagaagaaaaagaaggaccccaatgagccgcagaagcctgtgtcggcctacgcactcttcttcagagacactcaggccgccatcaagggtcagaaccccagtgccacatttcggtgacgtgtccaaaatcgtggcctccatgtgggacagcctgggagaggaacagaagcaggacttcccgcacatctctgagttccccagcagctcgggatcctgctcacctggcccatccaaccccaccagcagcggggactgggacagcagctaccccagtggggagtgtgccatcagcacctgcagccggctccccagggacaaatcgctctacctcacctaatcccccctccctaccatcccctgaggctcgctggaaggcactgctcagagcctgaagggctgacagcagaaaagaggccctggccagaggcagggtagcccatcggagagagcagtgacacacccattgcccggggntgagtctcttcctcaacctcccaccagactctgcagaggcagcccactgcccaccaccagcccaaagaacctgcaggaaccttccgcccgctgacctgcttgctccagggtaactgtggacccngtcctcgccctgcgcacggtaccctatgtctggacannnnnnnnnnnnnnnnnnnnnnnnnnnnnnnnnnnnnnnctggcgggctcgccttaccnacnnncncccnccccagatgcatggnccagaggnccnncccccggcatagatgtgcacatcggttttccagtgtgaacaaaagattacgaaacctagaaactgttggttccgtgtaagtagttgactacgtgttttagaactgtgctgaagacatctgtaagactattttgtgggggaaaaaagtagtttcctttaaggtaaaaagcattttatatgatccttagcacatttttaagttttatcttaagggagacgcgcacaaaagcggctgccaaaccgtttcgtcatcctcacagcaaggaccggacgcttgctagccaccccggagcactgctctccttttaatcatgtattcatctattttaaattgccggcgacgacttttgtctatttatgaagaaaccttgagaacgaagttacagcttatcctaccgtgtgtgtggttttggggtttcgtttgggtttgggttcttgacgtcgtttgcagctgtttcctggccctggcgagtgtctgtcttggtgcccagtgcttctctcaaatctctttataataaaacttctgaaaagctg

SEQ ID NO: 350352 - DNA, 1007 bp, Homo Sapiens
  misc_feature (16)..(16): n is a, c, g, or t
  misc_feature (19)..(19): n is a, c, g, or t
  misc_feature (38)..(38): n is a, c, g, or t
gccacgcagaagagcnccngagcagcatacggggctgngggcgcttgtggaagtagggcaggctgttgttggggatcctgcacttgccgaagggcagccgccgcacacagggcgccaggcagctgtagaggccggtggcggaggccaggcagaagatcccgatgaccacgtacacgaggaggtcgtagaagtagtagagcagcaccagcatggagcagcacatcaccacaaacacgcaggtcatcaccggcgtcacgtccaccgcctcgtcctcctgcttctcgggcccatcgtcgcgcttgtgcttcatgtaccttttcttcacgtcccgactcccggcccagtagccgccgatggcgacggtgcccacagccatgatgaagatgatgaccatgttgtagtccagcaccggctccttaggcgcatacagcgccgccctcaccgtgcggccgaaacgcgtgaagatgtccagcatgtctttgtagctgagcagggccacgggaatgccaatctcatcatactgcgtcttattaccccccggggggaccagcctctccctgctgacgatgagcagcccgcgtgctccgctgccctgggccagcctcactttctcatagaaggtgcagttcccccgcgccaccagcgggatctggttgctgaagccacgggcggggaggtcggctgcggagcagagcagggaggccgtccagttgcgcagctgcaggaaagatgccttgctgaggtcgtgcggaagatgggcccactgcgggttgtagaggatgcagtagtctttgccttcggggcccccggcctgggagaccacgtgcaccatgccgtactcacaggccacctgggccgcgaggagcagaaaggccgccaaaagccgcgccagcgcagccgccaccgctgccgccatgtcggccggtgcccgccgcaaccaacggcagatgtttcccagcaacgccccgagaccccgggccacgcatgcgccgcgcaatcgaaagaat

SEQ ID NO: 350353 - DNA, 409 bp, Homo Sapiens
  misc_feature (12)..(12): n is a, c, g, or t
  misc_feature (35)..(35): n is a, c, g, or t
  misc_feature (49)..(49): n is a, c, g, or t
  misc_feature (75)..(75): n is a, c, g, or t
  misc_feature (87)..(87): n is a, c, g, or t
  misc_feature (98)..(98): n is a, c, g, or t
  misc_feature (194)..(194): n is a, c, g, or t
  misc_feature (246)..(246): n is a, c, g, or t
agcaatacgagncctgcgggcgctgcaacttgccnaaagggcagccgcngtaacacagggccccaggcagctgtnagaggccggtgncggaggccagncagaagatcccgatgaccacgtacacgaggaggtcgtagaaatagtagagcagcaccagcatggagcagcacatcaccacaaacacgcaggtcatnaccggcgtcacgtccaccgcctcgtcctcctgcttctcgggcccatcgtcgngcttgtgcttcatgtaccttcttgggagacaccatggggtcgtgggccctgggccggctggccgacaacgggctcgggagcccacagccacccgggggaacggggcagaaaacccgggagcaggaggggacccgggggggactgaagcgcaaggaaccgcccc

SEQ ID NO: 350354 - DNA, 1359 bp, Homo Sapiens
  misc_feature (58)..(58): n is a, c, g, or t
  misc_feature (104)..(104): n is a, c, g, or t
  misc_feature (108)..(108): n is a, c, g, or t
  misc_feature (262)..(262): n is a, c, g, or t
  misc_feature (265)..(265): n is a, c, g, or t
tgtggaaagactgctgcgggcatcgaggctgaggatggcatctgttctgatggtgctnatatgggtagaagccgatcactaaccttcctgtgcccatcaatgantgtnaagggcacagctgtcttccggccacctggatgggagtggcctctcattgctccagagaaccaagatctgggcacagtgctgggagcctgccaccgcctggatgagcttcagagggggctgcctgggggccccacccagatcagggcgctgaatnctnccatcaggcgggagccctgttgcaggtagtagaaggggaagtcctgggggcttgtggaaaaagtagacagggccaggacgcccctggggggctgttccacagcagtgaggggttagctgatgttccaaaaatccggtcctgaataacctccagagtggtatggatgaccttctccactgaggagaagtaggcatcccatagaaactgggtctgctgacgcagggcgaggacccgtgcaggggacatctcctggagggcagccaggacctgcagggcttggaggaagcgcgaggcagcctcgggacggtggccagagatgaggcagaaggtggcattgggcagcgtctcctggcgctgggtctgcccaggtccagggtcttgctcacagcgcccatcccaggggcaggcagaggagccagtgtctgctgtgcgccacccacccctctcctcttccagggctagcagggctaccccgggctgggggctgtgttgccgcagctggccaggagccccacctcgcaacgggtgggcttcagggagaaaagggagggccacatcaaagccgggccggaaggagtccaccgtggggctggcctcagccaccatagcctgtcccagctggaaggtcctggggcagggagccgggtggagacggaggaccagatggttcctgcccctgttccattgcagaggcattgagctgcactctccagtctgggcgtccaggctgaggaggaggaggaggcaggccccagcagggctgaatgtgtagaagcgagagccctcaatggaagccaggatcctgcgatgagtctcagagatggttccaaccgctgggtacacgaataccttaaggccatcgcccctgcactttgaggtatcaaagcaagattcccagttgcagctgccaccatgaggggcttgaggaggtgaaacggcatcttctgggagctctccaggctgggagaagctctgcaggagctctgcatccaggcggagaagggagaagcctcccagcaggacaagcaggagccaggaggctgacagtgccagccacagggactttcttctccgaggaatccggaccggtccag

SEQ ID NO: 350355 - DNA, 1898 bp, Homo Sapiens
  misc_feature (69)..(69): n is a, c, g, or t
  misc_feature (85)..(122): n is a, c, g, or t
  misc_feature (129)..(129): n is a, c, g, or t
  misc_feature (550)..(550): n is a, c, g, or t
  misc_feature (1158)..(1158): n is a, c, g, or t
tcctaaggtttgagccaaagtttcatgcctcagttctcctgcacgagccccactcaggtgggcttatanacacgcatgtgcgtgnnnnnnnnnnnnnnnnnnnnnnnnnnnnnnnnnnnnnnaacaggnacatgcttgtcctcacccacctctcagaaggcaataaatggggggttaggaagcagcctaaaagctacccacagacacaaactcgtccttaacactgtctctgcttacttatcttaagctgccgtttactacaacgttcacagtcatttactcttatgctaagtccgtaatgctatggagaagatggctccagctcgcttgagtccatgcagtttgtcctcttcctggtgtccctatccatccagcaactgcaggagggcatgcgggggcacctggctgggaccccagctcgacaggggcctgcagcggcatcagtgggggctgtgggagccccttcctctcctgcagccgccctcactgcttattctgcgtccttgcagacagggctcccacaccactgactctgagcctcctagggtcncagcggcgctgccacaggcctcttcccagtcatgggggcggagtgaagggcccctggcattacctgttagaggcaatctcacaaccagggcacgaaaagaggtgaaggacaaagttcacaaaccctaatgaagtgggcagaagtggccagagctctgccctctgccctcctgctgcccccacctgccaggagtcacccttgctgttgggctttgtcacacagggcaccacccgaggagccacggcagacataggtgccccctgtgggtgccacagggctcctcaggtccccagaaccacactggcttatgtgaacggagcatcggcagccagcctggcagccccctccctgctcagcatcagtcccatgacaaggtcctgctgctgtgccacccaggagtcctgagaaggccacccccaccaggggcatcctcgggtctcagggagggagaagtggccgcttcccttatccacagaaatcaagaggtatccgagtgaagatcggggtggcagaggaggaagatgggtccacaaagaggcctggggcctggagacggaggggctggtgcaggggcatgaggtatttctggccccgcccgcctcttggcncagctgcccgtccggcgctgcctccctttcctcccgttcctctgggcctcagctagcactactgtgggctgcccaggacctgcagcaggaggccgtccccgctgaggcagaggcttccacggacgcaggtagtgcagcccccaaccgcagcatcaagcctccacatccaagagccaactcttggggacccaaagatgtcaggtccccatactctgaggaatcaggacacagcccagtgcctgacaccacagagtgaggcagcccttcgggtgagggcctgggccccgagggatggcagccaccactgcctaggcaaacgcacctggggctgaacttggcgcccggcactttgaggacgccagcaccagtgggcactcggaagtgccagttctggcccaaatttggtgacctgggtcagagggacctttcagaatgacttgttcccgtcagcagataccgtcaagacacgcctggctctgagaggggctgggtgcccgtgtgcctgtatcctcctggggccagcacgtctcagagggtgtccctgtggtccccgggtcagggcacggggctgaggcacctggagctattgttggcatgtggttgttgcacagatgagcccttgggggaggcgcgccatgaccgagcacagcgtcctggtggtggatccaagacagggccgtcaaccccacgcgtccgcgacgcgtggtcgacatatcccaaaacttccggaccgtaccagc

SEQ ID NO: 350356 - DNA, 685 bp, Homo Sapiens
  misc_feature (54)..(54): n is a, c, g, or t
  misc_feature (555)..(588): n is a, c, g, or t
  misc_feature (595)..(595): n is a, c, g, or t
  misc_feature (614)..(614): n is a, c, g, or t
  misc_feature (649)..(649): n is a, c, g, or t
  misc_feature (654)..(654): n is a, c, g, or t
gtgccttagaaacagggaatccccctcttgtccctcctcaccgacctgcaaatncctttaacgtgaccccaactgggttcctcatctctcccaagtggcggaggacgtggctggcatttgttcttggacttggggtgggaagaaaggccttaattatacatttgcaagggagactgcagcaaagcacctgctccttatcacctttgtgccatttccaaggcctttggagatacttcaactttccagagagaaaggggaggcggtggggacagtgtgctctggttagccgttctggagggacagaggctgccagcagggacagaagcagtagtgggaagtgctgtggggggacctgagggatgaggccaagacccttcacatttccaagggaacccttgtccttccctcccacagtggccagagggctcgtggagaaaagtactctcccaaaagacagaaacgctctcaattcctaggtttgagccagagtttcatgcctcagttctcctgcacgagccccactcaggtgggcttataccacacgcatgtgcgtgnnnnnnnnnnnnnnnnnnnnnnnnnnnnnnnnnnaacaggnacatgcttgtcctcacccncctcttagaaggcaataaatggtgggttaggagcngcctnaaagctaccacagacaccaactcgtccttaa

SEQ ID NO: 350357 - DNA, 1156 bp, Homo Sapiens
  misc_feature (9)..(9): n is a, c, g, or t
  misc_feature (19)..(19): n is a, c, g, or t
  misc_feature (23)..(24): n is a, c, g, or t
  misc_feature (45)..(45): n is a, c, g, or t
  misc_feature (48)..(48): n is a, c, g, or t
  misc_feature (50)..(50): n is a, c, g, or t
  misc_feature (52)..(52): n is a, c, g, or t
  misc_feature (421)..(711): n is a, c, g, or t
  misc_feature (714)..(714): n is a, c, g, or t
aatcagccncctagccaancatnntgggcatccacaaacaatcgnagngngntaatctgccagaggatgcccagcccctggtttctgcagttattgtactaataaaggattatgaggcagctgaggaggaggagcccttctccaggcaatattggaaggtaatttcacctgagtctcaggaaccacgaagggatatggcaacgagtagagcatgaaggtagaacagtctatatactcttgtgacacatacaatccctaccttgtgctgccaagtaactcatttttgtgcaattctcagtataagccctttgtcgtttctatgcctatttaaagtctcctaaaggtgtaattgactaggaaggatgtagttctacactgccatttacctatttaaattcatccttgtgaatatctttgttgnnnnnnnnnnnnnnnnnnnnnnnnnnnnnnnnnnnnnnnnnnnnnnnnnnnnnnnnnnnnnnnnnnnnnnnnnnnnnnnnnnnnnnnnnnnnnnnnnnnnnnnnnnnnnnnnnnnnnnnnnnnnnnnnnnnnnnnnnnnnnnnnnnnnnnnnnnnnnnnnnnnnnnnnnnnnnnnnnnnnnnnnnnnnnnnnnnnnnnnnnnnnnnnnnnnnnnnnnnnnnnnnnnnnnnnnnnnnnnnnnnnnnnnnnnnnnnnnnnnnnnnnnnnnnnnnnnnnnnnnnnnnnnnnnnncanccctgtgaatttcttattgtacacaagttctttcactatctgtgtgcagtgctctgaggggacagacaaggcttgggtgtatatgccaaccagatctcattgaagtatcagcttgtttggtactaggtgcaagtgtagcatgtcacatgtgaccatgttggatcattgacaatttttaggtatgtactgacctacatttatgatgaagatcctgagcggaggttaagatattaagttattttccatatgaatcagaattatattgattctgtgcaatcaaaacaaaaggcagaatagaatgctgagattggttaagtttgcaatgaccatcttgaaccacagatttctgctatgtgtcatcaaaacatctagttctgagtaacattttcacgattgttataaaattataggtgtgaacttctaaaataaaggaatgctaata

SEQ ID NO: 350358 - DNA, 2111 bp, Homo Sapiens
  misc_feature (1720)..(2009): n is a, c, g, or t
  misc_feature (2067)..(2067): n is a, c, g, or t
atcaggccaaatcggccgagctcgaattcgtcgagagcggcgccgcccgccgcgcagcttccccgagcgagaccaaaacaggtggaatccgggctggagccggagctccggcggcgcgggtggcggcacgtccctccagacagtaccacaggcacctggagtaccggcatcggtcgctgtggcccccgagtgtccgtcagagcctaggggagcctgccctcccgcgcctcgtcggggcccggccaggcaccttggccgccggcgcacggacgcgggcacgagcactagatcacggctgctggacctcggcacgttgacaagatttctctggggtaccgcggaggattactttgaatttcggtggtcgcctgtggtctggcatatttagaacttaagtctattatttcgggcaccatgactttgaggcttttagaagactggtgcagggggatggacatgaaccctcggaaagcgctattgattgccggcatctcccagagctgcagtgtggcagaaatcgaggaggctctgcaggctggtttagctcccttgggggagtacagactgcttggaaggatgttcaggagggatgagaacaggaaagtagccttagtagggcttactgcggagactagtcacgccctggtccctaaggagataccgggaaaagggggtatctggagagtgatctttaagccccctgacccagataatacatttttaagcagattaaatgaatttttagcgggagagggcatgacagtgggtgagttgagcagagctcttggacatgaaaatggctccttagacccagagcagggcatgatcccggaaatgtgggcccctatgttggcacaggcattagaggctcttcagcctgccctgcaatgcttgaagtataaaaagctgagagtgttctcgggcagggagtctccagaaccaggagaagaagaatttggacgctggatgtttcatactactcagatgataaaggcgtggcaggtgccagatgtagagaagagaaggcgattgctagagagccttcgaggcccagcacttgatgttattcgtgtcctcaagataaacaatcctttaattactgtcgatgaatgtctgcaggctcttgaggaggtatttggggttacagataatcctagggagttgcaggtcaaatatctaaccacttaccagaaggatgaggaaaagttgtcggcttatgtactaaggctggagcctttgttacagaagctggtacagagaggagcaattgagagagatgctgtgaatcaggcccgcctagaccaagtcattgctggggcagtccacaaaacaattcgcagagagcttaatctgccagaggatggcccagcccctggtttcttgcagttattggtactaataaaggattatgaggcagctgaggaggaggaggcccttctccaggcaatattggaaggtaatttcacctgagtctcagggaaccacgaagggatatggcaacgagtagagcatgaaggtagaacagtctatatactcttgtgacacatacaatccctaccttgtgctgccaagtaactcatttttgtgcaattctcagtataagccctttgtcgtttctatgcctatttaaagtctcctaaaggtgtaattgactaggaaggatgtagttctacactgccatttacctatttaaattcatccttgtgaatatctttgttgnnnnnnnnnnnnnnnnnnnnnnnnnnnnnnnnnnnnnnnnnnnnnnnnnnnnnnnnnnnnnnnnnnnnnnnnnnnnnnnnnnnnnnnnnnnnnnnnnnnnnnnnnnnnnnnnnnnnnnnnnnnnnnnnnnnnnnnnnnnnnnnnnnnnnnnnnnnnnnnnnnnnnnnnnnnnnnnnnnnnnnnnnnnnnnnnnnnnnnnnnnnnnnnnnnnnnnnnnnnnnnnnnnnnnnnnnnnnnnnnnnnnnnnnnnnnnnnnnnnnnnnnnnnnnnnnnnnnnnnnnnnnnnnnnntcatccctgtgaatttcttattgtacacaagttctttcactatctgtgtgcagtgctntgaggggacagacaaggcttgggtgtatatgcaaaccaggtttc

SEQ ID NO: 350359 - DNA, 676 bp, Homo Sapiens
  misc_feature (349)..(392): n is a, c, g, or t
tgatgcctatatttagaggaagagctgtctaagcagagggaatccaaatacaatagccctggagtgggaaattccccagcatgtttcagaaatagaaagcaggccaacattgttggaatagagagtaggtggggagaggcaaaggtgggaggagttaaagtcaagtcaaaggtaacaaaatgtgaagctgatatgtgaagcttgaaatatctcctgcagattgagagggacactaataaagtgtcttttctaatgacctgccagattacagaagtggaagatgaggtcatggaaagcttctcagacataagggagctaaaatcatttatgtgttaaagaagcattctcnnnnnnnnnnnnnnnnnnnnnnnnnnnnnnnnnnnnnnnnnnnnttacaggcatgaaccaccacgctcggctgtcaagtttttttacttgagcattttaatcagcttattgttattcctgttttaaagatgacaaaccagagactttgagagtctccgtcgaactagttcgacggagactctccagataccgggaaaagggggtatctggagagtgatctttaagccccccgagccagataatacatttttaagcagattaaatgaatttttagcgggagagggcatgacagtgggtgagttgagcagagctcttggacatgaaaatg

SEQ ID NO: 350360 - DNA, 971 bp, Homo Sapiens
  misc_feature (35)..(35): n is a, c, g, or t
  misc_feature (50)..(86): n is a, c, g, or t
aggcagatagacctatatgggcgacctcgggtcancgcggtggcggccgnnnnnnnnnnnnnnnnnnnnnnnnnnnnnnnnnnnnnatcaggccaaatcggccgagctcgaattcgtcgagagcgggaatccgggctggagccggagctccggcggcgcgggtggcggcacgtccctccaggtgggtggctctctgggtctggcgactcagcgctcctcagccttgccccctggtgcccgctcgcgactgtcatcgccccatcacttctcgttgcagacagtaccacaggcacctggagtaccggcatcggtcgctgtggcccccgagtgtccgtcagagcctaggggagcctgccctcccgcgcctcgtcggggcccggccaggcaccttggccgccggcgcacggacgcgggcacgagcactagatcacggctgctggacctcggcacgttgacaagatttctctggggtaccgcggaggattactttgaatttcggtggtcgcctgtggtctggcatatttagaacttaagtctattatttcgggcaccatgactttgaggcttttagaagactggtgcagggggatggacatgaaccctcggaaagcgctattgattgccggcatctcccagagctgcagtgtggcagaaatcgaggaggctctgcaggctggtttagctcccttgggggagtacagactgcttggaaggatgttcaggagggatgagaacaggaaagtagccttagtagggcttactgcggagactagtcacgccctggtccctaaggagataccgggaaaagggggtatctggagagtgatctttaagacccctgagccagataatacattgttaagcagattaaatgaattttagcgggagagggcatgacagtgggtgagttgagcagagctcttggacatgaaaatggctcttagaccagagcagggcatgatccggaaatg

SEQ ID NO: 350361 - DNA, 420 bp, Homo Sapiens
aagaggccttcctcctcatcaccaggaggccgcacatggcagctgtcgcagaagtccaggggcccatccagagcatcagcgatgagcatgttgaactctttaaggccatcatcatggtggccccggttgcacacacacacttcaatgcccgagtcaccagtgaagcggcaatgtctcccaagcatcttctctttgctgtcgggcggtgcgccgccatgttcagaactgtcatctttcagcagctcctccctacattctgcatccttgtccaggaaggcccccgggtccagctcccccaggccagccacagagccactgggctccatccccagggctttggtggctactcggtcaactggtaggtcagagggatcaggatcagcgatgcttgggggtcttgtgctgcttctgctgggctca

SEQ ID NO: 350362 - DNA, 1600 bp, Homo Sapiens
  misc_feature (1073)..(1073): n is a, c, g, or t
  misc_feature (1424)..(1424): n is a, c, g, or t
  misc_feature (1551)..(1551): n is a, c, g, or t
  misc_feature (1566)..(1566): n is a, c, g, or t
  misc_feature (1588)..(1588): n is a, c, g, or t
aattcccgggatggcgcggcggcggctgctagggcctgccgcagccgcggccactcggaaagggcgggacttccccgcagggcggggtggggcggagcgctctatcagtcctcccggtcgccccactgcgcatggcacgttgcgtactcccctcccagcaaccggtctggcggcggcgcggcagtaaaactgaggaggcggagccaagacggtcggggctgcttgctaactccaggaacaggtttaagtttttgaaactgaagtaggcctacacagtaggaactcatgtcatttcttaccaatgatgcgagctcagagtcaatagcatccttctctaaacaggaggtcatgagtagctttctgccagagggagggtgttacgagctgctcactgtgataggcaaaggatttgaggacctgatgactgtgaatctagcaaggtacaaaccaacaggagagtacgtgactgtacggaggattaacctagaagcttgttccaatgagatggtaacattcttgcagggcgagctgcatgtctccaaactcttcaaccatcccaatatcgtgccatatcgagccacttttattgcagacaatgagctgtgggttgtcacatcattcatggcatacggttctgcaaaagatctcatctgtacacacttcatggatggcatgaatgaactggcgattgcttacatcctgcagggggtgctgaaagccctccactacatccaccacatggggatatgtacacagaatctccagggttatgatgccaagtctgacatctacagtgtgggaatcacagcctgtgaactggccaacggccatgtcccctttaaggatatgcctgccacccagatgctgctagagaaactgaacggcacagtgccctgcctgttggataccagcaccatccccgctgaggagctgaccatgagcccttcgcgctcagtggccaactctggcctgagtgacagcctgaccaccagcaccccccggccctccaacggtgactcgccctcccacccctaccaccgaaccttctccccccacttccaccactttgtggnagcagtgccttcagcgcaacccggatgccaggcccagtgccagcaccctcctgaaccactctttcttcaagcagatcaagcgacgtgcctcagaggctttgcccgaattgcttcgtcctgtcacccccatcaccaattttgagggcagccagtctcaggaccacagtggaatctttggcctggtaacaaacctggaagagctggaggtggacgattgggagttctgagcctctgcaaactgtgcgcattctccagccagggatgcagaggccacccagaggcccttcctgagggccggccacattcccgccctcctgggcagattgggtagaaaggacattcttccagganagttgactgctgactgattgggaaagaaaatcctggagagatacttcactggctcaaggcttttgagacacaaggggaaatctcacaaccaggggatcagggagggtccaaagccgacattcccagntcctggtgagctcanggtgaccctcctccgcaaaagnaaagatgctgct

SEQ ID NO: 350363 - DNA, 2656 bp, Homo Sapiens
  misc_feature (2452)..(2452): n is a, c, g, or t
ctcccctcccagcaaccggtctggcggcggcgcggcagtaaaactgaggaggcggagccaagacggtcggggctgcttgctaactccaggaacaggtttaagtttttgaaactgaagtaggtctacacagtaggaactcatgtcatttcttgtaagtaaaccagagcgaatcaggaccaatgatgcgagctcagagtcaatagcatccttctctaaacaggaggtcatgagtagctttctgccagagggagggtgttacgagctgctcactgtgataggcaaaggatttgaggacctgatgactgtgaatctagcaaggtacaaaccaacaggagagtacgtgactgtacggaggattaacctagaagcttgttccaatgagatggtaacattcttgcagggcgagctgcatgtctccaaactcttcaaccatcccaatatcgtgccatatcgagccacttttattgcagacaatgagctgtgggttgtcacatcattcatggcatacggttctgcaaaagatctcatctgtacacacttcatggatggcatgaatgagctggcgattgcttacatcctgcagggggtgctgaaggccctcgactacatccaccacatgggatatgtacacaggagtgtcaaagccagccacatcctgatctctgtggatgggaaggtctacctgtctggtttgcgcagcaaccctcagcatgataagccatgggcagcggcagcgagtggtccacgattttcccaagtacagtgtcaaggttctgccgtggctcagccccgaggtcctccagcagaatctccagggttatgatgccaagtctgacatctacagtgtgggaatcacagcctgtgaactggccaacggccatgtcccctttaaggatatgcctgccacccagatgctgctagagaaactgaacggcacagtgccctgcctgttggataccagcaccatccccgctgaggagctgaccatgagcccttcgcgctcagtggccaactctggcctgagtgacagcctgaccaccagcaccccccggccctccaacggtgactcgccctcccacccctaccaccgaaccttctccccccacttcaaccactctgtggaccagtgccttcagcgcaacccgcaagcagatcaagcgacgtgcctcagaggctttgcccgaattgcttcgtcctgtcacccccatcaccaattttgagggcagccagtctcaggaccacagtggaatctttggcctggtaacaaacctggaagagctggaggtggacgattgggagttctgagcctctgcaaactgtgcgcattctccagccagggatgcagaggccacccagaggcccttcctgagggccggccacattcccgccctcctgggcagattgggtagaaaggacattcttccaggaaagttgactgctgactgattgggaaagaaaatcctggagagatacttcactgctccaaggcttttgagacacaagggaatctcaacaaccagggatcaggagggtccaaagccgacattcccagtcctgtgagctcaggtgacctcctccgcagaagagagatgctgctctggccctgggagctgaattccaagcccagggtttggctccttaaacccgaggaccgccacctcttcccagtgcttgcgaccagcctcattctatttaactttgctctcagatgcctcagatgctataggtcagtgaaagggcaagtagtaagctgcctgcctcccttccctcagacctctccctcataattccagagaagggcatttctgtctttttaagcacagactaaggctggaacagtccatccttatccctcttctggcttgggccctgacacctaagtctttcccacggtttatgtgtgtgcctcattcctttcccaccaagaatccatcttagcgcctcctgccagctgccctggtgctttctccaagggccatcagtgtcttgcctagcttgagggcttaagtccttatgctgtgttagtttcgttgtcagaacaaattaaaattttcagagacgctgctggagaatggcactctgtgtctgcgtcagctcaggggctacaggctgcttcctggtgtgtgtgcttgcagggatggccgtgctgccccaggtgagagctgtcccaccatccaagagcaggcccatgcgggtgctcactgaagctcagcagtgacctcttacactagatagaccagtttatttgaaaacctgtaacagatctgtctcttaactatctacaattttaagactatgaattttagcctgtggtcatcaaaccactttggagctaaaaagcttccaagacttgagattgaggcagaggatgctggtggcctttggtcaggaacaggacggtagaaggtgctttgtacttgcagacccgcgacactgggctgtctcctatacncctgggtcgcctagcacccaaagacgcaggaaacctaagaaccagtccccgcccatccctgccatgctggctggcgaccagcgagtgtgagccagggggtgcaaatctgaggctccctgcagtgcttccagggcacatcccttacccttctcccagtccctcaggccctcgtgccgaattcgccaccccaggcctcgctacctt

SEQ ID NO: 350364 - DNA, 1026 bp, Homo Sapiens
gggtccggaattcccgggatcggcgcggcagtaaaactgaggaggcggagccaagacggtcggggctgcttgctaactccaggaacaggtttaagtttttgaaactgaagtaggcctacacagtaggaactcatgtcatttcttgtaagtaaaccagagcgaatcaggcggtgggtctcggaaaagttcattgttgagggcttaagagatttggaactatttggagaccaatgatgcgagctcagagtcaatagcatccttctctaaacaggaggtcatgagtagctttctgccagagggagggtgttacgagctgctcactgtgataggcaaaggatttgaggacctgatgactgtgaatctagcaaggtacaaaccaacaggagagtacgtgactgtacggaggattaacctagaagcttgttccaatgagatggtaacattcttgcagggcgagctgcatgtctccaaactcttcaaccatcccaatatcgtgccatatcgagccacttttattgcagacaatgagctgtgggttgtcacatcattcatggcatacggttctgcaaaagatctcatctgtacacacttcatggatggcatgaatgagctggcgattgcttacatcctgcagggggtgctgaaggccctcgactacatccaccacatgggatatgtacacaggagtgtcaaagccagccacatcctgatctctgtggatgggaaggtctacctgtctggtttgcgcagcaacctcagcatgataagccatgggcagcggcagcgagtggtccacgattttcccaagtacagtgtcaaggttctgccgtggctcagccccgaggtcctccaccagaatctcccagggttatgatgccaagtctgacatctacagtggtgggaatcacagcctgtgaactggccaacggccatgtccccctttaagaatatgccctgccacccagatgctgctagaaaaactgaaccggcacagtgcctgcctgttgataccagccgggtcctcta

SEQ ID NO: 350365 - DNA, 1020 bp, Homo Sapiens
  misc_feature (792)..(792): n is a, c, g, or t
ccctcccagcaaccggtctggcggcggcgcggcagtaaaactgaggaggcggagccaagacggtcggggctgcttgctaactccaggaacaggtttaagtttttgaaactgaagtaggcctacacagtaggaactcatgtcatttcttgtaagtaaaccagagcgaatcaggcggtgggtctcggaaaagttcattgttgagggcttaagagatttggaactatttggagagcagcctccgggtgacactcggagaaaaaccaatgatgcgagctcagagtcaatagcatccttctctaaacaggaggtcatgagtagctttctgccagagggagggtgttacgagctgctcactgtgataggcaaaggatttgaggacctgatgactgtgaatctagcaaggtacaaaccaacaggagagtacgtgactgtacggaggattaacctagaagcttgttccaatgagatggtaacattcttgcagggcgagctgcatgtctccaaactcttcaaccatcccaatatcgtgccatatcgagccacttttattgcagacaatgagctgtgggttgtcacatcattcatggcatacggttctgcaaaagatctcatctgtacacacttcatggatggcatgaatgagctggcgattgcttacatcctgcagggggtgctgaaggccctcgactacatccaccacatgggatatgtacaccggagtgtcaaagccagccacatcctgatctctgtggatgggaaggtctacctgtctggtttgcgcagcaccctcancatgataagccatgggcagcggcagcgaggggtccaccattttcccaagtacagtggcaaaggtctgccctgggctcaacccccgaggttcttcccgcaaaaatcttccggggtttatgaaggcaaagtctggacatctaacggtgggggaaatccccagcctgggaaactggcccaagggccatggcccccctttagggatatgccctgcccccccaaaagctggtt

SEQ ID NO: 350366 - DNA, 901 bp, Homo Sapiens
  misc_feature (436)..(447): n is a, c, g, or t
  misc_feature (688)..(688): n is a, c, g, or t
agggaaatataaattaggctgagcagcatttcagcccaatccttagtgccaaatggccaggattctccactgaaagcttccataacttccgaacgtttagtctcccttcatttctttgtaattccttgtaattcctatcagagccaagagcccaccctccctccatgtgacacactcatggtttattacctgcaagaatgttaccatctcattggaacaagcttctaggttaatcctccgtacagtcacgtactctcctgttggtttgtaccttgctagattcacagtcatcaggtcctcaaatcctttgcctaaaagaaaaagggaatgccatacgcaacgacaagaacaacaaaaggttttaagaaaattttcctttaaaaaagggacttgatttcaaaagaaacttaatgttaaattgttcactactgttacnnnnnnnnnnnnccttttcccagcagaatttaactgttatgttcatggctcacatttcttgatttttctctcatcagttccttctcagccaacctttctgactcactatggccaggacaccggaaacatggcagccacaaaggaaagatggcaaaagagcttctttcctggaagtttgatctcttcccatacttggcagaaaaaaacagagaagacccacagaagcaagtctgtgcccatgaatcctcctaantagtggatggcctctgctgtacacacatctggggctgctgagaaagctgcagcagcccctggagcagaaagcaggagagtaaggacggcccctgcacatacctatcacagtgagcagctcgtaacaccctccctctggcagaaagctactcatgacctcctgtttagagaaggatgctattgactctgagctcgcatcattggtctaaaaaaa

SEQ ID NO: 350367 - DNA, 1881 bp, Homo Sapiens
  misc_feature (1657)..(1657): n is a, c, g, or t
cgccgcacgcgctggcggactaagagtggctggcgaagcgagcggtcggcgcgggcccctggcgggcgggcggtacagccccaagcctgagacccggacctgagcatcgcaggcccaggacgaggtggccaggcggcccccatggcgtccctggtctaggcggagaaccgcctgggcgatgagtgagaacctcgacaacgagggcccgaagcccatggagagctgtggccaggagagcagcagtgccctgagctgccctaccgtctcggtgccccctgcagccccggcagccctggaggaggtggagaaagagggcgctggggcggctacagggccggggcctcagcccgggctctacagctacatcagggatgacttgtttacctctgagatctttaaactggagctgcagaacgtgcctcgccacgccagcttcagcgacgtccggcgcttcctgggccgctttggtctgcagccccacaaaaccaaactctttgggcaaccaccctgcgcctttgtgacattccgcagcgctgcagagagggacaaggccctgcgcgttttgcatggtgccctctggaaaggccgcccacgtcagtgtgcgcctggcccggcccaaggccgaccccatggccaggaggaggcgacaggagggtgagagtgagccaccagtaacacgagtggccgacgtggtgacccctctatggacagtgccctatgctgagcagcttgagcggaagcagctggagtgcgagcaggtgctgcagaaacttgccaaggaaatcgggagcaccaaccgtgccttgctgccctggctgctcgagcaaaggcacaagcacaacaaggcctgctgcccgctggagggggtcaggccatcaccccagcagactgagtatcgtaataagtgtgagtttctggttggcgtcggggtggatggggaggataacaccgtgggctgtcggctcggcaagtacaagggcgggacgtgtgctgtggcagccccgtttgacaccgtgcacatccccgaagccaccaagcaggtggtgaaggccttccaggagttcatccggtccactccatactcggcatacgacccagagacgtacacaggccactggaagcagctgactgtgcgcaccagccgccgccaccaggccatggccattgcctacttccacccccagaagctgagccctgaggagctggcagagctgaagacctccctagcgcagcacttcacagcagggccaggcagggccagtggagtgacctgcctctacttcgtggaggagggacagcgaaagactcctagccaggagggcctgcccctggagcatgtggctggggaccggtgcatccacgaggacctgctagggctgaccttccggatctctccacacgccttcttccaggtgaacacacccgcagccgaggtgctctacacagtcatccaggactgggcccaattggatgcggggagcatggtgctggacgtgtgctgtggcaccggcaccattggcctggccctggcccggaaggtaaagagggtcattggggtcgagctatgcccagaggctgtggagggacgcccgggtgaacgcccaggacaatgagttgagtaatgtggagttccactgcgggagggccgaggacctgntgcccaccctggtgagcagactggcctcccagcacctcgtggccatcctggacccacccccgtgctggctttgctttccagggggatcttgggccatcccggagagctaaaaacctccaggcggcggctgtaccgtctcatgtcaccccccgggcagccaggggggcacttttgttggacttctgtcagaggccccctttctaaccggggggggaagcccattc

SEQ ID NO: 350368 - DNA, 847 bp, Homo Sapiens
gccgcacgcgctggcggactaagagtggctggcgaagcgagcggccggcgcgggcccctggcgggcgggcggtacagccccaagcctgagacccggacctgagcatcgcaggttcgagtcccgccccgcctggggcgaagccgggggtggcggcgacctcgcggcgttgcaccggctctgtgagcacctcccctctgagcacttcccttgtgacaggccacttcccttgtgacaggcccaggacgaggtggccaggcggcccccatggcgtccctggtctaggcggagaaccgcctgggcgatgagtgagaacctcgacaacgagggcccgaagcccatggcagagctgtggccaggagagcagcagtgccctgagctgccctaccgtctcggtgccccctgcagccccggcagccctggaggaggtggagaacagagggcgctggggcggctacagggccggggcctcagcccgggctctacagctacatcagggatgacttgtctacctctgagatctttaacctggagctgcagaacgtgcctcgccacgccagcttcagcgacgtccggcgcttcctgggcccgcttcggctctgcagccccacaaaaccaaactctttgggcaaccaccctgcgcctttgtgacattccgcagcgctgcagagagggacaaggccctgcgcgtctcgcatggtgccctctggaaaggccgcccactcagtgtgcgcctggcccggcccaagggccgaccccatggccaggaggaggcgacaggagggtgagagtgagccaccagtaacacgagtggcgacgtggtgacccctctatggacaagtgcctatgg

SEQ ID NO: 350369 - DNA, 870 bp, Homo Sapiens
aagagtcacaacaattaggctagtcgagctggtgtaatcggccgaggggctcgccgcacgcgctggcggactaagagtggctggcgaagcgagcggccggcgcgggcccctggcgggcgggcggtacagccccaagcctgagacccggacctgagcatcgcaggttcgagtcccgccccgcctggggcgaagccgggggtggcggcgacctcgcggcgttgcaccggctctgtgagcacctcccctctgagcacttcccttgtgacaggccacttcccttgtgacaggcccaggacgaggtggccaggcggcccccatggcgtccctggtctaggcggagaaccgcctgggcgatgagtgagaacctcgacaacgagggcccgaagcccatggagagctgtggccaggagagcagcagtgccctgagctgccctaccgtctcggtgccccctgcagccccggcagccctggaggaggtggagaaagagggcgctggggcggctacagggccggggcctcagcccgggctctacagctacatcagggatgacttgtttacctctgagatctttaaactggagctgcagaacgtgcctcgccacgccagcttcagcgacgtccggcgcttcctgggccgctttggtctgcagacccacaaaaccaaactctttgggcaaacaccctgcgcctttgtgacaattccgcagcgctgcagagagggacaaggccgtgcgcgtttgcatggtgccctctgggaaaggccgcccactcagtgtgcgcctggcccggcccaaggccgaccccatggcaggaggaggcgacaggaggggagaagtgaacaccagtaacaagagtggccgaatggggacc

SEQ ID NO: 350370 - DNA, 1595 bp, Homo Sapiens
  misc_feature (1042)..(1042): n is a, c, g, or t
  misc_feature (1046)..(1046): n is a, c, g, or t
  misc_feature (1121)..(1121): n is a, c, g, or t
  misc_feature (1128)..(1128): n is a, c, g, or t
  misc_feature (1136)..(1136): n is a, c, g, or t
  misc_feature (1145)..(1145): n is a, c, g, or t
  misc_feature (1228)..(1228): n is a, c, g, or t
  misc_feature (1314)..(1314): n is a, c, g, or t
  misc_feature (1324)..(1324): n is a, c, g, or t
  misc_feature (1344)..(1344): n is a, c, g, or t
  misc_feature (1396)..(1396): n is a, c, g, or t
  misc_feature (1402)..(1402): n is a, c, g, or t
  misc_feature (1462)..(1462): n is a, c, g, or t
  misc_feature (1506)..(1506): n is a, c, g, or t
  misc_feature (1514)..(1514): n is a, c, g, or t
  misc_feature (1557)..(1557): n is a, c, g, or t
  misc_feature (1574)..(1574): n is a, c, g, or t
  misc_feature (1576)..(1576): n is a, c, g, or t
  misc_feature (1585)..(1585): n is a, c, g, or t
cgcgtgtggttgaggatgggctggcggcgggtccgggtccgctgcctggcgctgcgggcggcgggccatggtggtttggattgagccgggcccggccggggcgccgagtcggagggggtggcagtgagcggcggcagaggctacggggctcggtttggctgactggggagtcggcaggcggcaggaaccatgcgaggccagcggagcctgctgctgggcccggcccgcctctgcctccgcctccttctgctgctgggttacaggcgccgctgtccacctctactccggggtctagtacagcgctggcgctacggcaaggtctgcctgcgctccctgctctacaactcctttgggggcagtgacaccgctgttgatgctgcctttgagcctgtctactggctggtagacaacgtgatccgctggtttggagtggtgttcgtggtcctggtgatcgtgctgacaggctccattgtagctatcgcctacctgtgtgtcctgcctctcatcctccgaacctactcagtgccacgactctgctggcatttcttctatagccactggaatctgatcctgattgtcttccactactaccaggccatcaccactccgcctgggtacccaccccagggcaggaatgatatcgccaccgtctccatctgtaagaagtgcatttaccccaagccagcccgaacacaccactgcagcatctgcaacaggtgtgtgctgaagatggatcaccactgcccctggctaaacaattgtgtgggccactataaccatcggtacttcttctctttctgctttttcatgactctgggctgtgtctactgcagctatggaagttgggaccttttccgggaggcttatgctgccattgagacttatcaccagaccccaccacccaccttctcctttcgagaaaggatgactcacaagagtcttgtctacctctggttcctgtgcaggtatttaggaatcctaacaactacggctgcatggacaactggaaggtattcctgggtgtggatacaggaaggcactngctnactcgggtgctcttaccttctagtaacttgccccatgggaatggaatgagctagggagccccctccctgggtganagctcantcagcctntgtgatggnagtgtgagctggactgtgtcagccacgactcgagcactcattctgctcccgtaatgttatttcaagggcgctccaagggcagnttttctcagaatccttgatcaaaaagagccagtgggcctgccttagggtaccatgaaggacaattaaagagaccagcctttttacnactgcagaanaaagacacaatgtggagaantcttaggactgacatccctttactaaggcaaacagaagttccaaccccagantagggntcaggcagctagctaccttacttgcccagtgctgacccggacctcctccaggatacagcnactggaagttggccaccacctcttctacttgctgtctgaaaaancacctgantagtacagctgagatcttggcttctcaacagggcaaagatacncaggcctgatgctgagntnactgccacntttcacatgc

SEQ ID NO: 350371 - DNA, 1440 bp, Homo Sapiens
cttggctaccatttccttggggtggggctgggaatggaattggagacaaagcattttctgtcatgcaaggggtagctggctgtcctgacaggagacagggaatctcctgctaccaggttgagttggctagcctgtgacatcagcccagagggagtaggaagaagagtatcttttgccaagacttaaatagcaccaggaaatacctcggtacaggatccacattctgtgtactcattcctccattggctgttctttggtgaggaataatcatctgaaggaaccatgcgaggccagcggagcctgctgctgggcccggcccgcctctgcctccgcctccttctgctgctgggttacaggcgccgctgtccacctctactccggggtctagtacagcgctggcgctacggcaaggtctgcctgcgctccctgctctacaactcctttgggggcagtgacaccgctgttgatgctgcctttgagcctgtctactggctggtagacaacgtgatccgctggtttggagtggtgttcgtggtcctggtgatcgtgctgacaggctccattgtagctatcgcctacctgtgtgtcctgcctctcatcctccgaacctactcagtgccacgactctgctggcatttcttctatagccactggaatctgatcctgattgtcttccactactaccaggccatcaccactccgcctgggtacccaccccagggcaggaatgatatcgccaccgtctccatctgtaagaagtgcatttaccccaagccagcccgaacacaccactgcagcatctgcaacaggtgtgtgctgaagatggatcaccactgccacatacttcctccagccctctctaaactacccaccagtcttcgcccctcttttcttagttctgtggcacttgccctgggtgccctaactgtatggcatgctgttctcatcagtcgaggtgagactagcatcgaaaggcacatcaacaagaaggagagacgtcggctacaggccaagggcagagtatttaggaatccttacaactacggctgcttggacaactggaaggtattcctggggtgtggatacaggaaagcactggcttactccggggctcttaccttctagtcacttgccccaggggaatggaatgacctgggaacccccctccctgggggactgctcactcagcctctgtgatggcagtgtgagctggactgtgtcagccacgactcgagcactcattctggctcccctatgttatttcaaggggcctccaagggccagctttttctcagaatcccttgatcaaaaaagagccagtggggcctgcccttaaggtaaccaggcagggacaatttcagggaccaaccccttttttcccactggccgaaagaaaagacccctatgggggaggaaaatctttagggactggaaattcct

SEQ ID NO: 350372 - DNA, 940 bp, Homo Sapiens
ggcctgggtggcgaattcggcacgagggagagagcggcggcagaggctacggggctcggtttggctgactggggagtcggcaggcggcaggaaccatgcgaggccagcggagcctgctgctgggcccggcccgcctctgcctccgcctccttctgctgctgggttacaggcgccgctgtccacctctactccggggtctagtacagcgctggcgctacggcaaggtctgcctgcgctccctgctctacaactcctttgggggcagtgacaccgctgttgatgctgcctttgagcctgtctactggctggtagacaacgtgatccgctggtttggagtggtgttcgtggtcctggtgatcgtgctgacaggctccattgtagctatcgcctacctgtgtgtcctgcctctcatcctccgaacctactcagtgccacgactctgctggcatttcttctatagccactggaatctgatcctgattgtcttccactactaccaggccatcaccactccgcctgggtacccaccccagggcaggaatgatatcgccaccgtctccatctgtaagaagtgcatttaccccaagccagcccgaacacaccactgcagcatctgcaacaggtgtgtgctgaagatggatcaccactgcccctggctaaacaattgtgtgggccactataaccatcggtacttcttctctttctgctttttcatgactctgggctgtgtctactgcagctatggaagttgggaccttttccgggaggcttatgctgccattgagaaaatgaaacagctcgacaagaacaaactacaggcggttgccaaccagacttatcaccaggaccccaccaacccacctttctcctttcgagaaaagatgactcacaagagtcttgtctacctctggttcctgtgcagttctgtggcactgccctg

SEQ ID NO: 350373 - DNA, 964 bp, Homo Sapiens
  misc_feature (931)..(931): n is a, c, g, or t
gggtgtctactgcagctatggaagttgggaccttttccgggaggcttatgctgccattgagacttatcaccagaccccaccacccaccttctcctttcgagaaaggatgactcacaagagtcttgtctacctctggttcctgtgcagttctgtggcacttgccctgggtgccctaactgtatggcatgctgttctcatcagtcgaggtgagactagcatcgaaaggcacatcaacaagaaggagagacgtcggctacaggccaagggcagagtatttaggaatccttacaactacggctgcttggacaactggaaggtattcctgggtgtggatacaggaaggcactggcttactcgggtgctcttaccttctagtcacttgccccatgggaatggaatgagctgggagccccctccctgggtgactgctcactcagcctctgtgatggcagtgtgagctggactgtgtcagccacgactcgagcactcattctgctccctatgttatttcaagggcctccaagggcagcttttctcagaatccttgatcaaaaagagccagtgggcctgccttagggtaccatgcaggacaattcaaggaccagcctttttaccactgcagaagaaagacacaatgtggagaaatcttaggactgacatccctttactcaggcaaacagaagttccaaccccagactaggggtcaggcagctagctacctaccttgcccagtgctgacccggacctcctccaggatacagcactggagttggccaccacctcttctacttgctgtctgaaaaaacacctgactagtacagctgagatcttggcttctcaacagggcaaagataccaggcctgctgctgaggtcactgccacttctcacatgctgcttaagggagcacaaataaaggtattcgattttganaacaaacacaacagaaaaatgaaaaaaccatgt

SEQ ID NO: 350374 - DNA, 859 bp, Homo Sapiens
  misc_feature (761)..(761): n is a, c, g, or t
gattgagccgggcccggccggggcgccgagtcggagggggtggcagtgagcggcggcagaggctacggggctcggtttggctaactggggagtcggcaggcggcaggtcttttgtggggatgagccagggtgcaaggagagtacaatactccagttaccgaattgaaaccatccctgcagtggagcagcctcctccagtttctgttgggttttgagctacctgttaaataagtcagtgggattgtcaaggacaaagccctccctggctgcctcagggcaaaatcaggaaccatgcgaggccagcggagcctgctgctgggcccggcccgcctctgcctccgcctccttctgctgctgggttacaggcgccgctgtccacctctactccggggtctagtacagcgctggcgctacggcaaggtctgcctgcgctccctgctctacaactcctttgggggcagtgacaccgctgttgatgctgcctttgagcctgtctactggctggtagacaacgtgatccgctggtttggagtggtgttcgtggtcctggtgatcgtgctgacaggctccattgtagctatcgcctacctgtgtgtcctgcctctcatcctccgaacctactcagtgccacgactctgctggcatttcttctatagccactggaatctgatcctgattgtcttccactactaccaggccatcaccactccgcctgggtacccaccccaggggcaggaatgatatcgcccaccgtctccatnctgtaagaaagtgcattttacccccaagccagcccccgaaacacacccactggcaagcatcttgccaaacaaggttgtggtgcctggaaagatgggac

SEQ ID NO: 350375 - DNA, 1540 bp, Homo Sapiens
atgttccggggttccctgcggtgttattctggttatgtgtgtgtttgttggctttctctgttgggtcttcctcttcctgtcataggtgttgcggggtttgttcactctcgttccgacggtatcgtgcacggtgtagggtattccctgtcatggtcccggcttgtctcgtcctaattggtgccgctcccatggctccctgtccatggttcccatgccccttgtgttatcttgtgtcttttggcttggttcccatcgtcttgggtaggtataccgggttccgctataatgggtgtccatatgtgatattggtggccggattcatcctatgtgtgcatgcttgtcaagcatcaagctcttgtacgtgcctggggatatccatcacaggaccttgagtgcagtagtccacgtggtagaactgcggcagtgtcagtgatggtaaggatcccacttggggtggatctcgcagtgcccgtccctgccactagcggcccgctgccctggtgcccaccggcttcgccctgcgaaggctggccaccactgcccgtttctgctttcgggcgcctcgggccatgaacgtctgtgtctgcaccaactgggcccgaggcagcacaggacgtgtggagccgttgtcgatctcggcaaagacagggatgacctctcctggggtgtagcccttgcggtcgatcttggccgaaagggagactaggccacggttacagtaccaggatcgggcaaccttttcccgagcccccgcttgaggcggcagcagggctggcgtgttgatgtccacaggctcgatgacagtgaacacctttccttgcccggcgtgctgggacccagggccggtgcagggtggccttgatacagtagcggacactaccgtgtcccgagcccccgaaggaggtcaccagggctcgcgggcagatgtccacaggctcgatgacagtgaacaccttccttgcccggcgtgctgggacccagggccggtgcagggtggccttgatacagtagcggacactaccgtgtttgccctcgaaggatgtcaccagggtcgggggcagctggaagctgaacaggaactcatggcgcccaggaggcagcgtcgtggtctccccggtatctggcgccaggagcgtggcgcggtggctcacgacctccacgcgttcactgtagctctgcgtgtaagccgtgctcgagcccgcgctgcgcgactcggtccagtgcacgtgggcgcggccccgcgcgcgcagcctcagggcacccacacgcgcggcgcttgacagctccagcagcacccggcccgccacggcctggccgccgctaaacacgggctcgacgcccgcggtcgcgccgtccaactgcaccgagaacgctttcaccttgtcgaatagcatcgcgtccggggtgcgaacccacgacaggcggaacctggcctcgaactcgcgaaccggcagctcaagatgccgacgctgcagcctcagaacgcaaaatcgccgtcaacgcgcaggcgcgctcaccaaccggagcagaaaatcccgct

SEQ ID NO: 350376 - DNA, 1401 bp, Homo Sapiens
  misc_feature (1320)..(1320): n is a, c, g, or t
cgtggctgttcgcgctcatcccctcccccggccctgggtgtcccgtgacgaggcagcgcggaccgccgcgggccgggcccatcccgccgcagcggcccggggccgagcaggggctaggcggggagggagcggcgcccagcggggcccggagcgtggccagaatggtgctggaaggaaaccctgaagtggggtccccccgaacctcagacctccagcaccgggggaacaagggctcttgcgttctctcctctcccggtgaagatgcgcagccaggcgaggagcccatcaagtatggtgaactcatcgtcctgggctacaatggttgtctggcaagtggggacaagggccgccggcgaagccgcctggcactgagccgccggtcgcacgccaacggggtgaagccagacgtcatgcaccacatctccacgccgctcgtctccaaggcactgagtaaccgtggtcagcacagcatctcgtatacactgtcccggagccactcggtcatagtggagtatacacatgatagcgacacagacatgttccagattggccgctccacagagaacatgattgacttcgtggtaacagacacgtcccctggaggaggggctgccgagggcccttctgcccagagcaccatctcccgctatgcctgccgcatcctctgtgaccgccggccaccctatactgcccgcatctatgccgctggcttcgatgcctctagcaacatcttccttggagagcgagcggccaaatggcggaccccagatggcctgatggatggactgaccaccaatggagtcctggtgatgcacccggcaggcggcttctccgaggactcagccccgggtgtctggcgggagatctcggtctgtgggaatgtgtacacattgcgggacagccgctcagcccagcagcggggcaagctggtggaaaacgagtccaacgtgctgcaggacggctctctcatcgacctgtgtggggccacactgctgtggcgcacaccggcggggctgctgcgggctcccacactgaagcaactggaggcccagcggcaggaggcaaatgcagcgcggccccagtgccccgtgggcctcagcactctggccttccccagcccagcccgtggccgcacagcgcccgacaaacagcagccctgggtctacgtccgctgcgggcacgtccatggctaccacggctggggctgccggcgggagcggggcccccaggagcgcgaatgtcctctctgccgccttgtggggccttatgtgcctctatggcttggccaggagggccgcctctgcctggacccttggccgnctagccatgcctttgcaccttgcgggcacgtctgctctgagaagactgcccgctactgggcccaggcaccactgtcccaag

SEQ ID NO: 350377 - DNA, 778 bp, Homo Sapiens
ggcaggctggtactggtctggaatatattggatctcatcccctcccccgtgcctgggtgtcccgtgacgaggcagcgcggagcctgccgctgggccgggcccatcccgccgcagcggcccggggccgagcaggggctaggcggggagggagcggcgcccagcggggcccggagcgtggccagaatggtgctggaaggaaaccctgaagtggggtccccccgaacctcagacctccagcaccgggggaacaagggctcttgcgttctctcctctcccggtgaagatgcgcagccaggcgaggagcccatcaagtatggtgaactcatcgtcctgggatgctgtgaggaaggaggtgaggaaaccgaggctcagagaggggaagtgactggcccaagggcacacagctgctacaatggttgtctggcaagtggggacaagggccgccggcgaagccgcctggcactgagccgccggtcgcacgccaacggggtgaagccagacgtcatgcaccacatctccacgccgctcgtctccaaggcactgagtaaccgtggtcagcacagcatctcgtatacactgtacccggagccactcggtcatagtggagtatacacatgatagcgacacagacatgttccagattggccgctccacagagaacatggattgacttcgtggtaacagacacgttccctggaggaggggctgccgagggcccttctgcccagagcaccatctcccgctatgcctgccgcatccttctgtgaccgccggcacc

SEQ ID NO: 350378 - DNA, 745 bp, Homo Sapiens
  misc_feature (186)..(222): n is a, c, g, or t
  misc_feature (591)..(591): n is a, c, g, or t
  misc_feature (673)..(673): n is a, c, g, or t
  misc_feature (682)..(682): n is a, c, g, or t
  misc_feature (715)..(715): n is a, c, g, or t
atcatggaaaccccccaggaaaaagtggccccggacgcgcgagcctgaggattctgcacaaaagaggtgcccaaaatgaagaccctgatgcgccatggtctggcagtgtgtttagcgctcaccaccatgtgcaccagcttgttgctagtgtacagcagcctcggcggccagaaggagcggcccccnnnnnnnnnnnnnnnnnnnnnnnnnnnnnnnnnnnnngcgtcggccaccggcagctcgcagccggcggcggagagcagcacccagcagcgccccggggtccccgcgggaccgcggccactggacggatacctcggagtggcggaccacaagcccctgaaaatgcactgcagggactgtgccctggtgaccagctcagggcatctgctgcacagtcggcaaggctcccagattgaccagacagagtgtgtcatccgcatgaatgacgcccccacacgcggctatgggcgtaacgtgggcaatcgcaccagcctgagggtcatcgcgcattccagcatccagaggatcctccgcaaccgccatgacctgctcaacgtgagccagggcaccgtgttcatcttctgggancccagcagctacatgcggcgggacggcaagggccaggtctacaacaacctgcatctcctgagccaggtgctgccccggctgnaaggccttncatgattacttcgccacaagatgctgcagtttngatgagctcttcaagcaggagactgggcaa

SEQ ID NO: 350379 - DNA, 1420 bp, Homo Sapiens
cccgtccattggccccccaatgaacctccaggccgggttttccgggggtctggtagtacgcattcccggaaacagattttcccgccttttttcccccaacggccctgggggtgctgtttgttccctctcgggatggcaaactcccaggtaagtaaagaggttccatgggaggtcattattgtgcatgatgaacccgtgcagagagtattcgcccatccgatgccaggtagacgttcgctgtctctgtgttactgtaacctggctctgtcttctccaggagccccatggcagcacagatgtccagaagcctctccattccacacgcagaggcgtccactttgctggcaatatccgcagccttctggggtgcttcatcttttaacaaatcgaacaccttcagtctgcaagcggtgagcaggcccttggatagcataaagccctcaatcagctccaggaggcgtgtcgggaacggaggcagggtctccccgagtcctggtgacactcagccttttgccgtggcctgtcccgcctctcccgcctcggccttctcatcgcggctgcccgcgtccctctgagtgggctcccgagccacccccccttccacgtcactgaggtcttcgaaggtgtccgcggccgggatggagtcgtgcttgacactccgccgcaggtcctccgggcggggcgggtagtagagcttcaccagctgcttgcagaagtggttcagcgggaatcccaccacgttcagaaagtccccgtgtacggactccaccagcatgccgcccagggcctggatcccgtagccgccagctttgtccatgggctccccgctgtggacgtattcccagagcagctcctcggacagctccgagaacttcaccttcgtttcctcgtagaattccgagaccctggtgtccagctgatggtctttgctggagcagtggacgatcgcgacacctgtgaacacgctgtgttctctcccactcaaccgggacagcatcctgtaggcgtcctgcttgtccaccggcttctccagaatcagccccccgactgtcacgatcgtgtccgctccaatgaccacgtcgggggcccgcaggtctttctggtacagccggttggccacctccagggccttctgcttggcggtctccatggcgtacccatacggagtagcgaaggaggctttgtccagcttctctttaaacttggaggggaccacctcaaacctgagacccgcgttgctgaggatctcctgacggcgtggggaggcgctggccagcaccacgcgcttgtgcagcagcttcccaatcaccgggcacagcaccatggcgtccacgccgggagccgggcgtccgcacttctgagcccggagcccgcggtgcgcgcagcgcggctgcaaaaaaaacaggcggccagagtcccg

SEQ ID NO: 350380 - DNA, 1194 bp, Homo Sapiens
  misc_feature (836)..(836): n is a, c, g, or t
  misc_feature (1003)..(1003): n is a, c, g, or t
  misc_feature (1059)..(1059): n is a, c, g, or t
tctttctcctccacgtggggacgcaggatggcggcagcagtggcggacgaggcggtggcgcgcgatgtgcagcggttgctagtgcagttccaggatgagggcgggcagctgctgggttccccgttcgacgtgcccgtggacatcaccccggacaggctgcagctcgtgtgcaacgcgctactggcccaggaggatcccctgccactggctttctttgtccacgatgctgagatcgtctcctcactggggaagacgttggagtcccaggcagtggagacagagaaggtcctagacatcatctaccagccacaggctatcttcagagtccgggctgtgactcgctgcaccagctccttggagggtcacagtgaggcagtcatttctgtggccttcagccctacgggaaagtacctggccagtggctctggagacaccaccgtgcgcttctgggatctcagcacagagacaccacatttcacatgcaagggacacagacactgggtccttagtatatcctggtctccagatggcaagaagctggcctcaggctgcaagaatggccagattctcctctgggacccaagcacagggaagcaggtgggcaggaccctcgctggccacagcaagtggatcacaggcctgagctgggagcccctccatgcgaaccctgagtgccgctatgtggccagcagctccaaggatggcagtgtgcggatctgggacacaactgcaggccgctgtgagcgcatcctcaccgggcacacccagtcggtcacctgtctccggtggggaggggacgggcttctctactctgcctcccaggaccgcaccatcanagtctggagagctcatgacggtgtgctgtgccggactctgcaaggccacggccactgggtggacaccatggccctcagcactgactatgccctgcgcactggggccctttgaacctgctgaggcctcagtttatcccccagacctccaaggatcccttgcagggagntgaaaggagaggggctctggagccgatacaacctccgtgcgggggccaggggcccnaaaaaggctgggtgtctgggttccaacgacttcaccttaattcctgggggccccccgccagagggacaaaaagcctcctcccctccgaatgaacagggaaccccagctctccatcaaaccagggggctctttccc

SEQ ID NO: 350381 - DNA, 841 bp, Homo Sapiens
ggcggcagcagtggcggtgggtgtgcgtggatgggggcggggggcgtcgccgcggggcgctagggcccgggtccctgaggcctgagagaggcgaagtggggcccttctgggcgggcgaccagactgactcccgccccacttgctcgcgcaggacgaggcggtggcgcgcgatgtgcagcggttgctagtgcagttccaggatgagggcgggcagctgctgggttccccgttcgacgtgcccgtggacatcaccccggacaggctgcagctcgtgtgcaacgcgctactggcccaggaggatcccctgccactggctttctttgtccacgatgctgagatcgtctcctcactggggaagacgttggagtcccaggcagtggagacagagaaggtcctagacatcatctaccagccacaggctatcttcagagtccgggctgtgactcgctgcaccagctccttggagggtcacagtgaggcagtcatttctgtggccttcagccctacgggaaagtacctggccagtggctctggagacaccaccgtgcgcttctgggatctcagcacagagacaccacatttcacatgcaagggacacagacactgggtccttagtatatcctggtctccagatggcaagaagctggcctcaggctgcaagaatggccaggaaccctgagtgccgctatgtggccagcagctccaaggatggcagtgtgcggatctgggacacaactgctaggccgctgtgagcgcatcctcaccgggcacacccagtcggtcacctgtctccggtggggacggggacgggcttctctactcttgctcccaggaacgacca

SEQ ID NO: 350382 - DNA, 1806 bp, Homo Sapiens
aaggaagcgaggcctgggtggcgaattcggcacgagggttggagtcccaggcagtggagacagagaaggtcctagacatcatctaccagccacaggctatcttcagagtccgggctgtgactcgctgcaccagctccttggagggtcacagtgaggcagtcatttctgtggccttcagccctacgggaaagtacctggccagtggctctggagacaccaccgtgcgcttctgggatctcagcacagagacaccacatttcacatgcaagggacacagacactgggtccttagtatatcctggtctccagatggcaagaagctggcctcaggctgcaagaatggccagattctcctctgggacccaagcacagggaagcaggtgggcaggaccctcgctggccacagcaagtggatcacaggcctgagctgggagcccctccatgcgaaccctgagtgccgctatgtggccagcagctccaaggatggcagtgtgcggatctgggacacaactgcaggccgctgtgagcgcatcctcaccgggcacacccagtcggtcacctgtctccggtggggaggggacgggcttctctactctgcctcccaggaccgcaccatcaaagtctggagagctcatgacggtgtgctgtgccggactctgcaaggccacggccactgggtgaacaccatggccctcagcactgactatgccctgcgcactggggcctttgaacctgctgaggcctcagttaatccccaagacctccaaggatccttgcaggagttgaaggagagggctctgagccgatacaacctcgtgcggggccagggtccagagaggctggtgtctggctccgacgacttcaccttattcctgtggtccccagcagaggacaaaaagcctctcactcggatgacaggacaccaagctctcatcaaccaggtgctcttctctcctgactcccgcatcgtggctagtgcctcctttgacaagtccatcaagctgtgggatggcaggacgggcaagtacctggcttccctacgcggccacgtggctgccgtgtaccagattgcgtggtcagctgacagtcggctcctggtcagcggcagcagtgacagcacactgaaggtgtgggatgtgaaggcccagaagctggccatggacctgcccggccacgcggatgaggtatatgctgttgactggagtccagatggccagagagtggcaagtggtgggaaggacaaatgcctccggatatggaggagatgagacggcccgaagttctctctgacccccacctcgactcggcctctgccagctgccttccctgccagagaacaaaggctgagatggcagtgcacacaccctccccaccagtggggacctgagaatgcgtgtggcctgctgtcctcgatagaccggaatggggttttcccacagatccccgcctgtggcacaccccagagccagaaatcgaaggtcacaggaagttgtcactgaacttggcccgtgtctgctactctgtaccttgctggtacagacaggggtggtgggcagccaggctctatgagtgggcccctagtgtcagctctgtaacagggtcagatcccaggttctatgaccaataagtacttaaaaaaacaacacaagaaacttcgagggcgaccattgccagagtgcggagcaaagacgcgaccggaacgggccatgggccaaagctggtccgagacccaatttcttggccaagagggggaaaacgcgcggtcccctaaagaggccgaataaatccgaaaccaggaaccgctag

SEQ ID NO: 350383 - DNA, 2752 bp, Homo Sapiens
gcaggtccccgccctcgctgcgtttgcgcttgagcgccgataatttggtggcggcgtccggagggtgctggtttgttctcggtgaacggcgcgcggggtctctcctgagtgcgagctacgggaccttcgccatgccggggatggtactcttcggccggcgctgggccatcgccagcgacgacttggtcttcccagggttcttcgagctggtcgtgcgagtgctgtggtggattggcattctgacgttgtatctcatgcacagaggaaagctggactgtgctggtggagccttgctcagcagttacttgatcgtcctcatgattctcctggcagttgtcatatgtactgtgtcagccatcatgtgtgtcagcatgagaggaacgatttgtaaccctggaccgcggaagtctatgtctaagctgctttacatccgcctggcgctgttttttccagagatggtctgggcctctctgggggctgcctgggtggcagatggtgttcagtgcgacaggacagttgtaaacggcatcatcgcaaccgtcgtggtcagttggatcatcatcgctgccacagtggtttccattatcattgtctttgaccctcttggggggaaaatggctccatattcctctgccggccccagccacctggatagtcatgattcaagccagttacttaatggcctcaagacagcagctacaagcgtgtgggaaaccagaatcaagctcttgtgctgttgcattgggaaagacgaccatactcgggttgctttttcgagtacggcagagcttttctcaacctacttttcagacacagatctggtgcccagcgacattgcggcgggcctcgccctgcttcatcagcaacaggacaatatcaggaacaaccaagagcctgcccaggtggtctgccatgccccagggagctcccaggaagctgatctggatgcagaattagaaaactgccatcattacatgcagtttgcagcagcggcctatgggtggcccctctacatctacagaaaccccctcacggggctgtgcaggattggtggtgactgctgcagaagcagaaccacagactatgacttggtcggaggcgatcagctcaactgtcacttcggctccatcctgcacaccacagggctgcagtacagggacttcatccacgtcagcttccatgacaaggtttacgagctgccgtttttagtggctctggatcacaggaaagagtctgttgtggtcgctgtgagggggaccatgtctctgcaggatgtccttacggacctgtcagcggagagtgaggtgctggacgtggagtgtgaggtgcaggaccgcctggcacacaagggtatttctcaagctgccagatacgtttaccaacgactcatcaacgacgggattttgagccaagccttcagcattgctcctgagtaccggctggtcatagtgggccacagcctcgggggcggggcggccgccctgctggccaccatggtcagagccgcctacccgcaggtcaggtgctacgccttctccccaccccgggggctgtggagcaaagctctgcaggaatattctcagagcttcatcgtgtcactcgtcctggggaaggatgtgattcccaggctcagtgtgaccaacttggaagatctgaagagaagaatcttgcgagtggtcgcgcactgcaataaacccaagtacaagatcttgctgcacggtttgtggtacgaactgtttggaggaaaccccaacaacttgcccacggagctggacgggggcgaccaggaagtcctgacacagcctcttctgggggagcagagcctactgacgcgctggtccccggcctacagcttctccagcgactccccactggactcttctcccaagtacccccctctctaccctcccggcaggatcatccacctgcaggaggagggcgcctcggggcggtttggctgctgctctgctgctcactatagcgccaagtggtcacacgaagcggaattcagcaaaatactcataggtccgaagatgctcaccgaccacatgccagacatcctgatgcgggccttggacagcgtggtctccgacagagcggcctgcgtctcctgtccagcacaaggggtctccagtgtggacgtggcctgaccagggccactggaaactgtcccaggaacgatggactcacgcttttgtccttaaactgacttaccatccgaggagttcccatgacgccaaaacagcgaatgtccatcaacaggaatcggatgggaacagaattccatggtctcaatgacttaagtttatgggaagtcattgtggccataatggtagcagaagtagcgagcacgctcaggtgataggacgactcctgagacccagcgaccgtggagacagcctcgggaagccctggcccgtgggatggatcccttggctgtctgaggactgctccagaagtgcggggaatccaggccccacccagaaagaccgtgaaacagttccctttagcctccccacccccaagggcaggctctttttcatcccaactcaggtttacaaggcgggggttttggttttttcaaactgggggctttcctgggaatgtacaaatgggaaactgttgttgaaaggtgcccggccctggggggtttttctccctggggcgggccacccaagggccagccccctggggctctgggcttgggggattgaaaaacccaaaaccccgatccggggaaaagtaaagtggg

SEQ ID NO: 350384 - DNA, 472 bp, Homo Sapiens
  misc_feature (247)..(247): n is a, c, g, or t
  misc_feature (425)..(425): n is a, c, g, or t
  misc_feature (432)..(432): n is a, c, g, or t
  misc_feature (435)..(437): n is a, c, g, or t
atacaccactgctcccagcccagatcctgtttcctccctgtgacatttcccgcacttgctgcagccatttgctttcttagacatcacagagtcctagcccagaatctgatcagatggtggaaggagaacttcccagcaacagcatagaatgccctgcactgagggtgcaattcctcccggctctccacaggatctcagggacaggccccgtgtcctgctggaccctctcaacaagggcacccgcttnaccttgggtttattgcagtgcgcgaccactcgcaagattcttctcttcagatcttccaagttggtcacactgagcctgggaatcacatccttccccaggacgagtgacacgatgaagctctgagaatattcctgcagagctttgctccacagcccccggggtggggagaaggcgtagnatccttnaannngggtaggcggctctgtgtcatggtggccagacagg

SEQ ID NO: 350385 - DNA, 1687 bp, Homo Sapiens
  misc_feature (448)..(475): n is a, c, g, or t
  misc_feature (712)..(712): n is a, c, g, or t
gctgttttcttattcttgcttcaagactatgacagatttgaaagagaattctaaagcagatttagagaacctgcttctcttcttatctcctaatccctaaattgtaatttagctcttatctgtattgttgttttgttttggtaaagggatgatttttacattgagttttaaagtagaataagaaaagcttctaaaaacttgcattgtgctagggatctgccctatatctttgcctctggtgtttcgttgttgttgttattgtttgtttgtttccaaagaagttggagttaaggacacaatatatttgtacccctagactgaatgggtgagtattccatatgaggatctgggtaatcctctttgcaacccacatttggtcttcagagacactggcattttgaagaaacatatgatatagctgtttggaaataaattcatctatgttacnnnnnnnnnnnnnnnnnnnnnnnnnnnnatgagcaggagatcttaattgacagaaactcattggtggttggagtggccaatgggcacgggaaaaagtatccagtaatcagaagaattgtatctgggttatgtaatcttatgcacattccattgtctttgccaagcccagaagccatgttgtgttcattgttaagaaatttgatagatttacccagcttttctatgtattttgacttattgaaaatatgtaacaactgagtcgggntgcaacactggtggggtagaatcgactttccctgaaggtgacacagatgtcagaattgtgtccagggatttaatttagacccatactgtccaggagactgtctctagttggatctctgtgctgactgactgacagacagactttagtgtctgtgtgctgactgacagactctagtagtgtctatatgttgaccaactggtagaccaggaggatctgtgtgctgattgactctagtaggatctgtttgtcactgacagactgtagtagtgtctgtgtgctgactgatagatagactatagtaaaatttgggtgttgcctgactaacggtctagggtctgtaagctgacagtctgcctgctttctgattgtatccattgaagtgtatgtacattatggtaattctctgtctattaaatgtgtctaacaaaggaaggaattaagcactccacatgttttctttataggggagttctgtacactatgattttaaatagatattgcttatatagtagtggccaaattctcattattttgtacaagataaaggttatgcatcacttttatggtattttgtgaactcagctaagggaatgcctgttcagagcttggagttgttacctttacttgaagtcatctcatccagtcccctgctttagggcaggacttcagttccactgtacatttctgaagcttttgtgtccccagcttaccctgttctggaatgttgtattccattggacaggccttgtttttttagtcagccatgcatttggattttacgcctaatctagtaagtaaaaatgagaagaaaatttggcatttaaaaattgattttaagggttggcaaagtttattgtcagaagcctttactgaattttggaacactggttacctacccaaggtttggatcgaatgcttatggccgttttttattattggaccaacaaaaataaattatccggtaggggatgtttt

SEQ ID NO: 350386 - DNA, 926 bp, Homo Sapiens
  misc_feature (73)..(121): n is a, c, g, or t
cttctctattatgtttaatcaattgcaagcaaatagatttttctttgtaacaatttgttctgcagaaggctgnnnnnnnnnnnnnnnnnnnnnnnnnnnnnnnnnnnnnnnnnnnnnnnnngtctggagaaatcacttagactctgtgtgcctcttctacattgcattctgctctgctatgttacctgctaggctggcttctttggactccctatatgatagatgatgtgaaaacctaaattacttgcagcatagtattacttctttgatgttctcattagcataatgttatttttgaaaaggaaagatactatcacataagttttcctcatctgttgtgatatacaccaatggataaactaacggaaactgctttttgacattaaaagacaggagaaattatatttaactaagtaaaagttaagtcagaattacttgggtgatgtgattcaatttagttaaaggatgatatagagaaaatacattatttagcattatttcttcagctataatgaattgctatagaaatcaggcagatctttctaatgtgtattgattggtcttttcagctactctgaacagattactaaggccatctcctcatctctaagggagaaaaatagtctgtagatgaataatgtaaggtaaagagttgcatgtcagtctttgtaattatttacactttaactttctccagaactcagacatgatttcaacatggtgttagatttgtgcattttattttcctgaccacctcattccagccaatgtatggttatccactctgtgtgccaaaaccaatcatgcctttcacggccctttagttcagagaagttctgcactgatttttagtctcttgatgtctcaatcttacatgtataccaatcacaatggaataaagtgttgagttgtactgtgaaaaaaaa

SEQ ID NO: 350387 - DNA, 1415 bp, Homo Sapiens
  misc_feature (1096)..(1141): n is a, c, g, or t
aaaagagacatcatgtctgagaataattactggtagtctaatatgagccagagtaaacagctcctcatggtcaatgaacatgttcaggaagcgatcaccttgatgcttgaacccaaccccagacagtggacaattctactttgaaatatccgtgaatatttactgtgggatccaatttaaacttctttcttctctagcctttaaattacacaactttgaactgacacggatctcttacaaagaacaatgcggcactgaaggaagagatgattcctttactcaaacctgcaggaatcagcctattaacaggcaggggaaacggtactttccaatgaatggtaactgatccaggcacattatcacacttcctagtcatctccacctttcctgtattgcctgtggcttgttgtttaagattaagaatcaaagagattaagaagtatcacttcaaatcttgctctgctcacttctatgtttgcagtcaaattattccttatgttggtgacctaaagagaattactttcattcatttcatttcccccgtagcagatggaagtgagaaacctctgagaaaatgaaaacatccttaaccactatctttcccttttatttgattattttatgtcagaaatttgcaaaagtttttttctcctccttctcttccttgttgcttaactttttaattcatgccatatgcagatatccaattatgtgcatcctgtgaataaaccacgtcttggtcactgtcatattttgaaccatctcatcagagatgaataatatctttttaccagagagagaacgaatgttagccacatgcccaagttaacaaagaaaaaatgttctcaaggttgtccttttgggttaaatctggcccttccttggcaaaagcaaaaattctccctgtgagagctcaacatctcaaatacaaccacaggaaaaatggcccaatctgccagtttaggcttaccagcatataatttttaatatctttacttctatcatcccaaatcaaagaactcttctctattatgtttaatcaattgcaagcaaatagatttttctttgtaacaatttgttctgcagaaggctgttnnnnnnnnnnnnnnnnnnnnnnnnnnnnnnnnnnnnnnnnnnnnnntgtctggagaaatcacttagactctgtgtgcctcttctacattgcattctgctctgctatgttacctgctaggctggcttctttggactccctatatgattgatgatgtgaaaacctaaattacttgcagcatagtattacttccttgatgttctcattagcataatgttatttttgaaaaggaaagatactatcacataagttttcctcatctgttgtgatatacaccaatggataaactaacggaaactgctttttgacattaaaagacagg

SEQ ID NO: 350388 - DNA, 1199 bp, Homo Sapiens
  misc_feature (41)..(41): n is a, c, g, or t
  misc_feature (857)..(938): n is a, c, g, or t
gcttggtacccgggtccggaattctccgggatgcaaatatnaggggaaaatctttgaaatgaaagctacaaatacatggtgagaagaaaaaaatggatttttttagcaaataattaactaagcttctaaatgcctagctccctcccccaaaggcgctttcccccgatggaggcaccggcttctgtctcggatgtttggcgcacgtgagtttgtatgagtttgtaccggagtgaccccggcagccactgcccacctcccctctacccaggggcctgaaaagaggggctgccctcctgcgccaaggcagacacaagctgcgggctgtgcggtcctagtagtgtgacgtttcagttaatagtggtggtcttattttcaactatgctttcagtctctgttgactaaatacgacgaaaattcatactttatgcaggagatttctaaaaatttaatgtttattaatagtttatgaatatcaagatacctcattgaatccctaaatttaaaagcagtccagtaaaaggttaactgtataaagaatctatgactttttgagggaagtgtgatatattaacaaatataaccaattctaaatttgttttagctctaacctcatcaaaccaaaggcacagatttgtgtacaatatacccattgaatgtatatcctgagaaaaattggggccaaagaagcaggaaaatctcaaagctctaatggcagcataaatcaaagaatttcacaggctagtgtttttatccatagccattgctcccttgtcaagtgtctcacaaggacatggaagaatgtgttatgttcatcttggaatcatagccaaaaagtctgcaaaaccccagggtcaagnnnnnnnnnnnnnnnnnnnnnnnnnnnnnnnnnnnnnnnnnnnnnnnnnnnnnnnnnnnnnnnnnnnnnnnnnnnnnnnnnnaaaggatcagcctggacagccctctaaactcccttacagctctcagcctaagagcgcagcactgaacagcctcatcattccacttttcatgggaaatatatttcacaccattgcctttgtgtagagaaatatttcttttcctgtgttaatgagctatgtactgaatataaaccagtgcatttaaagtaatatcttttgtgcacctctaaatgtgtttggaattgtgtttgttctcatagaatatacaaaagtactgattct

SEQ ID NO: 350389 - DNA, 485 bp, Homo Sapiens
  misc_feature (11)..(11): n is a, c, g, or t
  misc_feature (45)..(45): n is a, c, g, or t
  misc_feature (311)..(311): n is a, c, g, or t
aaagaaatcanggtagaaattgaaccttcaaaaccccaactcaangcctttctaacaccctggggtgcagctgcaaaaaggcccaaacgtggaaaaggcctgtatcctgcccagtgtccctccgtccccagggggctgtgctggcacagacctgagaatggggacacaggtcattcagagctcccaggccctggaagcagtgcctcttggtgcaacaagaaacttctccctcaccccctcctttaccctcagatttggagatggtaaccaaaggaagcagctgggacaggtggagaaggaagtaggaatgnaggtgcacggcgaccccgtgctcctcagggccctcccctgcctctgggtggcactgctttttatagggtggggcaaaattagcaaaaaacaaaaaccaatgacaaccaaactgaaaccgaaacgaaaaatcaacaaacactctgtcctctatccctccaaagaatgaaaatcag

SEQ ID NO: 350390 - DNA, 810 bp, Homo Sapiens
cttcctgggccgtctgtcactgagtcaccctggtttccattggcagtgccgcctctccctcactcggatgcttctgtgcagccacacgggctgtgtgtgcaacctcaggggacgcatcaaccacgtcctcgggctggccgtagagacatggcctccgcctgagtgtggccgtcagactctccctggtactataagccctcggctgagggggcagaggggcagctaggatcatggccgtcagctcccagaggggagcccccatcctccaggccgtcttcccgagcctgctccccagcctgcgcctttcctgacttccctccaggctcctgttgctggcgaccacagaaccagcctcagggctttcctgtccttcctgtcaggggtcctttcccagtgggagctctgggcgggtgggcctgtcccaggagagtcacgtagcttgtttaaggagaagatccccatggctcttgtgtgcacatgtggggcctctctccccaggggctgctgtgagcctgggaagtcccaggtggtgtctcatgccccagagagtagccccctgtgcacctcgcacacgaacacctgcgggtctgctgactttctcctctgcctcagccaagtctcccacgcggacaggtggaaacttgaatgaaggcctcacaggattctaagtccccggtctgacacccacctggctcagcacctgcctcctcagcttccagttgcacgggtggccgcaggtcaagggtgtgacggcgagcgtggccagtccggtcagaggtctctgcatcctccacacctctggccaggtga

SEQ ID NO: 350391 - DNA, 954 bp, Homo Sapiens
  misc_feature (928)..(928): n is a, c, g, or t
gacaagccttggaagacacccctgcaacggccggcatttcagtttgtggctgggtctgccctcacctccccctgcagcctgggatgggtcaggaatggggatggtgggggatctaaggtcccctcgacccacatcccctctccctctgccccagctcacactgctggtggtccaggtcagcatcctctactacgggggccaccttgtcatctcaggccagatgaccagcggcaacctcatcgccttcatcatctacgagtttgtcctgggagattgtatggagaatgtctccttcagcctgtcccccggcaaggtgacggccctggtggggccctcgggcagtgggaagagctcctgtgtcaacatcctggagaacttctaccccctggaggggggccgggtgctgctggacggcaagcccatcagcgcctacgaccacaagtacttgcaccgtgtgatctccctggtgagccaggagcccgtgctgttcgcccgctccatcacggataacatctcctacggcctgcccactgtgcctttcgagatggtggtggaggccgcacagaaggccaatgcccacggcttcatcatggaactccaggacggctacagcacagagacaggggagaagggcgcccagctgtcaggtggccagaagcagcgggtggccatggcccgggctctggtgcggaaccccccagtcctcatcctggatgaagccaccagcgctttggatgccgagagcgagtatctgatccagcaggccatccatggcaacctgcagaagcacacggtactcatcatcgcgcaccggctgagcaccgtggagcacgcgcacctcattgtggtgctggacaagggccgcgtagtgcagcagggcacccaccagcagcttgcttgccccagggcgggcttttacggcaagctngttgcagcggcagatgtttggggttt

SEQ ID NO: 350392 - DNA, 865 bp, Homo Sapiens
tctgcctctgagctgccaactcagagcccagtctgctttcttgttctgaagggctactaagggttaaggatcccaaagcttgcagagactgaccctgtttaagctttctatcctgttttctgagtgtgaggcagggaatgggctggggccgggggtgggctgtgtgtcagcagataattagtgctccagcccttagatctgggagctccagagcttgccctaaaattggatcacttccctgtcattttgggcattggggctagtgtgattcctgcagttcccccatggcaccatgacactgactagatatgctttctccaaattgtccgcagaccctttcatccttcctctattttctatgagaattggaaggcagcagggctgatgaatggatgtactccttggtttcattatgtgagtggggagttgggaagggcaactagagagagaggatggaggggtgtctgcatttagtccagacactgcttggctcgctccccgagtcctcctgtttctgacttcctgcataactgtgagctgaagggtttcctcatctccccatcttaccccatcatactgatttctttcttgggcactggtgctacttggtgccaagaatcatgttgtttgggatggagatgcctgcctcttgtctgtgttgtacttatatgtctatatggatgagcctggcatgaacagcagtgtgcctgggtcatttggacaaatctcctcccaccccccaatccactgcaactctgctgttcatacattacccttggcagggggtggtggggggcagggacacactgaggcaatgaaaaatgtagaataaaaatgagtccaccccctattggattctttgggg

SEQ ID NO: 350393 - DNA, 2477 bp, Homo Sapiens
  misc_feature (127)..(127): n is a, c, g, or t
  misc_feature (226)..(287): n is a, c, g, or t
ccgggatcgccactcgggaggcggatcccgtgggcctgaggaggcttcccccgcccggtttgctttccctccctcgctggcgctgccgcgagtccaccgagcggcctctgaggagcagccgcaggangaggaggaggtcgtcgggggcggcgggcggagaccgcgctctcgcttccccggcggcggcaagggcaggacaatggaggtggcggtggagaaggcggtnnnnnnnnnnnnnnnnnnnnnnnnnnnnnnnnnnnnnnnnnnnnnnnnnnnnnnnnnnnnnnagaacgaggccgagagtcggcagggcccggactcggagcgcggcggcgaggcggcccggctcaacctgttggacacttgcgccgtgtgccaccagaacatccagagccgggcgcccaagctgctgccctgcctgcactctttctgccaacgctgcctgcccgcgccccagcgctacctcatgctgcccgcgcccatgctgggctcggccgagaccccgccacccgtccctgcccccggctcgccggtcagcggctcgtcgccgttcgccacccaagttggagtcattcgttgcccagtttgcagccaagaatgtgcagagagacacatcatagataacttttttgtgaaggacactactgaggttcccagcagtacagtagaaaagtcaaatcaggtatgtacaagctgtgaggacaacgcagaagccaatggggttttgtgtagagtgtgttgaatggctctgcaagacgtgtatcagagctcatcagagggtaaagttcacaaaagaccacactgtcagacagaaagaggaagtatctccagaggcagttggtgtcaccagccagcgaccagtgttttgtccttttcataaaaaggagcagctgaagctgtactgtgagacatgtgacaaactgacatgtcgagactgtcagttgttagaacataaagagcatagataccaatttatagaagaagcttttcagaatcagaaagtgatcatagatacactaatcaccaaactgatggaaaaaacaaaatacataaaattcacaggaaatcagatccaaaacagaattattgaagtaaatcaaaatcaaaagcaggtggaacaggatattaaagttgctatatttacactgatggtagaaataaataaaaaaggaaaagctctactgcatcagttagagagccttgcaaaggaccatcgcatgaaacttatgcaacaacaacaggaagtggctggactctctaaacaatgggagcatgacatgcattttgctaaatgggctagtttccagtggcagcagtacagcatgactttatagcaaacgactgattacataccggttacggcacctccttcgtgcaaggtgtgatgcatccccagggaccaacaacaccatccaatttcactgtgatcctagtttctgggctcaaaatatcatcaacttaggttctttagtaatcgaggataaagagagccagccacaaatgcctaagcagaatcctgtcgtggaacagaattcacagccaccaagtggtttatcatcaaaccagttatccaagttcccaacacagatcagcctagctcaattacggctccagcatatgcagcaacagcaaccgcctccacgtttgataaactttcagaatcacagccccaaacccaatggaccagttcttcctcctcatcctcaacaactgagatatccaccaaaccagaacataccacgacaagcaataaagccaaaccccctacagatggctttcttggctcaacaagccataaaacagtggcagatcagcagtggacagggaaccccatcaactaccaacagcacatcctctactccttccagccccacgattactagtgcagcaggatatgatggaaaggcttttgggtcacctatgatcgatttgagctcaccagtgggagggtcttataatccttccctcccttccggatattggactgttcaagtactattatggctggaaaataattgtgagggaaagatccaaatatagaatcatggcccagcccaagaaccaccctttaaaccgaaaagggtcccagtccccccaaattttattagatggcccattctccagggcctttggcagggaactcggtttactaattgacctaggtggtaaaccccctccccaagtagcgcttctccccctatgtggcgcccccccaagcgcgttgtggacaaacctccaagaaaacctcctttgggttccttttcccggccaataacccaatccggggggattggacctcttataacaaccacaaagttcccccaatgggggtcattgcctctggggaaaccacactttctccgataaaaaccccaggtaacaccaccctgggcaccaccccccgggaaaaacagctagagaaatccccccccggtcgtgctatacacgggaaaaccccgcccacttcccctgtacaa

SEQ ID NO: 350394 - DNA, 1138 bp, Homo Sapiens
aaatcacgggggggtggtcaatggaaactctcttattcgaaagtgtagggacgcgaaagcacgcgttaatggccccttcggagggccgctggtattctcccccccgaaggttgaaacaggggggccccctttcctggcaagccaaaggtccccccggggagccgccaagttccttttgaattgcgggaaaagcccaaagggcccaggccccccttgagggtgcttcccagtggcggcagctcctcaatcacccacttgcaggccgtgcccacgctgtcacactcctttccacgggcagacagagccttaaaggttcccccgggactttcttgagaggcccaggctcctcaggtggggaactatgtgcccggctttccccatcttcatcagggatggacactttcccttgcctcaggtcacccacttcctcctgggagacgttttaacaactcattgttggccctggcaagacccagagcagcttcagccaaacccactgccttatcgacccgctggtagataacatgcaggagctgctctgagctctgaacagccaagccatgtccagtcactgtgatgggggtgctgggaggaggattcccaccctgggagcctgtgttgcctccattagtctcactcttacaggcgcagcagcagcatctggcctcgctgccactgggaggggagaagagaatggtggcactgaaggacatggcggatggggcagtaacaaccacgcttacactgctgggccgctccaacaggtaggaagcatcaacttctctggactcactttcctttctcaatgaggatggtcagaggagcccaggccccaagctgtagggtctgtgaaagaagagtaaacaagccatgaagaagcacacagtccatggcggcctctcctcggcctgcagaagggagacaggtgccttctatttgcagatcctgtgctctcctagcacatcacaaatcaaggccttcctgatgaacggtttcagacggtagagagcattccttctgccccccagcatggaacccccgactagtgcaacctaaggaacagggaagggattcagaaggaccttccggcatccgaaggtcgtatggctctttgtattcgtgtgtgtgcaaaaaaaag

SEQ ID NO: 350395 - DNA, 1030 bp, Homo Sapiens
gcctgggtggcgaattcggcacgaggaagagccatacgaccttcggaccctacagcttggggcctgggctcctctgaccatcctcattgagaaaggaaagtgagtccagagaagttgatgcttcctacctgttggagcggcccagcagtgtaagcgtggttgttactgccccatccgccatgtccttcagtgccaccattctcttctcccctcccagtggcagcgaggccagatgctgctgctgcgcctgtaagagtgagactaatggaggcaacacaggctcccagggtgggaatcctcctcccagcacccccatcacagtgactggacatggcttggctgttcagagctcagagcagctcctgcatgttatctaccagcgggtcgataaggcagtgggtttggctgaagctgctctgggtcttgccagggccaacaatgagttgttaaaacgtctccaggaggaagtgggtgacctgaggcaagggaaagtgtccatccctgatgaagatggggaaagccgggcacatagttccccacctgaggagcctgggcctctcaaggaaagtcccggggaagcctttaaggctctgtctgccgtggaagaggagtgtgacagcgtgggcagcggcgtgcaggtggtgattgaggagctgcggcagctgggagcagcctcagtggggcctgggcctttgggcttcccagcaactcagagggacatgcggcctcccagggtgcacgctggctgccaacgaggcgggcccccctgctcaatcctctggtggatgattacgtgggcctctggaggggcagtacagcgagttctgggtccccggcttatgccaaggcaaatctcaccaagcccacacaaatgggcaatcccaacggggccaaacccccgaagacagggaccagaaaaattgggaacacaagcttggcaacccaaccccggcccccttaagaggaaatggcctccaattggccgcctgccttgggcccttgggaaaaaatgggcccctttggggaaaaa

SEQ ID NO: 350396 - DNA, 507 bp, Homo Sapiens
ccatgaccccaacagattctcttcccatttccctccctgccacccagcaatctcaaatgcaacttgcaggggacactaagacagaccatacacaccagcagtggcgcccggagacaagccctctccaaccacggcgtggagacagctgaccacagtgcaaacggatcgcgatagcagggctgggtgttatcaccccagtaaaccagtgtccctggctcgcctgtgccccagcttgggtatcgcgatcccgttctccccatcgtgacatccagtccaggccttcaggacagcgagcccggtttccaggcaggtgcttgtcgaaggcctggctggctgtaccgacaggcgggcactcagtcagcagcctggacgccccaactgccatcctcatcgccactcttgttaatacttttgccactgcacagtctatcacagcctctaatcccggtcctgaaacagcaatcatccattcagggggactcctctcattttccaaacaattggcca

SEQ ID NO: 350397 - DNA, 2235 bp, Homo Sapiens
  misc_feature (168)..(256): n is a, c, g, or t
  misc_feature (569)..(590): n is a, c, g, or t
ggggtgtggggggggcgcccgcgagagcgggggccaaaaagcagctggtaccggtccggaattcccgggatggcggcggcgctgtggtccgtgggtccgccggtccgtgggtctgcccggccgcccggccccgccctgccccccggggcggctcggctccatggcccnnnnnnnnnnnnnnnnnnnnnnnnnnnnnnnnnnnnnnnnnnnnnnnnnnnnnnnnnnnnnnnnnnnnnnnnnnnnnnnnnnnnnnnnnatgggggacggaaccgtccgcagccgccggagccgggagccctgcccaagtcggagcggcgtcccctgctgagccccgagcgccgggccagcagccggatgcccgggcccactgggcgggccagtggccgcctgcgggatgagcagactgctgggggggacgctggagcgcgtctgcaaggctgtgctccttctctgcctgctgcacttcctcgtggccgtcatcctctactttgacgtctacgcccagcacctggccttcttcagccgcttcagtgcccgaggccctgcccatgccctccacccagctgctnnnnnnnnnnnnnnnnnnnnnnactgctcccggcccaacgccaccgcctctagctccgggctccctgaggtccccagtgccctgcccggtcccacggctcccacgctgccaccctgtcctgactcgccacctggtcttgtgggcagactgctgatcgagttcacctcacccatgcccctggagcgggtgcagagggagaacccaggcgtgctcatgggcggccgatacacaccgcccgactgcaccccagcccagacggtggcggtcatcatcccctttagacaccgggaacaccacctgcgctactggctccactatctacaccccatcttgaggcggcagcggctgcgctacggcgtctatgtcatcaaccagcatggtgaggacaccttcaaccgggccaagctgcttaacgtgggcttcctagaggcgctgaaggaggatgccgcctatgactgcttcatcttcagcgatgtggacctggtccccatggatgaccgcaacctataccgctgcggcgaccaaccccgccactttgccattgccatggacaagtttggcttccggcttccctatgctggctactttggaggtgtgtcaggcctgagtaaggctcagtttctgagaatcaatggcttccccaatgagtactggggctggggtggcgaggatgatgacatcttcaaccggatctccctgactgggatgaagatctcacgcccagacatccgaatcggccgctaccgcatgatcaagcacgaccgcgacaagcataacgaacctaaccctcagaggtttaccaagattcaaaacacgaagctgaccatgaagcgggacggcattgggtcagtgcggtaccaggtcttggaggtgtctcggcaaccactcttcaccaatatcacagtggacattgggcggcctccgtcgtggccccctcggggctgacactaatggacagaggctctcggtgccgaagattgcctgccagaggactgaccacagcctggctggcagctgctctgtggaggacctccaggactgagactgggctctgttttccaagggtcttcactaggccccctagctacacctggaagtttcagaacccactttggggggcctcctgcctgggcaggctcttcaagtgtggccctctttggagtcaaccctccttcccgaccccctccccctagcccagccccagtcactgtcagggtcgggccagcccctgcactgcctcgcagagtggcctgggctaggtcactccacctctctgtgcctcagtttcccccccttgagtcccctagggcctggaagggtgggaggtatgtctagggggcagtgtctcttccagggggaattctcagctcttgggaacccccttgctcccaggggaggggaaacctttttcattcaacattgtagggggcaagctttggtgcgccccctgctgaggagcagccccaggaggggaccagaggggatgctgtgtcgctgcctgggatcttggggttggcctttgcatgggaggcaggtggggcttggatcagtaagtctggttcccgcctccctgtctgagagaggaggcaggagccccagggccggcttgtgtttgtacattgcacagaaacttgtgtgggtgctttagtaaaaaacgtgaatggagc

SEQ ID NO: 350398 - DNA, 390 bp, Homo Sapiens
gctcggtaccacgctgggcgatcaaccccgccactttgccattgccatggacaagtttggcttccggcttccctatgctggctactttggaggtgtgtcaggcctgagtaaggctcagtttctgagaatcaatggcttccccaatgagtactggggctggggtggcgaggatgatgacatcttcaaccggatctccctgactgggatgaagatctcacgcccagacatccgaatcggccgctaccgcatgatcaagcacgaccgcgacaagcataacgaacctaaccctcagaggtgaccccagcaccctcaccccttactccccagaggcaacttcccaatatccccaactcttgaccccaagtggcccaatccttgatcgcccagcgg

SEQ ID NO: 350399 - DNA, 1282 bp, Homo Sapiens
  misc_feature (1050)..(1050): n is a, c, g, or t
  misc_feature (1100)..(1100): n is a, c, g, or t
gtgaatgtgacttggaagagcagtttgggatttttttcattgcctggggatgagagggagagacaacgtgtgtcttacacatctcccaacagccgacttagatgtgatccgttctcccagagggagcaggtttctttgaacttttcctttttatgtacagcatagtgctgagcagatcactgcactgtgcaggagttttaacgacagtcaggccaacggcatggaaggaccgcgggagaatcaggatcctcctccgaggcctctggcccgccacctgtctgatgcagaccgcctccgcaaagtcatccaggagcttgtggacacagagaagtcctacgtgaaggatttgagctgcctctttgaattatacttggagccacttcagaatgagacctttcttacccaagatgagatggagtcactttttggaagtttgccagagatgcttgagtttcagaaggtgtttctggagaccctggaggatgggatttcagcatcatctgactttaacaccctagaaaccccctcacagtttagaaaattactgttttcccttggaggctctttcctttattacgcggaccactttaaactgtacagtggattctgtgctaaccatatcaaagtacagaaggttcctggagcgagcctaaactgaaccaaacctttcaaggctttttctggaaccccagaaaccccacccaggcaccattccctccacgcttggagtccccccccaaacgaagccgggtccaaaaaaatgctctaagctcccccccgccaccttcataggacctggctgagcgtggccctgccctctgccgaggtgtagtagcagcatcccgcccgcgccgtacccgccctattctccatcccacccactccgcccagcgttaataccgcccgagattcccacgccccggttctcggtgggccgcgaggcgtaccagtctgtgctattgcgctttcatgggctattctctaccggccctcgcaccgggtgtcggtcgcatcttgacgcattgacctggatggtagtcgcccgcaccncccacctctcgctctccactccttatacttctagcaaacgcctctccctntccgtcatcccgaactcgaatgccgtatctcggcgatactgagccattccccctgctactctcgcattcataccgctgtggatatagccggtggtcccgtcctccagcggcccgacgagttaagttacccgcctacgagcccacgtttaccccgcatgaccgcacgcacgactcggaaggcc

SEQ ID NO: 350400 - DNA, 844 bp, Homo Sapiens
cggtccaggggcgtgtcctccctgcggacgcgggtagagtagcaccagcgcgtagagggtgcccagtgctggcaaccacgtagcccgatgaacaccagcgtggcgtcggcagcttctgcgttctgcatcttggcgcactctagcgcgcgggtggacacatggctgcagatgtagaagagcagcgaggagaagctggtcagcagcgcgccaccccacacgaagccgcacacgtgccgcgtgttgtacacgctggccatgtaggtccgcggcagtgcacgctcgatgtagtggtcgaggctcagcagggcggtggagtacatggccaccagtgaggacacattgaaggggatctgcagtgccacgtggacttcgccgcccacactccacagcgcccaccgggagctcggggggccgagcaggtgcacaggggccagggcgctgagcaccaggcctgccactgccatgttgacaaagtacacgtccggcatggtcatgctggccttgctgtgtaggttggccagcaccagcagggcgttgtagcacaggcccactggcacgcccaccaccaggcccagcagcgacaacagtgacagccccagctgcaggtcctggcaggcaggcagctcctccaccagccctgtgccgttgaaccagctgcagctccacatggcggccggcgaggctccgcgaccctttactttgtggcccaagcctcttggtgctgtgggcctggccactgtcggtgagcagcatggcgggacagaggtggccaccagagctctggtgaggacctgcgcgctgctgcgcttctctgcaaacccgcaggctcttatcagcagcggcc

SEQ ID NO: 350401 - DNA, 1853 bp, Homo Sapiens
cgcgccgtgagccccgccgcctccgccagcccgagctgcccgctcctggcggcgactgcgccggccgccgcccagcaagccgggtcgctggagcctcgccggccgccatgtgagagctgcagctggttcaacggcacagggctggtggaggagctgcctgcctgccaggacctgcagctggggctgtcactgttgtcgctgctgggcctggtggtgggcgtgccagtgggcctgtgctacaacgccctgctggtgctggccaacctacacagcaaggccagcatgaccatgccggacgtgtactttgtcaacatggcagtggcaggcctggtgctcagcgccctggcccctgtgcacctgctcggccccccgagctcccggtgggcgctgtggagtgtgggcggcgaagtccacgtggcactgcagatccccttcaatgtgtcctcactggtggccatgtactccaccgcactgctgagcctcgaccactacatcgagcgtgcactgccgcggacctacatggccagcgtgtacaacacgcggcacgtgtgcggcttcgtgtggggtggcgcgctgctgaaccagcttctcctcgctgctcttctacatctgcagccatgtgtccacccgcagcgctagagtgcgccaagatgcagaacgcagaagctgccgacgccacgctggtgttcatcggctacgtggtgccagcactggccaccctctacgcgctggtgctactctcccgcgtccgcagggaggacacgcccctggaccgggacacgggccggctggagccctcggcacacaggctgctggtggccaccgtgtgcacgcagtttgggctctggacgccacactatctgatcctgctggggcacacggtcatcatctcgcgagggaagcccgtggacgcacactacctggggctactgcactttgtgaaggatttctccaaactcctggccttctccagcagctttgtgacaccacttctctaccgctacatgaaccagagcttccccagcaagctccaacggctgatgaaaaagctgccctgcggggaccggcactgctccccggaccacatgggggtgcagcaggtgctggcgtaggcggcccagccctcctggggagacgtgactctggtggacgcagagcacttagttaccctggacgctccccacatccttccagaaggagacgagctgctggaagagaagcaggaggggtgtttttcttgaagtttcctttttcccacaaatgccactcttgggccaaggctgtggtccccgtggctggcatctggcttgagtctccccgaggcctgtgcgtctcccaaacacgcagctcaaggtccacatctgcaaaagcctcctcgccttcagcctcctcagcattcagtttgtcaatgaagtgatgaaagcttagagccagtatttatactttgtggttaaaatacttgattcccccttgtttgttttacaaaaacagatgtttcctagaaaaatgacaaatagtaaaatgaacaaaaccctacgaaagaatggcaacagccagggtggccgggccctgccagtgggcggcgtgtgctagcaaggcctgccgggtgtgccgcagtcaccacagggttctgagaacatttcacagaagtgcctgagacgcggagacatggctggtgttaaatggagctattcaatagcagtgacgcgctctcctcagccaccaaatgtccctgacaccctccccagcccccacagataacatcagctgaggtttttttcagtatgaacctgtcctaaatcaattcctcaaagtgtgcacaaaactaaagaatataaataaaccaaagaaag

SEQ ID NO: 350402 - DNA, 947 bp, Homo Sapiens
  misc_feature (326)..(326): n is a, c, g, or t
  misc_feature (661)..(667): n is a, c, g, or t
  misc_feature (669)..(684): n is a, c, g, or t
  misc_feature (686)..(686): n is a, c, g, or t
  misc_feature (689)..(689): n is a, c, g, or t
  misc_feature (691)..(761): n is a, c, g, or t
  misc_feature (766)..(767): n is a, c, g, or t
  misc_feature (769)..(770): n is a, c, g, or t
  misc_feature (775)..(777): n is a, c, g, or t
  misc_feature (779)..(789): n is a, c, g, or t
  misc_feature (794)..(794): n is a, c, g, or t
  misc_feature (798)..(812): n is a, c, g, or t
gtttgttcttaaaatgcatttaaagaaaaattacccatattgactttcacacctcatataatcagatctattacaaatatatatcggagtgacggtgcccaggatagatgtaatatttcttacagatgctggcacagaggaaataatataccagctaatctagtcacctaaccttgtggttagaattgcaattttaagaccagaaaaatttgaagtctgatcagagatttacaactgttcattatagtggtgccttaggcaatctttccaaagtaaattcagggccccattgctacttatgccatatttggacatacttttttttncttcaattttgtaaacttcctggaaagctgtcttcactaagtatcccctagtctctatatatgtggttagtagtcatggaaatgacacataaagtacgccagaagtttgatggaacgtgttagaaactgttttgtgcttttatggatgtcatacttgacaatacatgtgtaagttactaatatatgaattgatgctaaatatatcttacatttgaattccttttggataaagttatttcttgatgtgacacagtagtgtgttttcatttttattctttacatgtgaccaaaacaatagaaaagttaaaaataaaatatagtgttttaggtggccnnnnnnnannnnnnnnnnnnnnnncnccncnnnnnnnnnnnnnnnnnnnnnnnnnnnnnnnnnnnnnnnnnnnnnnnnnnnnnnnnnnnnnnnnnnnnnnncccanncnnccccnnncnnnnnnnnnnnttggncggnnnnnnnnnnnnnnnaaaaaatttttctcacaccctttcttcggggcgggcggggccccacagaaagaaaagaaaaaaccggccaatccccgtgttcccaaaagaaaaacccccggggccaaaaacaagggcgtgtgtgacctcccccac

SEQ ID NO: 350403 - DNA, 2738 bp, Homo Sapiens
  misc_feature (2450)..(2521): n is a, c, g, or t
  misc_feature (2554)..(2614): n is a, c, g, or t
ccctactccgcctctcgggatcctttaagaggcggggcttggctgccagctccgcggcccgggcaaaaggctgggactttactccgggtggcggcgaggacgagtctgtgctccatcagctgccgcacccgccgcctcccgcccccaaaccccatccccgcggttgagccacgatgagcggcagagtcggcgatctgagccccaggcagaaggaggcattggccaagtttcgggagaatgtccaggatgtgctgccggccctgccgaatccagatgactattttctcctgcgttggctccgagccagaagcttcgacctgcagaagtcggaggccatgctccggaagcatgtggagttccgaaagcaaaaggacattgacaacatcattagctggcagcctccagaggtgatccaacagtatctgtcagggggtatgtgtggctatgacctggatggctgcccagtctggtacgacataattggacctctggatgccaagggtctgctgttctcagcctccaaacaggacctgctgaggaccaagatgcgggagtgtgagctgcttctgcaagagtgtgcccaccagaccacaaagttggggaggaaggtggagaccatcaccataatttatgactgcgaggggcttggcctcaagcatctctggaagcctgctgtggaggcctatggagagtttctctgcatgtttgaggaaaattatcccgaaacactgaagcgtcttattgttgttaaagcccccaaactgtttcctgtggcctataacctcatcaaacccttcctgagtgaggacactcgtaagaagatcatggtcctgggagcaaattggaaggaggttttactgaaacatatcagccctgaccaggtgcctgtggagtatgggggcaccatgactgaccctgatggaaaccccaagtgcaaatccaagatcaactacgggggtgacatccccaggaagtattatgtgcgagaccaggtgaaacagcagtatgaacacagcgtgcagatttcccgtggctccttccaccaagtggagtatgagatcctcttgccctggctgtgtcctcaggtggcagtttatgtcagatggagcggatgttggttttgggattttcctgaagaccaagatgggagagaggcagcgggcaggggagatgacagaggtgctgcccaaccagaggtacaactcccacctggtccctgaagatgggaccctcacctgcagtgatcctggcatctatgtcctgcggtttgacaacacctacagcttcattcatgccaagaaggtcaatttcactgtggaggtcctgcttccagacaaagcctcagaagagaagatgaaacagctgggggcaggcaccccgaaataacaccttctcctatagcaggcctggccccctcagtgtctccctgtcaatttctaccccttgtagcagtcattttcgcacaaccctgaagcccaaagaaactgggctggaggacagacctcaggagctttcatttcagttaggcagaggaagagcgactgcagtgggtctccgtgtctatcaaatacctaaggagtccccaggagctggctggccatcgtgataggatctgtctgtcctgtaaactgtgccaacttcacctgtccagggacagcgaagctgggggtggcggggggcatgtaccacagggtggcagcagggaaaaaaattagaaaagggtgaaagattgggacttaacacttcagggaagtcagctgccggggagaaacttgctcctaaatgaacacataagtttagatcgcaatgaggagtagcagggtagctggttgctagagttacggtggggatcagaaactcttccaaacattttagcactgaggctggggtagcttttggcttttcccaggtctcaggaggtggcctgagtcagcacacatcttcccactcggtagacaggctggcctctccctcactttgagactttggcaactcctgggccacacggcctgcctctttgattactaatgattgtcagtgactcagagcttcctgggacttcgggtacccacccgctgttctccatgcaaacaaagcgccagggaaatgacccacagggatcgcagctgcagggagggccagggaggttgggggtgggagtgaatgctaaaagcagatcgtccagtgcccttttcagtgctaccggccctctcaccaagcagtcctccatgtgagcaaccccggagacaaaaatgctaagtggggatcaagagagcagcactccgaaagggtggttgccactctgagtggcccggggggcccggcaaacccgatttccgactgacctgaaccaggtcttactaagccagtcccctctcttgggggaaggcctcccaactggcgtaacgggatttcaggtcgtcgcgcccgggcacccgggtacggcttannnnnnnnnnnnnnnnnnnnnnnnnnnnnnnnnnnnnnnnnnnnnnnnnnnnnnnnnnnnnnnnnnnnnnnngcccctccaaatccacgccgctacgacccaaannnnnnnnnnnnnnnnnnnnnnnnnnnnnnnnnnnnnnnnnnnnnnnnnnnnnnnnnnnnnatatcccgtgtatccgctctggtgaaccggtcgcccccgcccatgttatttgtagccccccttccgccgttaccgaattgtgtgccgcccccgccctgagtgccgctgatcccccgccgccgcg

SEQ ID NO: 350404 - DNA, 1157 bp, Homo Sapiens
  misc_feature (286)..(383): n is a, c, g, or t
tgaaatgctgatacatctgatctatcatgggaattgcagttagagagagtaaggaataccatttagtcatctatccgttcttcacttagcaggaatatgaaagaaaggcacatgtttaagaggaatacctaaaggtttttctaaattccaacatttaaaaggcaattgtgggctatttttattttttaatattttgaaataaagtttagtgtctagggctgggagccaggactgatcttccatttctttttctttgttcccagccatgcttttgtaacttgccagnnnnnnnnnnnnnnnnnnnnnnnnnnnnnnnnnnnnnnnnnnnnnnnnnnnnnnnnnnnnnnnnnnnnnnnnnnnnnnnnnnnnnnnnnnnnnnnnnnctctattcatttgctcctttattctttcctgtattctctgtatgtccagcactttgtagccatgggaggaaagggactataaaagtgtacaatgttaatggaatgatacggtacctgaaagccttgttttctagtaagaaaatgctaccttgctgtacatacttataaccttgtatttggaaatgagaaataggtttatattttcagatctctcaaaaatcacatcatttgaccaaagaataatttaagacacatagaacagatttttttaatttatattttcatcctgaccagcttagttctaataatttttagttgtgagtgattaaaaaactttgggatcaattttgggtcaaacatgccaactttgtaggtctgagtgacagggcaagggatttttggggtttaaggatgcacttttaggcacacatttgtatttcccttggcatatcagattgagctaatggtgatgttatttcaatctaacagccaccaatctgaaattgtatttcaaatgttgattctgtagttctttaaataataatgaagctcatcttatacattttgctttcaccaattgattccttcttcttttagcccactattaaaacatttcttactgaatggttcatgtaggcttgctgaacagcacgcattacttgcttcctgaagagttcccccattcatccatttgtccattagttgctgtggatatcaagttagaaggaactgacatccatagactgaacatctaagtgaatgagtattatcaag

SEQ ID NO: 350405 - DNA, 983 bp, Homo Sapiens
gcggccgctatcccctccggaccatggccgacgacgacgtgctgttcgaggatgtgtacgagctgtgcgaggtgatcggaaagggtcccttcagtgttgtacgacgatgtatcaacagagaaactgggcaacaatttgctgtaaaaattgttgatgtagccaagttcacatcaagtccagggttaagtacagaagatctaaagcgggaagccagtatctgtcatatgctgaaacatccacacattgtagagttattggagacatatagctcagatggaatgctttacatggttttcgaatttatggatggagcagatctgtgtttttgaaatcgtaaagcgagctgacgctggttttgtgtacagtgaagctgtagccagccattatatgagacagatactggaagctctacgctactgccatgataataacataattcacagggatgtgaagccccactgtgttctccttgcctcaaaagaaaactcggcacctgttaaacttggaggctttggggtagctattcaattaggggagtctggacttgtagctggaggacgtgttggaacacctcattttatggcaccagaagtggtcaaaagagagccttacggaaagcctgtagacgtctgggggtgcggtgtgatcctttttatcctgctcagtggttgtttgcctttttacggaaccaaggaaagattgtttgaaggcattattaaaggaaaatataagatgaatccaaggcagtggagccatatctctgaaagtgccaaagacctagtacgtcgcatgctgatgctggatccagctgaaaggatcactgtttatgaagcactgaatcacccatggcttaaggagcgggatcgttacgcctacaagattcatcttccagaaacagtagagcagctgaggaaattcaatgcaaggaggaaactaaaggtgtctttctccctcttactactctccctatcctccacctcatc

SEQ ID NO: 350406 - DNA, 1947 bp, Homo Sapiens
  misc_feature (850)..(850): n is a, c, g, or t
  misc_feature (907)..(915): n is a, c, g, or t
cacggtggccctactggtcttgatgacaggcaaagggacaacttagttgtccagaagcggcactcttccctggaagccgccatgttaataggattactagcctggctccagacagtgcctgctcatggctgccagttcttaccgatcacatctgtcactgccaccgtatatcatctgccagtgcatcagcttaaggggaggtcacgagtgcaaaagaacctgacccttgacaatgagggagaagggacatggaccacctgtctggaattcctggaatcactggcagggtggaggctgggctggggagttagccgcggtgtgcgtgaatggctctgtctccagcaagtctctctccatcaaaccccaggtctgccccataagcaagatctttaacagatggatgtctccatgagaaaacccaaggcgagaagcccagagccatggcggggttgcttgacgtcctcatggagtcactctgccccacatgctcaaatcttccctctggccccacatccctaggagggcctgacccctgtaaagatacaggaggcagctccctggcctccaaatggcccatggagatggcagtcgggagacagggttctgtgtttgctgcggtgaagggaggagaaggcaggaggaaaaaggatggcttctagccctgaagaggactccagcatcccaggcaccgggtgcttctggctgcagttttccctatggaggcccctcagcctccagccctaacataaatgtcggttaaattcagttttcaagcctctctcccttttcagtgtcagagcagtagatggtccagggcattggaggcctcgaccactctgcattgcagatntacagtgacttcctcggggttgccccatcttggtctcctatggtttcttcatcagcnnnnnnnnnaccagcatctctcaaataacaatgaagatagatatgcccattagtgtctgattaaggagcaaaggctggatttctggccacagcgagctgcactctccctcctgcctcagccggggtccgtcttagcagtttggaaaggggaaaaagatgccggtcctcactgcttaagttttgtgtccaggtgccactagacttgcatgcacactaactccttacaatcaccacacagcatcatcgccccagtgcacagatgaggaaccagaggctcagaggagtgaagttgccttcctgaggtcacacagcatgaaagtgatgagctaggatttgaatctgggaagttgggctctagagccagactgtactgccttctgccacactgtactgccttctgtgactgggtggcacctccagggcacatttacacaaggccctgaatctgcagaggctgtttctcaagatgcccgtcatggtgtggcctgggccagctctggcttccacaggtccctgactgtcctcagagtggaacatgctcaacctcccgcccactgctctctctctgcccagatttcaggggtgccaggtccccaaggcctgcccccttctttaagactgaactcaagtctccttggaaggccccggttgaagctcccagagactggttgtcttgggatgcaggcagaaggggaccctcccatggccaacacccaggagcccagcagaagcacccacacgtagaaagaggctcacaacagccagaagtgcagagtcagagtcctgggaccatctagttctgcaaggtgaaccacaggctccccaggacagcggagagggatcgtcctcattcagactctagctggggcctctgtactggcttctcccctgggtggggttccctgttaccatagcttgtgcctcagagaaagggtcctgcattttcttggaatgttctctgtgcttaccccctctgtgtgcccctccattgctcctctacaagcaattaggtgattcaaaagagcaacttaggctgggtgc

SEQ ID NO: 350407 - DNA, 1803 bp, Homo Sapiens
  misc_feature (119)..(119): n is a, c, g, or t
ttcccgaagatgcacacccccagggaaacggcagtgcaagcctgggcagcaaagccaccccttacaattctttttggttgtttaaaatacaagcgctttctgacatctcaccctagcgntgtgagccccactcaacctggcaggatacaacccacgtcctcgtttagttttccccttggaattatttacaggatgcctacagatacggtacaaactagtatgaaattaatgatagtttgcgtttccagacacgctcccgtggttaaatataccacgccaattccaaagaatggttcaaagttaaggtgactcagaagcattggcatccacagccgcagaaacaggcttctcgctgactggggtggagtcgccgactctgtcctcaacggtggtgggggccttggcagtggggggcgtcacatccacagtgagtgaggaggcagcgtctgcctttgcagtagttgtggcagggtcagagggtgcgttgctggtgggcgggagggaagacagcagctctcctgagcttgctgcagaagagctctctggaaccaaggggaatgacgggaggaactcggatggccagggggaagaggtgcaatgcccaggtaagtttcggggaggcatggaaggaagaggtggcagacctgggtttacaagttctggtaagccaacccctggcatgatgtgtggtgctgggaggttgaggttgaggttggggaggttgggcagtcctgctggtaaaggcatcagacctggtaatgtagtagctggattcattggtggcacagaagtgagggactggtttacttgtggtggcaataacggtactgttggtacacctgtactgagaacactactgacagctggtggagttgagctaatagaaagtccagtcagactctgttcaattcctgtagttcctggtggtgacaaagacgggggattaactgaggacagctggacctctgtaaacccatctttaagaggtgtaataggtgtaccagccatttgtcctggaagagaaattttctttccttcctcaaatgggcgtgtaggtattcgatgcaaataaccatatccaatgccacatcctaggctgccttctccaccccatgcagaatttggtgtaataatcacttctcgacagttatcagtgtctgtgttgtacacatacagtttcaatggttttgcttcatgtgtttcgataaggctgaatagatcttcagactcattcatgactgtatctgctccaattatataatcactgtgtggtctaagacctgccagtgctgcaggagaatttgattccacctccagcacatgccaaacattttcatttgccccatcaaagctgcagaaacgaatgctcactcccaataagccctggccgccccacaggttacttggtgtgactgaggtctctcgcagttccaatgttttgctgctatagataagcatctttacaggcttttcaacgtttgctttcagcagatccttaagagtgtcattgtctttatttaatcttgaaccattaatagaaacaataaaatcaaagaaaggctccaaaccagctctgtgtcctggggaattttcttgtacccgcagaacgtggtagccctcggtgcccccgcccgggatctcgacgctttgcgaggagcccatggcggcgggcgatcggtgtggccgagccgggctccgcgctgctcccgcccccagcgcaccgcctgctctaatcctccgcgtagcacttgggacgtggcactcgctgccgccggagagccgggccgcacagcctgccccgct

SEQ ID NO: 350408 - DNA, 993 bp, Homo Sapiens
  misc_feature (675)..(675): n is a, c, g, or t
gcctgggtggcgaattcggcacgagggtcccaagtgctacgcggaggattagagcaggcggtgcgctgggggcgggagcagcgcggagcccggctcggccacaccgatcgcccgccgccatgggctcctcgcaaagcgtcgagatcccgggcgggggcaccgagggctaccacgttctgcgggtacaagaaaattccccaggacacagagctggttgggagcctttctttgattttattgtttctattaatggttcaagattaaataaagacaatgacactcttaaggatctgctgaaagcaaacgttgaaaagcctgtaaagatgcttatctatagcagcaaaacattggaactgcgagagacctcagtcacaccaagtaacctgtggggcggccagggcttattgggagtgagcattcgtttctgcagctttgatggggcaaatgaacaatgtttggcatgtgctggagggtggaatcaaaattctcctgcagcactggcaggtcttagaccacacagtgattatataattggagcagatacagtcatgaatgagtctgaagatctattcagccttatcgaaacacatgaagcaaaaccattgaaactgtatgtgtacaacacagacactgataactgtcgagaagtgattattacaccaaattctgcatggnggtggagaaggcagcctaggatgtggcattggatatgcgaatttgcatcgaatacctacacgcccatttgaggaaggaaagaaaatttctcttccaggacaaatggctggtacacctattacacctctttaaagatggggtttacagaaggcccacctggccctcaggttaatcccccccgcctttgccaccacccaagaacttcagggaattgaaccagagtcctgactggaacttttccattagctcaaattccccccacttggtcagaaaggggtcccagataccaggggggaacccaacagtaccggtttttgg

SEQ ID NO: 350409 - DNA, 1108 bp, Homo Sapiens
  misc_feature (650)..(650): n is a, c, g, or t
aagtagcgaggcctgggtggcgaattcggcacgaggctgggggcgggagcagcgcggagcccggctcggccacaccgatcgcccgccgccatgggctcctcgcaaagcgtcgagatcccgggcgggggcaccgagggctaccacgttctgcgggtacaagaaaattccccaggacacagagctggtttggagcctttctttgattttattgtttctattaatggttcaagattaaataaagacaatgacactcttaaggatctgctgaaagcaaacgttgaaaagcctgtaaagatgcttatctatagcagcaaaacattggaacctgcggagagacctcagtccacacaaagtaacctgtggggcggcgcagggctttattgggagtgagcatttcgtttctgcagctttggatggggcaaatgaaaatgtttggcatgtgctggaggtggaatcaaattctcctgcagcactggcaggtcttagaccacacagtgattatataattggagcagatacagtcatgaatgagtctgaagatctattcagccttatcgaaacacatgaagcaaaaccattgaaactgtatgtgtacaacacagacactgataactgtcgagaagtgattattacaccaaattctgcatggngtggagaaggcagcctaggatgtggcattggatatggttatttgcatcgaatacctacacgcccatttgaggaaaggaaagaaaatttctccttcaggacaaatgggctggtacacctattacacctcttaaagatgggtttacagagggcccagctggtcctcagttaatcccccgtcttttgtcaccaccagggaactacagggaattgaaccagaagcctggactgggacttttctaattaactccaattcccaccaagctggcaaggtaagggtcctccagtacagggggtacaccacaaagtaccgggttatttgccacccccaaagtaaaaccacgtcccttcacctttcggtgggcccccaatgaaattcccggcctacttatctttatcccagggccctgaatggcccttttaacacaccagaggaattggccccaaaactttccccaat

SEQ ID NO: 350410 - DNA, 989 bp, Homo Sapiens
  misc_feature (13)..(13): n is a, c, g, or t
  misc_feature (21)..(21): n is a, c, g, or t
  misc_feature (32)..(32): n is a, c, g, or t
atgcccggggtanaatttaancccagggaacnttgtctggaaaacgcaaaactatcattaaattccaaacaagtttgtacccgtatctgtaggcatccctgtaaaaaaatcccaaggggaaaactaaacgaggacgtgggttgtatcctgccaggttgagtggggctcacacgctagggtgagatgtcagaaagcgcttgtattttaaacaaccaaaaagaattgtaagggtggcttgctgccaggcttgcactgccgttcctgggggtgtgcatcttcgggaaaggtggtggcggggcgtccactaggtttcctgtcccctgctgctccttccgtaagaaaatgaaatattctatgcctaatactcacacgcaacatttcttgtactttgtaagtcgtttgcgagaatgcagaccacctcactaaactgtaaacggtaaagagatttttacttttggtctccgtgagtcgcatctctactaaggtttacacaggaattccacctgaagacttgtgttaaagttctacagcgcgcactgttaactgaacgtctttttcttcagcctatacgcggatccttgttttgagctctcagaatcactcagacaacattttgtaactgctgctgttgctttctacatacaccttataaagtgacatttcaaaagaaataaggtgccacagttttaaaccagaaggtggcactctgtggctccttgtagtattatagctatactgggaaagcatagatacagcaataaagtacagtaattttactttttttcttgtgttacatctaaattacaacccttaattgccacgtgtgcacttactactctccagtatgtcttattactctccagtatgtcacgcatctttaacttttcacgtcctatgtttgctttctcccatttttaagagatggtaagttaactggaattgatttactgaatgaaattaaatgcagatatccctgtttttgaaataag

SEQ ID NO: 350411 - DNA, 911 bp, Homo Sapiens
agccggagaaggggcggggtctcagctcctacttcattctacggccgagaccggaggatgttccctgctcaggaggaggccgacaggaccgtgtttgttgggaatttagaggcccgagttcgggaagagattctgtacgagctgttccttcagtttcttataggcggggccactaaccaaagtgactatatgcaaagacagagaaggaaagccaaagtcttttggatttgtctgctttaaacacccagaatcggtgtcttatgccatagctttgctgaatggaattcgtttatatggaagaccaattaacgtgcagtatcgatttgggagttctcgctcttctgaaccagctaaccaaagttttgagagctgtgttaagataaattcacacaactacaggaatgaagaaatgttggtgggcagatcttcctttcccatgcagtattttccaattaataatacttctttacctcaagaatattttctctttcagaagatgcagtggcatgtgtataatccagtgctgcagcttccttactatgaaatgacagctccacttcctaatagtgcatccgtgtcttcctcactgaatcatgttccagatcttgaggctggacccagctcatataaatgggactcaccaacaaccaagtgactctgacctttatcagatgacagctccacttcctaatagtgcatccgtgtcttcctcactgaatcatgttccagatcttgaggctggacccagctcatataacatggactcaccgaacagacaagtgactctgaccgttatcagatggactaaaccgacagagacaaaagcaaacgagtgatcagggaaggaagcagagaacacaacagagggcacgaatggaggcaaaggtacgagaggcaagcagaagaaaagc

SEQ ID NO: 350412 - DNA, 918 bp, Homo Sapiens
  misc_feature (50)..(86): n is a, c, g, or t
tgatgtatagactcactataggggaatcggagttatcgcggtggcggcgnnnnnnnnnnnnnnnnnnnnnnnnnnnnnnnnnnnnnatcaggccaaatcggccgagctcgaattcgtcgagagcggcttcttcattctacggccgagaccggaggatgttccctgctcaggaggaggccgacaggaccgtgtttgttgggaatttagaggcccgagttcgggaagagattctgtacgagctgttccttcagggagttctcgctcttctgaaccagctaaccaaagttttgagagctgtgttaagataaattcacacaactacaggaatgaagaaatggtggtgggcagatcttcctttcccatgcagtattttccaattaataatacttctttacctcaagaatattttctctttcagaagatgcagtggcatgtgtataatccagtgctgcagcttccttactatgaaatgacagctccacttcctaatagtgcatccgtgtcttcctcactgaatcatgttccagatcttgaggctggacccagctcatataaatggactcaccaacaaccaagtgactctgacctttatcagatgacagctccacttcctaatagtgcatccgtgtcttcctcactgaatcatgttccagatcttgaggctggacccagctcatataaatggactcaccaacaaccaagtgactctgacctttatcagatgaataaacgaaagagacaaaagcaaacaagtgatagtgatagtagcacagacaacaacagaggcaacgaatgtagccaaaagttccgaaagtctaagaagaagaaaagatactagtattacctacaaatgaaacttacctacactgatcttagttctcttatgccaacacaataagatgttatccatccaaataa

SEQ ID NO: 350413 - DNA, 1517 bp, Homo Sapiens
  misc_feature (56)..(92): n is a, c, g, or t
gccgggccggaatatagatcatatgggcgaactggagctcacgcggtggcggccgnnnnnnnnnnnnnnnnnnnnnnnnnnnnnnnnnnnnnatcaggccaaatcggccgagctcgaattcgtcgagagcgggcggggctggcgctgcggcgggagatgctgtcgggccgcggcggcgcttggcagccaggagctctgcattgaaggcactggggcgctcgcgactcggcgacggcggccgcagtgggacacggaggcggggccgggcacctgtgcgcgtttgcaggcacctgctgcgctggccgcctcgcagcccgggactgctgctggggactgcggctggagctgggctggcccggcccgagggagaggggggcccagctggctcgccccggcccgtgcccgccctccccggccgggtcccgaacccgagctctggttaagggggcgtcgccgggccccagagcccccccactggaggggcccgcggctcccgggccagcatcgagctagctgcgaggccaggacagggcccccgccttgcatcacctcgagacaggtaaagtgaatgccgaagacagaagattggatgatacaccactgactttcttcgtttggaatacacgttatgaaccctttctggagcatgtctacaagctctgtacgcaaacgatctgaaggtgaagagaagacattaacaggggacgtgaaaaccagtcctccacgaactgcaccaaagaaacagctgccttctattcccaaaaatgctttgcccataactaagcctacatctcctgccccagcagcacagtcaacaaatggcacgcatgcgtcctatggacccttctacctggaatactctcttcttgcagaatttaccttggttgtgaagcagaagctaccaggcgtctatgtgcagccatcttatcgctctgcattaatgtggtttggagtaatattcatacggcatggactttaccaagatggcgtatttaagtttacagtttacatccctgataactatccagatggtgactgtccacgcttggtgttcgatattcctgtctttcacccgctagttgatcccacctcaggtgagctggatgtgaagagagcatttgcaaaatggaggcggaaccataatcatatttggcaggtattaatgtatgcaaggagagtttctacaagattgatacagcaagcccctgaaccagaggctgcagtactgtttgaaaaagatattcagctttttaacaagtaaagttgttgacaagtgttaaggtgtgcactggctcgtatggtttgaccaaccttaaaatagaagaaccccttatgcatttaggcttttcctctcatggaattctttctgtacatgaatgaagacagagaaaagatgtgaatccagaaaaaagccggaaaaacaggcacactaaaagtgttcacatgtgctggcctgtcagggggtaaagctggctaatcaagctttacgtaaacaggagaacaagggcgaattagaa

SEQ ID NO: 350414 - DNA, 1809 bp, Homo Sapiens
cgctgccgagggcagggcaggtcagggcggggtggggcggggcggggatcaagcaggggcagggctggcgctgcggcgggagatgctgtcgggccgcggcggcgcttggcagccaggagctctgcattgaaggcactggggtaaagtgaatgccgaagacagaagatttggatgatacaccactgactttctttgtttggaatacacgttatgaaccctttctggagcatgtctacaagctctgtacgcaaacgatctgaaggtgaagagaagacattaacaggggacgtgaaaaccagtcctccacgaactgcaccaaagaaacagctgccttctattcccaaaaatgctttgcccataactaagcctacatctcctgccccagcagcacagtcaacaaatggcacgcatgcgtcctatggacccttctacctggaatactctcttcttgcagaatttaccttggttgtgaagcagaagctaccaggcgtctatgtgcagccatcttatcgctctgcattaatgtggtttggagtaatattcatacggcatggactttaccaagatggcgtatttaagtttacagtttacatccctgataactatccagatggtgactgtccacgcttggtgttcgatattcctgtctttcacccgctagttgatcccacctcaggtgagctggatgtgaagagagcatttgcaaaatggaggcggaaccataatcatatttggcaggtattaatgtatgcaaggagagttttctacaagattgatacagcaagccccctgaacccagaggctgcagtactgtatgaaaaagatattcagctttttaaaagtaaagttgttgacagtgttaaggtgtgcactgctcgtttgtttgaccaacctaaaatagaagacccctatgcaattagcttttctccatggaatccttctgtacatgatgaagccagagaaaagatgctgactcagaaaaagaagcctgaagaacagcacaataaaagtgttcatgttgctggcctgtcatgggtaaagcctggctcagtacagcctttcagtaaagaagagaaaacagtggcgacttaagagatggtgaatctggtgcaccatgcactttcctgctagactctggcctagttcaagctgaccaatggcagaggactgcctgaagagtaaaactgtgtgaacaatgactgactgccagtgttttccatgtatgcataggttctaacagcagggtttggaaacctgtctctaagtaatgcattacttctgtcagaagtgtcttagggtggttatctagttcagtactccaaattattggggaccttgaggcttaagtaagtatttttctgaatataatgctaaaggtaagttgcattcatttaaactaatagagcagacagaattcagcactacttaatagtttataaatcagtggtttcagttgtatatatgttaggaaatggagaggtatagagagagcaggttccatagctcagcacttttaagtggaagatcatttgaatctcagtcttcagcctgcactgatttgtagcctgcactgtcttactgatttacaaactgaaatcactgagaaatgtctttagttcagtgagaagaaaccagaacacttgttcctagtgttgtgttgttttttttaagcaaattacttactgtatttttatggcaggagggagaaaaagtgttacaacggtttctaatgaagtccggtatttaaatgataaatgactaatgtgtttagtagagacaaaataaaccaataaatgattgttctttgcc

SEQ ID NO: 350415 - DNA, 1594 bp, Homo Sapiens
  misc_feature (66)..(66): n is a, c, g, or t
tttcccacataaaaatgaaacaatgctttatctcgagaaaagattttctattactttagcaacagncttcaaagagactgagagaaattaatagtatgatacgcacaggagaaactcctactaaaaagagaggaattcttttggaagatggaagtgaatcacctgcaaaaagaatttgcccagaaaatcattctgccttattacgccgtctccaagatgtagctaatgaccgtggttcccactgaggttagtctcttgtattaaactcttcacaaaatctgtttagcagcagcctttaatgcatctagattatggagcttttttccttaatccagctgatgagttacagcctgttagtaacatgaggggacattttggtgagaaatgggacttaactccttccagtgtccttagaacattttaattcatcccaactgtctttttttccctaccattcagtgattactgtcaaggctgcttagaatccaaacttggatttttgactctggcaaagcttttagaaatactgcaagaaaatgatgtgtacccaaacgtgagcataggaggcttctgttgacgtactccaacagaagaactgtgtttcaagttcaatcctacctgttttgtggtcagctgtagtcctcataaaaagcaaaacaaaaattaggtattttgtcctaaaacacctggtaggagtgtgtgattttttgcattcctgacaaaggagagcacacccaggtttggaggtcctaggtcattagccctcgtctcccgttccctttgtgcacatcttccctctcccccattcggtgtggtgcagtgtgaaaagtccttgattgttcgggtgtgcaatgtctgagtgaacctgtataagtggaggcactttagggctgtaaaatgcatgattttgtaacccagattttgctgtatatttgtgatagcactttctacaatgtgaactttattaaatacaaaacttccaggctaaacatccaatattttctttaatgcttttatatttttttaaaatgttaaaacccctatagccaccttttgggaatgttttaaattctccagttttttgttatatagggatcaaccagctaagaaaagattttaatcaagttgaattgaggggattaatatgaaaacttatgacctcttcctttaggagggagttatctaaaagaaatgtctattaaggtgatatatttaaaaatatttttggggtgttcctggcagtttaaaaaaattggttggagaatttaggtttttattagtaccatagtaccatttatacaaattagaaaatgttatttaacagctgaattatctatacatatctttattaatcactattgttccagcagttttcaagtcaaattaataatcttattagggagaaaattcaattgtaaattgaatcagtataaacaaagttactaggtaacttcatattgctgagagaaatatggaacttacattgttcaattagaatagtgttctgcaaaaatatttataaaacttctcaagatactgctactgtaattttatatgaagataagtgtatttttcaataaagcatttataaatt

SEQ ID NO: 350416 - DNA, 925 bp, Homo Sapiens
  misc_feature (870)..(878): n is a, c, g, or t
tcagaagaaatgggggcccaaggccaagcatcatcgttgaccagtggccaccagcaaacaactctatcatgaacacagttgatagctagatgtcgctctgttgtcttgtttattgggccgggtatttcataatagaaaatcttataatccaaggctgagagtttttccagtcttttgtttacatcagaagactccatcttcttggtaaactgaataaaacatagtttgttttgtgccaaaaatgataagatgataaaactgtctgtgagaagagcattcactgatggtgtctgagatgagcttccccaccaggcttctgtcaatcaccactttctccagctgcggcccagaaaggcttagagacaccagcacacctgaaccaaaaggagctgacagacatatttgttcttccatttgctcagcacacaccgactgttttgcatcagctcctccaactctttgagcgagtctcggagtttttctgggcgtctgtttttgagcgtccaaggataatctcgtgactctgccagcttctgcttcttttctaagttaccatgctctgtcgctggtggatctttcttgtcataatactggtagatcccaatgtctctatccgcaatgtgtaaggtattcctcaaagaccacaggtgcagttcagtcaagcagaaagacatctgatggccagaaggaatctctatcctgtctcgggagtggggaagaagcgcgactcccggccgctttggagtaggcgtcccagcaaaactctcgcctcatcaccagacactaccccgggcagaaggttcctaggctaggtcctcggacccgaggagggagcgacacgctcgctgggtctcttgggtctccagacgnnnnnnnnngccacagttcctcagtgctacaaacagccaggtggtgcgtcgctccg

SEQ ID NO: 350417 - DNA, 492 bp, Homo Sapiens
  misc_feature (27)..(27): n is a, c, g, or t
  misc_feature (32)..(32): n is a, c, g, or t
  misc_feature (148)..(148): n is a, c, g, or t
cccctgaagccataacccccggaggantaaantgggcctctgtcccctcctccagaaagaaaatgggggggcccaaggccccaagcatccatccgttggacccagtggccccacccagcaaacaactcctaccatgaaacacagttgnatagcctagatgtcgcccctgttgtccttgtttattgggccgggtatttccataatagaaaatcttataatcccaaggctgagagtttttccagtcttttgtttacatcagaagactccatcttcttggtaaactgaataaaacatagtttgttttgtgccaaaaatgataagatgataaaactgtctgtgagaagagctgaatgtagagacgaaaacattccattttatttgtgctaagagtttaatcctatgtttacatgatagaaaccatccgaggataaaggtggatttattaggggatactgatcagtgttctctaccagtctatttatttaaaaaatt

SEQ ID NO: 350418 - DNA, 2575 bp, Homo Sapiens
  misc_feature (1384)..(1384): n is a, c, g, or t
  misc_feature (2500)..(2500): n is a, c, g, or t
  misc_feature (2527)..(2527): n is a, c, g, or t
tgtcttcaccaagcagccggaaccggtgattccagtgaaggagccacttctgacctggccatcattgctcggaaaggcagccagacagtgcggaagcacagggagcagaaggagcgcaagaaggctcagcacaaacactgggaactggcggggacccaactgggagatataatgggcgtcaagaaggaggaagagccagataaagctgtgacggaggatgggaaggtggactacaggacagagcagaactttgcagatcacatgaagagaaagagcgaagccagcagtgaatttgcaaagaagaagtccatcctggagcagaggcagtacctgcccatctttgcagtgcagcaggagctgctcactattatcagagacaacagcatcgtgatcgtggttggggagacggggagtggtaagaccactcagctgacacagtacctgcatgaagatggttacacggactatgggatgattgggtgtacccagccccggcgtgtagctgccatgtcagtggccaagagagtcagtgaagagatggggggaaaccttgtgcgaggaggtgggctatgccatccgctttgaagactgcacttcagagaacaccttgatcaaatacatgactgacgggatcctgctccgagagtccctccgggaagccgacctggatcactacagtgccatcatcatggacgaggcccacgagcgctccctcaacactgacgtgctctttgggctgctccgggaggtagtggctcggcgctcagacctgaagctcatcgtcacatcagccacgatggatgcggagaagtttgctgccttttttgggaatgtccccatcttccacatccctggccgtaccttccctgttgacatcctcttcagcaagaccccacaggaggattacgtggaggctgcagtgaagcagtccttgcaggtgcacctgtcgggggcccctggagacatccttatcttcatgcctggcagaggacattgaggtgacctcagaccagattgtggacgcatctggaggaactggagaacgcgcctgccctggctgtgctgcccatctactctcagctgccttctgacctccaggccaaaatcttccagaaggctccagatggcgttcggaagtgcatcgttgccaccaatattgccgagacgtctctcactgttgacggcatcatgtttgttatcgattctggttattgcaaattaaaggtcttcaaccccaggattggcatggatgctctgcagatctatcccattagccaggccaatgccaaccagcggtcagggcgagccggcaggacgggcccaggtcagtgtttcaggctctacacccagagcgcctacaagaatgagctcctgaccaccacantacccgagatccagaggactaacctggccaacgtggtgctgctgctcaagtccctcggggtgcaggacctgctgcagttccacttcatggacccgcccccggaggacaacatgctcaactctatgtatcagctctggatcctcggggccctgggacaacacaggtggtctgacctctaccgggcggctgatggtggagttcccgctggaccctgccctgtccaagatgctcatcgtgtcctgtgacatgggctgcagctccgagatcctgctcatcgtttccatgctctcggtcccagccatcttctacaggcccaagggtcgagaggaggagagtgatcaaatccgggagaagttcgctgttcctgagagcgatcatttgacctacctgaatgtttacctgcagtggaagaacaataattactccaccatctggtgtaacgatcatttcatccatgctaaggccatgcggaaggtccgggaggtgcgagctcaactcaaggacatcatggtgcagcagcggatgagcctggcctcgtgtggcactgactgggacatcgtcaggaagtgcatctgtgctgcctatttccaccaagcagccaagctcaagggaatcggggagtacgtgaacatccgcacagggatgccctgccacttgcaccccaccagctccctttttggaatgggctacaccccagattacatagtgtatcacgagttggtcatgaccaccaaggagtatatgcagtgtgtgaccgctgtggacggggagtggctggcggagctgggccccatgttctatagcgtgaaacaggcgggcaagtcacggcaggagaaccgtcgtcgggccaaagaggaagcctctgccatggaggaggagatggcgctggccgaggagcagctgcgagcccggcggcaggagcaggagaagcgcagccccctgggcagtgtcaggtctacgaagatctacactccaggccggaaagagcaaggggagcccatgacccctcgccgcacgccagccccgctttggtctgtgactgagttccaaagagacagatggctgactcgcgactagtggaagctctcagattcggaagccagatcgtgcactgcnaggattctcacgtcgcgtatagtcgcnagggcctagcacgtgtgggttctgcacgttgttattaagtgtccttta

SEQ ID NO: 350419 - DNA, 734 bp, Homo Sapiens
  misc_feature (54)..(62): n is a, c, g, or t
aagagcaacagacccattatgtgcccttgcacaatagcaagcctttcggtaagnnnnnnnnntgcctgcttgagttcacggtttatagaaggcgatggttcctgggaagaggctgatcccttgcccccaggatttacggcagaggcagcattcagaagtgcacctctccaaaggtgtttcacaaacattgtgtcaaaatgtttttggccgatggagaaagaaacatatggaatgttctgtttttatctgcttttcctttgccaaactgaaagccctgtgatgggggtggggaaagagagacagttactcaagccaagcacggccagaaggggcgcccttggtcatttgctgccctttttttctgagaaggtccacttttttagttgttgttttcaatattcagagatatgacgattccagtaagccccctcctcattacccactctggttgtaaaatacttctggggcttgctcattctccgtccacacttagagagtttaggaataatttttttcagaattactccagtgtgtgggttggcaggttgtagaaagtggcactgcccctactgtctctgagaccagaggggttttcagtgctttgccgggccacagccagagacaggatgagcccggggtcaagtttctgtaaacctaaacagtcatggcagcaaggtccaactttagaaacaaaagttcattttcaggttctttatgacactgtaggacaatac

SEQ ID NO: 350420 - DNA, 800 bp, Homo Sapiens
taagcgctgtacggtccggagtttcgggatatcgtcgacccacgcgtcggacaagtggccaggtggctctgggccctcctgccccgtgcctaggtcaggtgtcctggaataccccgtagctctggcaccaccacactggcctctgatggcaagacttggcccctccacctgtccctaacggacggcaggtcaggaaagccaggactcaggggagaagcaaacccccaggattgaaggctagggttctagggcctttgggtggggagggcccgggccggacagcctcagctccgtcccctgccccacaagattcacctgggcctccagtcccacgctggccccaactgctgcagctctcggcttccgcccaacagcctctggaggtgaggcgggagcatgccctcagcgaggctgggcggcgggtcctgctgtgccatctccctgtgcgcctgagcagatcaatccaccagtgcaaaacagggctaacggcacctgcaggacagcagcacgctccatccctcatgctcagctgcctctgcggccacggacttctgcccttcatctgctctctcttactctcctgagcctagcccgtccgtaagctccctcccctgcctggttcccagggcaggctgactcagttgactgcttggtccaagcctggccctggcacttgtcagggtcagcctaaggagatgggaataaagaggccagagagcaccaagtgagctcatgtttcaccagaggtggataaaaccaagttctgggctgggccagtggctcacatctgtaattccagg

SEQ ID NO: 350421 - DNA, 1137 bp, Homo Sapiens
gggtccggaattcccgggataggcaacaagatggcagctgcggagccgtctccgcggcgcgtgggcttcgtgggcgcgggccgcatggcgggggccatcgcgcagggcctcatcagagcaggaaaagtggaagctcagcacatactggccagtgcaccaacagacaggaacctatgtcactttcaagctctgggttgccggaccacgcactccaaccaggaggtgctgcagagctgcctgctcgtcatctttgccaccaagcctcatgtgctgccagctgtcctggcagaggtggctcctgtggtcaccactgaacacatcttggtgtccgtggctgctgggatgtctctgagcaccctggaggaggtgagtgtcccttgggctaaggccttggtcccagtataggctctgctggccaggcttgggcggcaggcagccccccagagagcctgagaggtggccgtgtggcccacctggatcaagtggctggatttagggttccctcctggtgctgtacctgggaggcagacgctggagcccaccgcgagctgacgtggacctttcctgaggcccctgctggggcctgcccagcagggcccagtcctacagactccctgattctgacctctctctggccagctgctgcccccaaacacacggggtgctgcgggtcttgcccaacctgcccctgtgtgggtccagggaaggggcccataagtgatgggcgccgggggcccgccacgtggggggagcagcggagaaccaagccccttgcaacaatcttgctggaggccctgtggggccggtgctaaaaaaggcccccttaagccctaacgttcaacatccccaactgggctcccattggccagggggcatgggccttttttgggggcacttccccgaaggctcttagcctgcaggaccccttcataaatggcggcgtgccccaagaaacctcgcccattccacctctcctccccaaaacctatcgttggttaccgcccaccccgctccatgcatgacggcgcccatccagcctccaaggaggtaaccaacaagtgggggtcacacccgagtgggtatccacacattgatatagacccccactccctccccaataagccgaagccccgccaa

SEQ ID NO: 350422 - DNA, 2205 bp, Homo Sapiens
agacactcactcaactacccttccctcataaccggctggtaccggtccggaattctcgggatggcgcggcctgtggatgggcggtgagcgcagcggcgtccgaggcaacaagatggcagctgcggagccgtctccgcggcgcgtgggcttcgtgggcgcgggccgcatggcgggggccatcgcgcagggcctcatcagagcaggaaaagtggaagctcagcacatactggccagtgcaccaacagacaggaacctatgtcactttcaagctctgggttgccggaccacgcactccaaccaggaggtgctgcagagctgcctgctcgtcatctttgccaccaagcctcatgtgctgccagctgtcctggcagaggtggctcctgtggtcaccactgaacacatcttggtgtccgtggctgctgggatgtctctgagcaccctggaggagctgctgcccccaaacacacgggtgctgcgggtcttgcccaacctgccctgtgtggtccaggaaggggccatagtgatggcgcggggccgccacgtggggagcagcgagaccaagctcctgcagcatctgctggaggcctgtgggcggtgtgaggaggtgcctgaagcctacgtcgacatccacactggcctcagtggcagtggcgtggccttcgtgtgtgcattctccgaggccctggctgaaggagccgtcaagatgggcatgcccagcagcctggcccaccgcatcgctgcccagaccctgctggggacggccaagatgctgctgcacgagggccaacacccagcccagctgcgctcagacgtgtgcaccccgggtggcaccaccatctatggactccacgccctggagcagggcgggctgcgagcagccaccatgagcgccgtggaggctgccacctgccgggccaaggagctcagcagaaagtaggctgggctctggccatcctttcctgcctctgtgcccctgcctctccctgtgtcccttcccctgaggactgcggctccctccctcctgcatgagggtctcctactgctccttctccccttgcacagggaaatgcagggggcaggacttgggaggttccagcaggcgggggagccccgaccagtggggacactcctccctccccagtgagcagaaggcaccgtggtggtggctctgccccttgctgcagtgagcccaccttgctgcaacattggttctgaggggcccaagagatggcgtcttggtcatttgcccgcatggttgggcagttggttgaggccatgaacagaacttacggtaacaggcacggctggcccaatgcctggtctggagctggagcttgcctttggctttccaggtggctccgtgcagctacagccaggccggctgcctcatctcagctctaggggggcacgagccatatggggtctgcacaagagaccctctcccctgcagtaaagccaggggccctggcctgatggggcccccatggggagctggagcctgccctgcagcctggagaagagggtggctgtggtgggcgtgctcatcccctgctaaggagcaggagctgctgggccaggtctgcggcagtgctggggtggcaccaggtgggcagtgtgcctaggtcaggggtcctggaataccccgtagctctggcaccaccacactggcctctgatggcaagacttggcccctccacctgtccctaacggacggcaggtcaggaaagccaggactcaggggagaagcaaacccccaggattgaaggctagggttctagggcctttgggtggggagggcccgggccggacagcctcagctccgtcccctgccccacaagattcacctgggcctccagtcccacgctggccccaactgctgcagctctcggcttccgcccaacagcctctggaggtgaggcgggagcatgccctcagcgaggctgggcggcgggtcctgctgtgccatctccctgtgcgcctgagcagatcaatccaccagtgcaaaacagggctaacggcacctgcaggacagcagcacgctccatccctcatgctcagctgcctctgcggccacggacttctgcccttcatctgctctctcttactctcctgagcctagcccgtccgtaagctccctccctgcctggttcccagggcaggctgactcagttgactgcattagaatccaagcgctggccctgcact

SEQ ID NO: 350423 - DNA, 1006 bp, Homo Sapiens
  misc_feature (923)..(923): n is a, c, g, or t
  misc_feature (928)..(928): n is a, c, g, or t
  misc_feature (938)..(938): n is a, c, g, or t
  misc_feature (959)..(959): n is a, c, g, or t
  misc_feature (972)..(972): n is a, c, g, or t
  misc_feature (991)..(991): n is a, c, g, or t
  misc_feature (996)..(996): n is a, c, g, or t
aaaagggcccgcggctcgggcgtaggaggcggtgcctctgcagcaagcgtggggcgcgggaacccgagcaggactctccagtcctcagtcaccttggacaaagaagtgtggatcctcagattccatcttttccaactccaaggtgccatggcagagaaggtgctggtaacaggtggggctggctacattggcagccacacggtgctggagctgctggaggctggctacttgcctgtggtcatcgataacttccataatgccttccgtggagggggctccctgcctgagagcctgcggcgggtccaggagctgacaggccgctctgtggagtttgaggagatggacattttggaccagggagccctacagcgtctcttcaaaaagtacagctttatggcggtcatccactttgcggggctcaaggccgtgggcgagtcggtgcagaagcctctggattattacagagttaacctgaccgggaccatccagcttctggagatcatgaaggcccacggggtgaagaacctggtgttcagcagctcagccactgtgtacgggaacccccagtacctgccccttgatgaggcccaccccacgggtggttgtaccaacccttacggcaagtccaagttcttcatcgaggaaatgatccgggacctgtgccaggcagacaagacttggaacgcagtgctgctgcgctatttcaaccccacaggtgcccatgcctctggctgcattggtgaggatccccagggcatacccaacaacctcatgccttatgtctcccaggtggcgatcgggcgacgggaggccctgaatgtctttggcaatgactatgacacagaggatggcacaggtgtcccgcgattacatccatgtcgtggatctggccaagggcacattgcagccttaagaagctgaanaacantgtggctgcngatctacaactgggcacggcncaggtattcagtntgcagatggtcaggctatngaaangctctgggaa

SEQ ID NO: 350424 - DNA, 1412 bp, Homo Sapiens
ggcggctcgggcgtaggaggcggtgcctctgcagcaagcgtggggcgcgggaacccgagcaggactctccagtcctcagtcaccttggacaaagaagtgtggatcctcagattccatcttttccaactccaaggagggggctccctgcctgagagcctgcggcgggtccaggagctgacaggccgctctgtggagtttgaggagatggacattttggaccagggagccctacagcgtctcttcaaaaagtacagctttatggcggtcatccactttgcggggctcaaggccgtgggcgagtcggtgcagaagcctctggattattacagagttaacctgaccgggaccatccagcttctggagatcatgaaggcccacggggtgaagaacctggtgttcagcagctcagccactgtgtacgggaacccccagtacctgccccttgatgaggcccaccccacgggtggttgtaccaacccttacggcaagtccaagttcttcatcgaggaaatgatccgggacctgtgccaggcagacaagacttggaacgcagtgctgctgcgctatttcaaccccacaggtgcccatgcctctggctgcattggtgaggatccccagggcatacccaacaacctcatgccttatgtctcccaggtggcgatcgggcgacgggaggccctgaatgtctttggcaatgactatgacacagaggatggcacaggtgtccgggattacatccatgtcgtggatctggccaagggccacattgcagccttaaggaagctgaaagaacagtgtggctgccggatctacaacctgggcacgggcacaggctattcagtgctgcagatggtccaggctatggagaaggcctctgggaaagaagatcccgttacaaggtggtggcacggcgggaaggttaattggcagcctgttacgccaaccccagcctggccccaagaggagctggggtggacagcagccttagggctggacaggatgtgtgaggatctctggcgctggcagaagcagaatccttcaggctttggcacgcaagcctgaggaccctcccctaccaaggaccaggaaaagcagcagctgcctgctctccagcctctggcaggaactcagggccctggagctgctggggccaagccaaggcctcccctacctcaaaccccagctgggcccgcttagcccaccaggcatgaggccaagggctccactgaccaggaggccgaggtctctaactcttatcttccacagggtccaagagttcatcaggacccccaagagtgagtgagggggcaaggctctggcacaaaacctcctcctcccaggcactcatttatattgctctgaaagagctttccaaagtatttaaaaataaaaacaagttttcttacactgaa

SEQ ID NO: 350425 - DNA, 2005 bp, Homo Sapiens
  misc_feature (75)..(138): n is a, c, g, or t
  misc_feature (236)..(270): n is a, c, g, or t
  misc_feature (590)..(640): n is a, c, g, or t
  misc_feature (1978)..(1978): n is a, c, g, or t
ggcaccggtccggaattcccgggatcgcgcaccgccccgagccggcggcgcctgcgcactcgcgagtccggcctnnnnnnnnnnnnnnnnnnnnnnnnnnnnnnnnnnnnnnnnnnnnnnnnnnnnnnnnnnnnnnnnctaggcctgggcacgctggcgctgtgcggggcggcgctgctctacctggcgcgctgcgcggccgagcccggggaccccagggcgatgtcgggccgcannnnnnnnnnnnnnnnnnnnnnnnnnnnnnnnnnnttcctggcagtgctggtggccagcgcgccccgcgccgccgagcgccgcagcgtgatccgcagcacgtggcttgcgcggcgcggggccccaggcgacgtgtgggcgcgctttgccgtgggcacggccagcctgggcgccgaggagcggcgcgccctggagcgggagcaggcgcggcacggggacctgctgctgctgcccgcgctgcgcgacgcctacgaaaacctcacggccaaggtgctggccatgctggcgtggctggacgagcacgtggccttcgagttcgtgctcaaggcggacgacgactccttcgcgcggctggnnnnnnnnnnnnnnnnnnnnnnnnnnnnnnnnnnnnnnnnnnnnnnnnnnntctactggggcttcttctcgggccgcggccgcgtcaagccgggggggcgctggcgcgaggccgcctggcaactctgcgactactacctgccctacgcgctgggcggcggctacgtgctctcggccgacctggtgcactacctgcgcctcagccgcgactacctgcgcgcctggcacagcgaggacgtgtctctgggcgcctggctggcgccggtggacgtccagcgggagcacgacccgcgcttcgacaccgaataccggtcccgcggctgcagcaaccagtacctggtgacgcacaagcagagcctggaggacatgctggagaagcacgcgacgctggcgcgcgagggccgcctgtgcaagcgcgaggtgcagctgcgcctgtcctacgtgtacgactggtccgcgccgccctcgcagtgctgccagagaagggagggcatcccctgagccgccgcggcccggccctccgggacacctgcttcacccggcggcgccttggggcaggtgccgagcgggcgcactacgcccgggccccaaggcccccgtcccgcagccacgcttgtggtcgctgcgtcccggtctgcgtttgggagacccctgggggttgccggggcagcgcgccgtgtccaggtggaggtgcccgttcctggacctcagcgagcctgagccgggcccggccgcacgctgacccccgtgctgtccccgaccggctcacggggctgggctccgatcttccgtgtctcttatcagtggcgtttctcacgtctgcgtctcagatctaacgtggtttcacatcaatccgctttcatgggattttggtctctgtccagtgacttcgtggtaaatgtaactcagtgtttgcttgcgacttatttataaatattgtaagtttgtgtcgatgagtgtaagttggcagtgcgcacgtctcggtttttttacatgatttaaggaaagacttttatgtcagaacttggtgcctgtaccgtcaaccccgctgctgcccgtgtttaaacgcaggagaactttaaaactggccatctatcttttcagtgtacaagtcactgaacccattgtttctttctgaagagactttcctttcaaggcttcccatgggtccgcgccacacagggccggtgctgctttatttcagactctgccccaggttccagggaatccgaaccccggagtgctgacgcggttccccaactttcgccttaaggaaaacagggaccagccggcaccagggcccgtcttttcacgtaattttaacacatccttgaaagccctcgtttaatgagaaaagcgaacactgcggtccttgccaaagtaaaatgangctgccccaggacaaggggttaccatg

SEQ ID NO: 350426 - DNA, 584 bp, Homo Sapiens
  misc_feature (119)..(167): n is a, c, g, or t
  misc_feature (451)..(529): n is a, c, g, or t
gcacgtagcccccggcccagcgcgtagggcaggtagtagtcgcagagttgccaggcggctcgcgcccagcgcccccccgggctgacgcggccgcggcccgagaagaagccccagtagannnnnnnnnnnnnnnnnnnnnnnnnnnnnnnnnnnnnnnnnnnnnnnnntccagccgcgcaaaggagtcgtcgtccgccttgaacacgaactcgaaggccacggtgctcgtccagccaggccagcatggccagcaccttggccgtgaggttttcgtaggcgtcgcgcagcgcgcgcagcagcagcaggtccccgtgccgcgcctgctcccgctccagggcgcgccgctcctcggcgcccaggccggccgtgcccacggcaaagcgcgcccacacgtcgcccggggccccgcgccgcgcaagccacgtgctgcggatcacgctgcggcgctcgnnnnnnnnnnnnnnnnnnnnnnnnnnnnnnnnnnnnnnnnnnnnnnnnnnnnnnnnnnnnnnnnnnnnnnnnnnnnnnnccgacatcgccctggggtccccgggctcggccgcgcagcgcgccaggtagagcag

SEQ ID NO: 350427 - DNA, 3021 bp, Homo Sapiens
  misc_feature (65)..(101): n is a, c, g, or t
  misc_feature (358)..(396): n is a, c, g, or t
  misc_feature (2450)..(2687): n is a, c, g, or t
  misc_feature (2712)..(2726): n is a, c, g, or t
  misc_feature (2781)..(2781): n is a, c, g, or t
cgcactccctcccgccttcggaatgtactactatgggcgacctggagctcacgcggtggcggcgnnnnnnnnnnnnnnnnnnnnnnnnnnnnnnnnnnnnnatcaggccaaatcggccgagctcgaattcgtcgagagcggagtatggcgggaggcactagagggagctgcggccgctccggcccggccccgagcaccgcctccccagccagcgccgccgcgatggcggaggacagcgagtctgcggccagccagcagagcctggaactggacgaccaggacacgtgcgggatagacggggacaatgaggaggagacggagcacgccaaaggaagtcctggagggtatttgggagccnnnnnnnnnnnnnnnnnnnnnnnnnnnnnnnnnnnnnnnccaaattccggaggcaccaagtcagactcggcatctgattcccaggagattaaaattcagcagccttcgaaaaatcccagtgttccaatgcagaagttgcaggatatccagagagcaatggagctgctatccgcatgccagggcccagccaggaacattgatgaggctgcaaagcacagataccagttttgggacacacaaccggtaccaaaactagatgaagtcataacatctcatggtgcaattgaaccagataaagacaacgtacgccaagaaccgtattctttgccacagggttttatgtgggacactttagacttgagtgatgccgaagtgctcaaggagttatacacgttgttaaatgagaattacgtagaagatgatgacaatatgttccgatttgactattcacccgagttcctgttgtgggctctgcgtccaccaggctggctcctgcagtggcactgtggggtcagagtgtcttcaaataaaaaactggtcgggttcataagtgccatcccagcaaacattcggatttatgacagtgtgaagaagatggtagaaatcaactttctttgtgttcataagaagttgagatcgaaacgggtagccccagtgctaatccgagagatcactagaagagtgaacctggaagggatcttccaggctgtgtacaccgcgggagtggttcttcctaagcccatagccacatgcagatactggcatcgatcactaaaccccagaaaattggtagaagtgaattttctcacttgagtagaaatatgactttacagagaacaatgaagctatacagacttccagatgttacaaagacttcaggtttgagaccaatggaaccaaaagatatcaaatcagttcgagaattaatcaacacttacctgaagcagtttcatctggctccagtgatggatgaagaggaagtagcccactggttcctcccccgggagcacattattgacacgtttgtagtggagagccccaacggtaaactgactgatttcctgagcttctatacgctcccctccacggtgatgcaccaccctgctcacaagagcctcaaagccgcctactcattctacaacatccacacagagacgcccctgctggacctcatgagcgacgcgctcatcctggctaaatcgaaaggatttgatgtattcaatgcactggatttgatggaaaataagacattcttggaaaaactcaagtttggtataggagatggcaatttgcagtattacctgtacaattggaggtgtccaggtacagattctgaaaaggttggactagtactacaatagatggatatttttatttctagaactctgacatcatcatttgttaatatttaatgatttctggaactgcccatcccaaagaagaataaaagcacaactcaagtgaaaattgaagtagtcgataatcagaaaagatgacaaaagtccacatgtgacatttgtacgtttctagctagaatgttaaacttcatcctttttttactgttgacctatttgtgggagggatgaaaggctacaaagagcacattcttgtaattttcaaatttttgcctgtctcttgaagaggtattttttcacccttagaaaagggactgtttttctatggactaagtagaagttacagagtcatgtaagaaaatctttgctattgtgtggagagaaattgctgcatttctgtttcttaagtgatggaacatttgtccatgtaacagaacaaaagatccatttggaaattttttttactggtatcaccttacatggtatcactgggaacatttatggaatcaacacttctgtagctcagtgacagatggtggttgtttaagtgcagagcaatattaaaatggactggtgactaggacatgtatttctccataagcagagttgcccaatcaataaacatgcaagtttgaactttgatctttaccaggtcagtgaattgcttcaaaagcagagttttgtgcaagcactcactgtgctctctgaaagagcctgagcccgggcgtggtcgctcannnnnnnnnnnnnnnnnnnnnnnnnnnnnnnnnnnnnnnnnnnnnnnnnnnnnnnnnnnnnnnnnnnnnnnnnnnnnnnnnnnnnnnnnnnnnnnnnnnnnnnnnnnnnnnnnnnnnnnnnnnnnnnnnnnnnnnnnnnnnnnnnnnnnnnnnnnnnnnnnnnnnnnnnnnnnnnnnnnnnnnnnnnnnnnnnnnnnnnnnnnnnnnnnnnnnnnnnnnnnnnnnnnnnnnnnnnnnntgacagagcgtgagactccgtctcnnnnnnnnnnnnnnngaaagagcctgtacccgcgactaactagacttttctgctgttgtgcaaagttcangtttcttctcagcaacatcaaggatatatgaagaaaaggaaataaaaaactgtaaagtcaaaagagatgcctggtggaacttattcgtgctatcagggcattgatagtttgaatgtttttattacttatgcaaaattgcacatactcctctatgctgattttatcatgaaaactgtcatgtgtcatgctaatggaaaatgtcttatttgtaaataagtattcataattttgttaaaaaaa

SEQ ID NO: 350428 - DNA, 844 bp, Homo Sapiens
ttcctaagccagccttgagatatgcagctgtgaggaccttgaacaaggtggcaatgaagcacccctctgctgttactgcctgcaatctggacttagaaaacttaatcacagactcaaacagaagcattgctaccttagccattactacactcctcaaaacaggaagtgagagcagtgtggaccggctcatgaagcagatatcttcttttgtgtctgaaatctcagatgagttcaaggtggtggttgtacaggcaattagtgctctctgtcagaaataccctcgaaagcacagtgtcatgatgactttcctctccaacatgctccgagatgatggaggctttgagtacaagcgggccattgtggactgtataatcagcattgtggaagagaaccctgagagtaaagaagcaggcctagcccacctttgtgaattcattgaggactgtgaacacactgttctggctactaagattctacacttgttgggcaaagagggccctagaacgcctgtcccctccaaatatatccgttttatttttaatagggttgtcctggagaatgaggctgtcagagctgctgctgtgagtgctttggctaaatttggggctcagaatgagagtcttctcccaagcatccttgtactcttacagaggtgtatgatggatactgatgacgaggtacgagacagagctaccttctatctgaatgtgctgcagcagaagcatgatggcacttaaatgccacataataactttttaaggggttgggacggggctcctggtaccccgggggaagggaaaaaaacccctttacccccgggaaaccgtttgggggaacccctttc

SEQ ID NO: 350429 - DNA, 742 bp, Homo Sapiens
  misc_feature (497)..(531): n is a, c, g, or t
  misc_feature (558)..(558): n is a, c, g, or t
  misc_feature (570)..(570): n is a, c, g, or t
  misc_feature (572)..(572): n is a, c, g, or t
  misc_feature (596)..(596): n is a, c, g, or t
  misc_feature (652)..(652): n is a, c, g, or t
  misc_feature (704)..(704): n is a, c, g, or t
gtgctctgatctgtttctatacatacaggcacaaagacagaaaagtggaaatgtccttatcacgtgaagaagacattgctactggtctgctcaggagcagctctttgttgcaggcagattccagccttcctgcttcttccagatgtgagctcctgtcctcagaaattcttgaagatttctaaacccttctgcggcacggtcgcggctgtgtcccagtcattctcggggtaagttccgaagttggaggtgtcgccttcgcgggctatcttgggcacgatgggaggcttcagttttctctgaggaacagcttcccagtccacagagcggaaccaccgatggcgtttcacatcattcgccccgttcttcatatttcctaaccaccttgttctgtcaaccacgagcagtttcttaatgagatctttcacatggaaatccaaatgtctggggaaatctatcttgtctgcaagaattttctgataaatgccaaacatgttgtnnnnnnnnnnnnnnnnnnnnnnnnnnnnnnnnnnnacaaatggaggaaatcctgagagcatntcgaatatcagnangctgagggcccaccagtccacagnccttccgtgaccctcgctctgaatgacttcgggggccaggtactcgggtattccgnagagggtccaagtcctgtctaccagcttcttggcgaacccaaagtccgtgancttgatgtgtccgtccctatccagcaggatgttctccg

SEQ ID NO: 350430 - DNA, 1736 bp, Homo Sapiens
  misc_feature (545)..(545): n is a, c, g, or t
tcaaacttataaacttaagtctatgacaaaaaccaagacatcacagtaggaacacaacactaaaggataagataaaatctacaaccaaacaattttcaaaaccttcctacagtgtggaattccagttgcttaaataatgccagttccatgaatttcaactgtgctctaatctatttctatacacacaggtacagagaaaagtggagatgtccttatgccgtgaagaagacattttgcttctggtctgcttaggtgcagttctttgttccaggcagattccaatcttcctgtttcttccagatgtgagctcctgtcctcagaaattcttgaagatttctaaatccttctgcggcacgggcgcggctgtgtcccagtcatgctcagggtaagtttcgaagttggaagtgtcgccgtcaccagctatcgtgggcacgatgggaggcttcagttttctctgcggaacagcttcccagtccacggagcggaaccaccgatgatgcttcacatcattcgccccgttcttcatgtttcctaaatcgcctggnttctgtcaaccacgagcagtttcttaatgaggtcttttacatggaaatccaaatgtctggggaaatctatttttgcctgcaagaattttctgataaatgccaaacgggttgtcatcaaaaaacggaggaaaccccgaaagcatctcgaatatcaggatgccgagggcccaccagtccacggcccttccgtggcccttgctctgaatgacttcgggggctaggtactcgggtgttccacagagggtccaagtcctgtctaccagcttcttggcgaacccaaagtccgtgagcttaatgtggccatccctatccagcaggatgttctctggcttcaagtccctgtagacgatctctttggagtgcaggtactcgatggcacagatgatctctgcagagtagaagagccccgtggtgctggagaagcgcccccggttgcgcaggtagctgaagagctcgccgcccggcacgtactccatgagcatgtagaggaagcgctcgtcatgccacgtccagaacagcctgatgaggaacgggtggctgacttccttcaggacagacttctcattgtgtacgtgttgctcctgctttaggcggatgacgtcgggaatgctcatcaccttgagggcgaagaaatgcttggctgtcttctccttcaccaggtgcacccgcccgaacgtccaagtgcccacggtgaccagcgcgtcaaagtcctgcaggcggtacacaggcgcctccggcgacagcgcctcggggctggggcagagcgcgggcgcccagtcggcggcatcctccgtcacctctcgggagttgctctccgccgcggccgcctgggccggcccgggcgcctccatggggaggcactcaggtccggggcgccgggccaggccggagcgctcgggaagccggactccccgggacgcagcctcggagggcggcgcggcagccgcggcagcatcaacggaggctccccatgcgcgccctcgcctctgggtgcgcggctcggcacggctgacggagacacagagacaatggctgggcggtgctcacggcactagcagcaatagccccgggagggagcagccgctggcctcgcggggcgtgcaccgagtgctggatggctgcgaggaaggcgggggccccaagcattcccggtctcacgcccgccgcctcctccagctcggtggccgcgtg

SEQ ID NO: 350431 - DNA, 659 bp, Homo Sapiens
gggaggtgaggagtccacagctgcggcctggctgcctcgggcctgggctatttaaatcggccaatggctcatccctgggcttgggggactctgggaaatgtagtcctccggctgctctggactctgcagtggccttggcctctgaaggggcagaggtgggacctgggcttaccctgcttttaccagcttccctctgagccgtccagacccctgcaagtcaggcctgcctgccccagctgccgggcagcttggacctggtcctgtaaactggacggtgttgcttgggccgaggcctctttgggcaccagatggagtgaacgacgtcactgacagcatcatcttgggtccctggggccaggtccagctcctccctctgtgacagcattcattcagctggcaggtctttttttaaatcagtcttgaattcagcttcagtgcatcacagtccaatcaaacgacactccgtgagctctgatttccaccggagggaggggtcatgagttggttggtaatggattgcctcttggaggttgcctccactacctggaacttcgcaaaggacgggagtgtgacagcagcttcaggcaacccgtaaatagtttccgagcgcctggcagtgtgtcagtgctgggcgcactgcgaaaagctcacagctcagt

SEQ ID NO: 350432 - DNA, 1025 bp, Homo Sapiens
aaggcgcagagaccagtagctgcaggtggcgccagtggggcacagcgtaggccacaccagccaggaggaactggcccaggctgtagacatagccaatcaaggtgcccacgcaggcccgtgtgtgaatgggcatccactccacactcagtgtcatgcagttgagggagatgccagccagagccatgcccgagaggagccggaaggcgcagtagatggggaagttgggtgcgaaggctgcgcaggtccctaacacagctgtctgcaaggtagttcaagatgagtaccttccggcgccctagcctgtctgcaaggtagccgaacaccatggctccgagcagcacccccaccatgtacaaggactgggccagctggcgtagggccctgtgagagcacacaaggtcccactcagtcacgatggtagatgggaaggtgctgttgtcatagatccagccatcggtgcagggctctgtggcccctgtgccattggcttctgtgccattgagaaagggcagtccccactgcggggaggtgaagcggaggcaggactcaagctgcccctgcctgtcccggggcagccagacctccagccccccgttcttgctgaggttggcatcggcaggcgggcggcagtggtgggtagggatggcagcagtgaagttctgcagggtgttgtgagaagccatcaggagcagggggaggaccaccagggtgacctggatctgctggaagcggccgacaccccccacctgctgcaggaggtcattaaaggccattgggccaggcccagcccagtggctgggggctgaggccttccagtcccaggacctctgtctgtctgcctgcctgctgtccttcgctggaggagcagcactgccgttgcctccgcagctgggttgctccgggagctgagtccgagctgctctgtggggggacagcagcctccttggctgctcctccttcttccccggtctgcctgatctgtccctcccttttcccttgcagcttctcctcactttgggggtcag

SEQ ID NO: 350433 - DNA, 1123 bp, Homo Sapiens
cgcgcccgccagaccgcccaggaggcggcggctattgttccccgcaggggcccggggcgccctgaaacggggtccacgtcagcccgctcccgagcgtgtcctcaggtctaaggacgggtggggcttcctttgtgtgttctctggaaggggctgggatgacgtcgttgctgccccaaggggtaaccgagggggattgagggaagatggtaccagcgccctagagctcagctcaccagacctactcttccgctcgacccttgcagaggaggtggggacggatatggtatttgtagggcagcgctgtgaacaatggagccatcaaaaaggccttctcccagcctcctcaccaaccacggacattcctggcccaacaagacctcctggccaggttttgagccctgcttcccagatctggggacccttcacctgcctctactactgcaaatgattggatattcgtctgacttggctcttccctaatgtgtggaactaattttgttcactctgtttcatgctggacctggcctgaaaatgggcccttatactgtctttgcactttccaacttgccaagtttctgaaagaaggaccaaagtaatgccaagaactcccagatgaagaggaccttccttagacctataacagattcactacttgacttcagagggaagtttcagctaattctcaggaaaaggtcaaaacaggcctgtgactgtcccttgaatactgaaggtataaacaagcttctgggctcctccaggtcaagcagaggaacacttttatcagaatgaagggttacttctttgttattcaaacacacacccacacacatcctctggtagtctccctaattgaaaaacctcaacagatggagagcctgagctcccaagtccgcaggctgacgaagatgcacttcactcaagggccagtgggctggtacagactagggaagagaaaagggacaaaggctgctagtataggtaatcactatcttttaatactcctaacacatagaaattcgaaaaatcttgttcagcaatgttagcagcctgtgagcctcggaaactaatttggctgatgtgtctctgatagggagcttggggctgcaccaaggggaaacattct

SEQ ID NO: 350434 - DNA, 1628 bp, Homo Sapiens
  misc_feature (1353)..(1354): n is a, c, g, or t
cgggagtgttggtgacggggtaggcatagggggtgagagtgctgataagaaggatgaggagaatgagctggatcaggaaaagagagtggagtatgcagtgctcgatgagttagaagattttactgacaatttggagctagatgaagaaggagcaggcgggttcacggctaaagcaatcgttcagagagacagagtggatgaagaggccttgaatttcccctacgaggatgactttgacaacgatgtggatgctctgctggaagaaggcctttgtgcccccaaaaagaggcgaacagaggaaaaatatggcggagacagcgaccatccgtccgatggagagacaagtgtgcagccgatgatgaccaagattaaaacagtgctcaaaagtcgtggccgcccacctacagagccgctgcccgacgggtggatcatgacattccataactctggagtcccggtgtacctacacagagagtctcgggtggtcacctggtccaggccatacttcttgggaacgggaagcatacggaaacacgaccctcctctgagtagcatcccttgtctgcattataagaaaatgaaggacaacgaggaacgggagcaaagcagtgacctcacccctagtggggatgtgtcccccgtcaagcccctgagccgatctgcagagctggagtttcccctggatgagcctgactctatgggtgctgacccggggcccccggacgagaaagacccactaggggctgaggcagcccctggggccctggggcaggtgaaggccaaagtcgaggtgtgcaaagatgaatccgttgatctcgaggaatttcgaagctacctggagaagcgttttgactttgagcaagttactgtgaaaaaattcaggacttgggctgagcggcggcaattcaatcgggaaatgaagcggaagcaggcggagtccgagaggcccatcttgccagccaatcagaagctcattactttatcagtgcaagatgcacccacaaagaaagagttggttattaaccccaacgggaaatccgaggtctgcatcctgcacgagtacatgcagcgtgtcctcaaggtccgccctgtctataattgctttgaatgtgagaacccaagtgagccttttggtgcctcggtgaccattgatggtgtgacttacggatctggaactgcaagcagcaaaaaacttgcgaagaataaagctgcccgagctacactggaaatcctcatccctgactgtgttaaacagacctctgaagagaaacccaaagacagtgaagaactcgagtattttaaccacatcagcatcgaggactcgcgggtctacgagctgaccagcaaggctgnngctggtgtctccatatcagatcctccacgagtgcccttaaaagaaacatgggatgggtgacacgtctatcagtttgaaagtggttcctgggaaaaaacagaagagtgaatacgtaatggcgtgtggcaaggccacagtgcccgggttggtgtaggaacaagaaagttggaaagccgttagccctacaaaagatccttaagttgttggaccccaaggtaagaactggggggtttttactgcccatttttggcccccagaaaaccaaaattggcca

SEQ ID NO: 350435 - DNA, 936 bp, Homo Sapiens
  misc_feature (176)..(176): n is a, c, g, or t
ggcatcatgttgcaggtcaatcacactcctggcggatgtctcctggctgaccatctggttgctctcacggcaaaacatgggcagtaaagacccccagtttctgacatgtgggtgcaccagctgaagattcttctgtgaggctaactgcttttcaactctcgttgttctaacaccanccgcgcactgtgtgcctgccacacgccatgacgtattcactcttctggtttttcccaggaaccacttcaaacttgatagacgtgtcacccatcccatggtttcttttaaggcactcgtggaggatctgatatggagacaacagcccagccttgctggtcagctcgtagacccgcgagtcctcgatgctgatgtggttaaaatactcgagttcttcactgtctttgggcttctcttcagaggtctgtttaacaaagtcagggatgaggatttccagtgtagctcgggcagctttattcttcgcaagttttttgctgcttgcagttccagatccgtaagtcacaccatcaatggtcaccgaggcaccaaaaggctcacttgggttctcacattcaaagaaattatagacagggcggaccttgaggacacgctgcatgtactcgtgcaggatgcagacctcggatttcccgttggggttaataacaaactctttctttgtgggtgcatcttgcactgataaagtaatgagcttctgattggctggcaagatgggcctctcggactccgcctgcttccgcttcatttcccgattgaattgccgccgctcagcccaagtcctgaattttttcacagtaacttgctcaaagtcaaaacgcttctccaggtagcttcgaaattcctcgagatcaacggattcatctttgcacacctcgactttggccttcacctgccccagggcccacaggggctgcctcaagcccc

SEQ ID NO: 350436 - DNA, 927 bp, Homo Sapiens
  misc_feature (46)..(82): n is a, c, g, or t
  misc_feature (754)..(754): n is a, c, g, or t
ggctgatacgatactataggcgaactgggctcacgcggggcggcgnnnnnnnnnnnnnnnnnnnnnnnnnnnnnnnnnnnnnatcaggccaaatcggccgagctcgaattcgtcgagagcggggaggtgctggccccgggcggctgctccagtctgagcgccctccgctcgccccgagagagacccggccatgcaggagccgctgctgggagccgagggcccggactacgacaccttccccgagaagccgcccccgtcgccaggggacagggcgcgggtcgggaccctgcagaacaaaagggtgttcctggccaccttcgccgcagtgctcggcaatttcagctttgggtatgccctggtctacacatcccctgtcatcccagccctggagcgctccttggatcctgacctgcatctgaccaaatcccaggcatcctggtttgggtccgtgttcaccctgggagcagcggccggaggcctgagtgccatgatcctcaacgacctcctgggccggaagctgagcatcatgttctcagctgtgccgtcggcggccggctatgcgctcatggcaggtgcgcacggcctctggatgctgctgctcggaaggacgctgacgggcttcgccggggggctcacagctgcctgcatcccggtgtacgtgtctgagattgctcccccaggcgttcgtggggctctgggggccacaccccagctcatggcagtgttcggatccctgtgcctctacgcccttggnctcctgctgcgtggcgctggtggctgtgtgcggggaggggcctgtggctcatcatgatcctgggggcagcttcatggccaaatcgccgggcttcctgggctactcggggcccggccaagaaaacctggggggctggctggctgcgtgggaaaggaactcgatgtcaccgggac

SEQ ID NO: 350437 - DNA, 838 bp, Homo Sapiens
  misc_feature (763)..(763): n is a, c, g, or t
  misc_feature (777)..(777): n is a, c, g, or t
tagaagaaagagattttaggagacacagttctctgtggaacactttctttcatgttcctgtaactaattgatcaagacccttttaaacgcttatctttgtcagttccgcttttgaaaaaactattgcccctaggattgtttcttcccatatgacagatgaaggttattggctctgagtcatttttggcattatcgtcacagataaaaagattggcaattaatctcataaaaaatctgaattattccagattgctgccgatttttgcctaagaaacaatatgtaagtatattttataaaccaaactttgtcaaccaattctattgtacgtctacccacaggcaactttgaatttacttctctagtgctaaataaacatttcagcgatttaatcccccaacttgggggatgcattatgaaaaggttttcctgggagtcaaggggtttttctttctcgctagttttgtgaaaatttttatatcaataggcaaatcattataactttttaggggttgatggtttttaagtatattgggaaattgtgggtgtctaagggatgatgttcagtgaagaaaagggatccacttttaggaaaccagccattgtttgctttcaactttcatactgtatgctaactcctacgttcccaaaatgtgctcatttgcagacacaggtatgcctatatacatgggaagtctcaaatctgaatttttatccatctcaatatgaccatttctctctgttgtgaggctggaacaggattangtatatatctgccngggttggggaaatattttgggtctatcttttccctgtccacaggaactttaattttaaaaa

SEQ ID NO: 350438 - DNA, 1052 bp, Homo Sapiens
aagagcgaggcctgggtggcgaattcggcacgaggagccaaagcgccccccaaagccacatccaccagagcccagcagcagctggccttcctagagggccgcaagaagcagctcctgcaggccgcactgcgagccaagcagaaaaacgacgtggagggtgccaagatgcacctgcgccaagccaagggactggagcctatgctggaggcctcgcgcaatgggctgcctgtggacatcaccaaggtgccgcctgcccctgtcaacaaggacgactttgccctggtccagcggcctggcccgggtctgtctcaggaggccgcccggcgctatggtgaactcaccaagctcatacggcagcagcacgagatgtgcctgaaccactcaaaccaattcacccagctgggcaacatcactgaaaccaccaagtttgaaaagttggcggaggactgtaagcggagcatggacattctgaagcaagccttcgtccggggtctccccacgcccaccgcccgctttgagcaaaggaccttcagcgtcatcaagatcttccctgacctcagcagcaacgacatgctcctcttcatcgtgaagggcatcaacttgcccacacccccaggactgtcccctggcgatctggatgtctttgttcggtttgacttcccctatcccaacgtggaagaagctcagaaagacaagaccagtgtgatcaagaacacagactcccctgagttcaaggagcagttcaaactctgcatcaaccgcagccaccgtggcttccgaagggccatccagaccaaggggcatcaagttccaagtggtttcacaagggggggctgtttcagaactgaccgggtgctggggaacagccccagctgaagctgggatgcactggaagataacatgtgaggtcccgggagaatcctttgaaggccctggaatgggtcgccgggcccaccagggggggccaactggaaggtaaatgggccccggatttccgggaccccactgacaagcccaaaccaatttgggaaatggacaaccgaagaaggggg

SEQ ID NO: 350439 - DNA, 1108 bp, Homo Sapiens
  misc_feature (19)..(19): n is a, c, g, or t
  misc_feature (33)..(33): n is a, c, g, or t
  misc_feature (54)..(54): n is a, c, g, or t
  misc_feature (61)..(61): n is a, c, g, or t
  misc_feature (71)..(71): n is a, c, g, or t
  misc_feature (104)..(104): n is a, c, g, or t
  misc_feature (618)..(618): n is a, c, g, or t
aacccctaacccatgtccnaaaaagcctctccnatgggttgaaaactccctggnacctccnaatggatggnaagaaaaaggctcttcaacccaagcttcacgtnaaggggtgggggctgcttctgggacgtaggaagacgccaacctcaggggtaccttctgggaaggacaagccagggcttgggtgcccgcccatcccaagagccccacaaggtgccagctcacttagcagcagcctgcttgtccttgcacttctggtagacactcaggatctctgcgatgatgctggggtcctccaaggtggtagtgtctcccagctcctgggcctcactagtgatgatcttcctcaggagccgccgcatgaccttcccagacctggtttttggaagacgtttcaccaccaggatctcatcaggcacagcatatttggcgatcttggtggccacccatggacttgagctcctgcaccaccacatctgagtcacccgcactatctttcaccacaatgaaggcaaaggcagcttctcctttgatgtcgtgggggtagccaatgacagcactttctggtactgcagggtggtcggcgatggcgtcctcaatctctgcggtccccagccnggtggccactgatgttgatgacatcatccatccgccctgtgatctggtaatagccgccctcagttcggtaagccccgtctccagtgaagtaatagcctgggtaggccttgaagtaggcgtccacaaatcgctggtggtcgccatagatggtcctggccatgcccggccaggcctgggagatgcacagggccccggagacgttgctgccctccacgacggctgcccttctcatccatgaggacggggacgatgccaaagaagggcctcatcgccatggcagggaggatttccgccccttcttccgagggccgtggtgcgatgcagatgccacctgtttctgtctgccaccaggtgtccaccagcgtgcacctgctgtcccccaccaccctgtgaagccactcccaggcctcacagttgatgggctctcccactgaccccagggtccgcagggaggagcgatcatacttcttcacccaggcaccaccgtatt

SEQ ID NO: 350440 - DNA, 1297 bp, Homo Sapiens
  misc_feature (262)..(262): n is a, c, g, or t
ggactgggagtggtgggaggaggaagcagaagccttgctggccttgtcgaactgcacatagccatcctgcttgccgctgctgctgacgctgctgtcacactgcgtgtccaggaaggagctgctgtcgctgagggagcctctctggaactcccgctcacaaagctcgatggacgagctgcccatgcccagcacaaaccgctgcccgtagtcgtagaggcggccctggccgctcagggtgcctgtaagatgttggtgaaggacnatgcctgtgggcacacgctgcttgcccgcaggacgcaggtcgggctggcagctggagagggagatggtcggggttgagtggtgctctttgaaggtgttgacgctgtagtagccattggtggggtccttcaggttctgaaactctttctcctcttctttgaggacctccagctgtttcaggactgagtcttgctggaattcaccccggtccatcatcagctgcttgatggtggagtgctcctcaccctcccgaccagaggctggttccttgtggacaatttccactcggatatcatttttggctgacacaacacctttgagatttctctgggaacgggcacagcagaacgccacgatggttgccataaggacgaggaaggccacaccagctcctacggccaccccaatgatgacggccatcggcacagactctgcttccagcccggctcccgacttcatttccgaaccttgctccttgagccggatgatctcagtgtcggagccgaagctgttccaggccgtgcagttgtagatggtctggaagtcggcccgcacgatgttgctgatggtcagggtggagatgacgccctcctcggtgctaatggtctccaccgtatagcgccccgatgtgcccgactccagaacgttctccttccaggaccaggcgatgcggtccggcggcggcgtgctccggatgaagcacttgatctggcccttctcgccgtggagggcgtgctgggtctgggtgctggagatgatggggggtcctgttgagaaacagcgtcccattaggcacccgggaagggcacgtccctgctggcgccctcttgggtgggttcagaagtgtattcattaatccaagcattcagcaaacatttgccgaaggcctgtatgtgcaaggtaaagtgcaaggtagaggactcagagataaattaggcattcagtcataaacctctcaagggatcatgagcgaatgcttctaagtcagaacccccagaagatacaaataactgtaataaaaggtggtgagtgttag

SEQ ID NO: 350441 - DNA, 454 bp, Homo Sapiens
ggtgcctctcgccatgtcacaatcaaaccgctgcccgtagtcgtagaggcggccctggccgctcagggtgctgtagactttggtgaaggacatgcctgtgggcacacgctgcttacccgcaggacgcaggtcgggctggcagctggagagggagatggtcggggttgagtggtgctctttgaaggtgttgacgctgtagtagccattggtggggcccttcaggttctgaaactctttctcctcttctttgaggacctccagctgtttcaggactgagtcttgctggaattcaccccggtcaatctgcaacccaaaaaaggctgctcagtagataggaggtggctaaacctccacttcccccaaggaaaagatgagatcagaaactcaaaagattgccctgtataacccccaccagccctcactgcctggaccatgtgaaagagtcaagatgagt

SEQ ID NO: 350442 - DNA, 2229 bp, Homo Sapiens
ctttatagagttgttccaatcagaaaaattcatgctctgaccatcacatgggcacttcctcctcaacagcaacattacagggtgaagccacttcattatatatcctggctggttggacatgaaggcaaaggcagcattctttctttccttaggaaaaaatgctgggctcttgcactgtttggtggaaatggtgagacaggatttgagcaaaattctacttattcagtgttcagcatttctattacattgactgatgagggttatgaacatttttatgaggttgcttacactgtctttcagtatttaaaaatgctgcagaagctaggcccagaaaaaagaatttttgaagagattcggaaaattgaggataatgaatttcattaccaagaacagacagatccagttgagtatgtggaaaacatgtgtgagaacatgcagctgtacccattgcaggacattctcactggagatcagcttctttttgaatacaagccagaagtcattggtgaagccttgaatcagctagttcctcaaaaagcaaatcttgttttactgtctggtgctaatgagggaaaatgtgacctcaaggagaaatggtttggaactcaatatagtatagaagatattgaaaactcttgggctgaactgtggaatagtaatttcgaattaaatccagatcttcatcttccagctgaaaacaagtacatagccacggactttacgttgaaggctttcgattgcccggaaacagaatacccagttaaaattgtgaatactccacaaggttgcctgtggtataagaaagacaacaaattcaaaatccccaaagcatatatacgtttccatctaatttcaccgttgatacagaaatctgcagcaaatgtggtcctctttgatatctttgtcaatatccttacgcataaccttgcggaaccagcttatgaagcagatgtggcacagctggagtataaactggtagctggagaacatggtttaattattcgagtgaaaggatttaaccacaaactacctctactgtttcagctcattattgactacttagctgagttcaattccacaccagctgtctttacaatgataactgagcagttgaagaaagacctactttaacatcctcatcaagcctgagactttggccaaagatgtacggcttttaatcttggaatatgcccgttggtctatgattgacaagtaccaggctttgatggacggcctttcccttgagtctctgctgagcttcgtcaaagaattcaaatcccagctctttgtggagggcctggtacaagggaatgtcacaagcacagaatctatggatttcctgaaatatgttgttgacaaactaaacttcaagcctctggagcaggagatgcctgtgcagttccaggtggtagagctgcccagtggccaccatctatgcaaagtgaaagctctgaacaagggtgatgccaactctgaagtcactgtgtactaccagtcaggtaccaggagtctaagagaatatacgcttatggagctgcttgtgatgcacatggaagaaccttgttttgacttccttcgaaccaagcagacccttgggtaccatgtctaccctacctgtaggaacacatccgggattctaggattttctgtcactgtggggactcaggcaaccaaatacaattctgaagttgttgataagaagatagaagagtttctttctagctttgaggagaagattgagaacctcactgaagaggcattcaacacccaggtcacagctctcatcaagctgaaggagtgtgaggatacccaccttggggaggaggtggataggaactggaatgaagtggttacacagcagtacctctttgaccgccttgcccacgagattgaagcactgaagtcattctcaaaatcagacctggtcaactggttcaaggcccatagagggccaggaagtaaaatgctcagcgttcatgttgttggatatgggaagtatgaactggaagaggatggtaccccttctagtgaggattcaaattcttcttgtgaagtgatgcagctgacctacctgccaacctctcctctgctggcagattgtatcatccccattactgatatcagggctttcacaacaacactcaaccttctcccctaccataaaatagtcaaataaataaactgcagtcacgtttggcctgaaaattcactgggccgtcgtttccgtcg

SEQ ID NO: 350443 - DNA, 840 bp, Homo Sapiens
  misc_feature (418)..(418): n is a, c, g, or t
cggacccgacgtgcttcatctcaacacattttagttttctataatagaagcaaggtagatttcctcaagccgtggtatgcagctaccatgtaattgggaggtgacactaaggggatgtgggtgttgggctcagtgtatggtatttagctgtaattatagcatctgctaacctctcttgccattgtagatgattggtataaaatgtgaaggcatgccagagagcttcatcatcgttttggtctggaaggttaggggtaacctgagaataggaagaataaaatgaggtcttcagatgctaagcaggtccagggacatctgcctgggggttaggtttaagagctatctttcttcttgaatttctttcctatcttcccttcccttgtaagattgaagcactgaagtcattctcaaaaatcangacctggtcaactggttccaaggcccatagagggcccagcgaagtaaaatgctccagcgttcatgtgagtatgtttaactaactccatcccattctagggttgtcatttactgagtgagtttgggtggttatcatcagaactcttaaacccctaaatctggtcagcatatttttcacttttgtctttgtcctctttcaggttgttggatatgggaagtatgaactggaagaggatgggtaccccttctagtgaggattcaaattcttcttgtgaagtgatgcagctgacctacctgccaacctctcctctgctggcagattgtatcatccccattactgatatcagggctttcacaacaacactcaaccttctcccctaccataaaatagtcaaataaataaactgcagtcacgttggcctg

SEQ ID NO: 350444 - DNA, 424 bp, Homo Sapiens
ttgaaggaataccccacccttggggaaggaaggtggaataggaaactggaaatgaaagtggttaacaccagacagtaccctcctttgaaccgcccttgcccccacgagattgaagcactgaagtcattcctcaaaatccagacctggtcaactggttccaaagcccatagagggcccaggaagtaaaatgctcagcgttcatgttgttggatatgggaagtatgaactggaagaggatggtaccccttctagtgaggattcaaattcttcttgtgaagtgatgcagctgacctacctgccaacctctcctctgctggcagattgtatcatccccattactgatatcagggctttcacaacaacactcaaccttctcccctaccataaaatagtcaaataaataaactgcagtcacgttggcctg

SEQ ID NO: 350445 - DNA, 1030 bp, Homo Sapiens
  misc_feature (43)..(79): n is a, c, g, or t
tgaagatcatataggggaatggagctctaccgcggggcggcgnnnnnnnnnnnnnnnnnnnnnnnnnnnnnnnnnnnnnatcaggccaaatcggccgagctcgaattcgtcgagagcggagatttagcatcaagcacagacctacactcgctctttctctccggtacacacagctccccacattctcacccctgcccgcgcgccgggccgcctgactgcacggcttcccctccagccagatgctggagaacacacactgattcgctgctttccaagaccctgttcagtctctttctctatacaaagatttttttaaaaactatatataagaattctttatttgcaccctccctccgagtcccctgctccgccagcctgcgcgcctcctagcaccacttttcactcccaaagaaggatgaagggtggttgtgtctcccagtggaaggcggccgccgggttcctcttctgtgtcatggtttttgcatctgctgagcgaccggtcttcacgaatcattttcttgtggagttgcataaagggggagaggacaaagctcgccaagttgcagcagaacacggctttggagtccgaaagcttccctttgctgaaggtctgtaccacttttatcacaatggccttgcaaaggcaaagagaagacgcagcctacaccacaagcagcagctggagagagaccccagggtaaagatggctttgcagcaggaaggatttgaccgaaaaaagcgaggttacagagacatcaatgagatcgacatcaacatgaacgatcctctttttacaaagcagtggtatctgatcaatactgggcaagctgatggcactcctggccttgatttgaatgtggctgaagcctgggagctgggatacacagggaaaggtgttaccattggaattatggatgatgggattgactatctccacccggacctggcctccaactataatgccgaagcaagttacgacttcagcagcaacgacacctatccttacctcggtaaacagatgatggtttaa

SEQ ID NO: 350446 - DNA, 739 bp, Homo Sapiens
tcctgccaacacatgggctccacgtggtgtgctcactggctgtttggactggaccgtgtatcttgggaagggttgtcggccctgtgatgctgccaccaccggaaggaggcaggattccccacagccaccagctacacccctgccaaggagtcgttctctgagcggccttgcttccctctctgccaacactctccctgtgcacatcacagatgccaccaggaagagggaatctgcagtcagaagtgcacttgaaaaaaagaacaaagcagatgagagtattcagtggctggagatacacaaaaagaagtctcaagcaatgtccaaatctgtgaccttgcgtgcaaaagccatggatccccataaaagcctggaggaagtgttcaaagcaaagctgaaagagaaccggaacaatgaccgtaaaagagcgaaagaatataagaaagaactggaggaaatgaagcagcgaatacaaacaaggccctatctctttgaacaagttgccaaggatctagccaagaaagaagcagaacagtggtatctagacaccctgaagcaggctgggctggaggaagactttgtgagaaacaagggtcaaggcacccgggctgttcaagagaaagagaccaaaatcaaggattttcccaggttccaagaaactacaaaactcagcatcagagatccagagcagggtttagaaggatctctagaacagcctgcaagccccaggaaagtactggag

SEQ ID NO: 350447 - DNA, 1123 bp, Homo Sapiens
  misc_feature (52)..(88): n is a, c, g, or t
agaactgataatccactatagggcgaactggagctctacgcggtggcggcgnnnnnnnnnnnnnnnnnnnnnnnnnnnnnnnnnnnnnatcaggccaaatcggccgagctcgaattcgtcgagagcgggggattttgggccaccattttggattcagcaggtcctcttcctgactatactcctccagaaattttctcttttgaaagtactactggatttacattgtatgggatgctctacaagcctcatgatctacagcctggaaagaaatatcctactgtgctgttcatatatggtggtcctcaggtgcagttggtgaataatcggtttaaaggagtcaagtatttccgcttgaataccctagcctctctaggttatgtggttgtagtgatagacaacaggggatcctgtcaccgagggcttaaatttgaaggcgcctttaaatataaaatgggtcaaatagaaattgacgatcaggtggaaggactccaatatctagcttctcgatatgatttcattgacttagatcgtgtgggcatccacggctggtcctatggaggatacctctccctgatggcattaatgcagaggtcagatatcttcagggttgctattgctggggccccagtcactctgtggatcttctatgatacaggatacacggaacgttatatgggtcaccctgacctgaatgaacagggctattacttaggatctgtggccatgcaagcagaaaagttcccctctgaaccaaatcgtttactgctcttacatggtttcctggatgagaatgtccattttgcacataccagtatattactgagttttttagtgagggctggaaaagccatatgatttacagatctatcctcaggagagacacagcataagacgttcctgcctcgggagaacacttatgacactgcatctttggcactaccttcaagacaagcttggatcgcgtaatggcggctctacaagtgatctacctttcgacctggggagaacctctcgggtatacacgggttatgtaactcaaatgcggcggtttaatcaacagaaaacatagaattgatcatcatagtttggttccctgtcatgtagcaatctactcgtgaaagat

SEQ ID NO: 350448 - DNA, 1307 bp, Homo Sapiens
  misc_feature (132)..(190): n is a, c, g, or t
  misc_feature (1117)..(1117): n is a, c, g, or t
  misc_feature (1241)..(1241): n is a, c, g, or t
  misc_feature (1293)..(1293): n is a, c, g, or t
tttctccagtttgagcgggggtgtcgggagcaggcggagagctttcctgcgaggctgtggaagcagtgaacactcttctcagcggctcgcctcccagcagtgctattttttgccatccgccctcacccccannnnnnnnnnnnnnnnnnnnnnnnnnnnnnnnnnnnnnnnnnnnnnnnnnnnnnnnnnngagacctctctgggtttctttgccttgagtctcccggggctgtgagaagccaggcgcatctcaaaccgagctggcagctccaggctccggagccatgccctgcacggaccctcgtctttaccacgctcctgaggaatgaaaggaacccagggaccctcagaaggcagcagtgatgcggaccaaccccccggagcctgcacccttccgagggccataggcgacccagggaactggagagagctccagaaaggaaatcccagctttcccaaagtccctgtggatgctgacaaaaggagacctgaatttttggaagagcctgtactaggttacccggctgcagagtgattttcccctccggcactgactctccccctccaacccccagccgtccagagtaccatgaagaattatgaggatgtgtgacagaggtatccagatgttgatcaccactgtaggagcctttgccgcttttagtttaatgaccattgcagtgggcacggactactggttatattccagaggtgtgtgcaggactaaatctacaagtgataatgaaaccagcaggaagaatgaagaagtaatgacccattcggggctgtggaggacctgctgcctagaaggggctttccgaggcgtgtgcaagaaaatcgatcacttccctgaagatgctgactacgaacaggacacagccgaatatctcctgcgagctgtgagggcctccagtgtcttccccatcctcagtgtcacgctgctgttcttcggcgggctctgcgtggcagccagtgagttccaccgcagcagacacaacgtcattctcagcgcgggcatcttttttgtctctgcagggttaagcaacatcattggcatcatagtttatatatcaggcaacgccggagaccccgggcagcgtgactccaaaaaaagttnactcctatggttggtccttttattttcgggagccttctctttcatcatcggcaggaaatttgttagggagtgggtttgccgtggcacatctattatttgaaaaaacattcaggcagtttacggngccaaattcccattcggagtttcctggaggaaatcttactttttggccccgncttcccaccttaca

SEQ ID NO: 350449 - DNA, 1112 bp, Homo Sapiens
  misc_feature (10)..(10): n is a, c, g, or t
  misc_feature (14)..(14): n is a, c, g, or t
  misc_feature (19)..(19): n is a, c, g, or t
  misc_feature (22)..(22): n is a, c, g, or t
  misc_feature (29)..(29): n is a, c, g, or t
  misc_feature (36)..(36): n is a, c, g, or t
  misc_feature (50)..(50): n is a, c, g, or t
  misc_feature (55)..(55): n is a, c, g, or t
  misc_feature (60)..(60): n is a, c, g, or t
  misc_feature (78)..(78): n is a, c, g, or t
  misc_feature (81)..(81): n is a, c, g, or t
  misc_feature (83)..(83): n is a, c, g, or t
  misc_feature (100)..(101): n is a, c, g, or t
  misc_feature (105)..(105): n is a, c, g, or t
  misc_feature (115)..(115): n is a, c, g, or t
  misc_feature (117)..(117): n is a, c, g, or t
  misc_feature (122)..(122): n is a, c, g, or t
  misc_feature (135)..(135): n is a, c, g, or t
  misc_feature (153)..(153): n is a, c, g, or t
  misc_feature (289)..(289): n is a, c, g, or t
  misc_feature (317)..(373): n is a, c, g, or t
gccggaaccnatanagctntcnaaaattnagtctcntttgtaacatccanagganttggnaaagctggatttcctttntgngntttctcaattccctggnncccnatgccctcgnanggtgnaggctccgggggnttgtccgcatcactgctnccttctgagggtccctggttcctttcattcctcaggagcgtggtaaagacgagggtccgtgcagggcatggctccggagcctggagctgccagctcggtttgagatgcgcctggcttctcacagccccgggagacnaaaggcaaagaaacccagagaggtctcnnnnnnnnnnnnnnnnnnnnnnnnnnnnnnnnnnnnnnnnnnnnnnnnnnnnnnnnntgggggtgagggcggatggcaaaaaatagcactgctgggaggcgagccgctgagaagagtgttcactgcttccacagcctcgcaggaaagctctccgcctgctcccgacacccccgctcaaactggagaaaagacagagtcctggggcgggggccggctggtttccctgggggcgccaaggtccgtggtgctgaagggacagctccccgcctgttgccccgcctccgtcgtcttaacgcctaggctttaaggtccgtggtgccgaagggacagctccctcatgcagctgcacaccgccgcccgggctagaaacccggggtgctaaagggtctttcttccctcaccccgcccttcccccgttccttcccgggtcagccagccggctcggctctgcccagtcaagcccactctccgcgcaaagtttctggagccgaggacagtcagcgccctggctcctgggcgctgcagcacgacccggttcctccgctctaggaagggttaaggaaaggggaaggggagcgaagcccgtagcgcactctggcgctccctcagcacccacccaacgcggcattcttcaatcctccctttcaccccatgagccaggcaagtttgccttttgctgcgggcaccactggagcccattggggaaaaagaagacccgaaagaccgagtcttcttaaaggcaccggcagctctggagacggctctatggctcgcttaggcgggcaaaaagtccgct

SEQ ID NO: 350450 - DNA, 772 bp, Homo Sapiens
  misc_feature (44)..(80): n is a, c, g, or t
cgatgtatagatactatagggacctgattcacgcggggcggcgnnnnnnnnnnnnnnnnnnnnnnnnnnnnnnnnnnnnnatcaggccaaatcggccgagctcgaattcgtcgagagcgggacggtgcctcagcactccccaaaacatcccattttgcaggtgtggaaacccacgtcccgcagaggctgggtgtttgctccactcagttctggagacttagcttgaggctctctgatctgttctcctgctgagcaccccaggaagggctccaggtctcccagccacttagtgagagtggcaagtcctgtctcacttgatctttgggagcataagacgagatcacagaaaatgtcatcaatgtgaaagtgttttgtaaacgaaggcactgctcaaacgtagtgttatcttcagcctggctactggcttcctacaaagtgtgaagggatgaaggtaaaagctctttcttgaataatgttatccatcaagacagatgaaaccacactggtcagctcctcctgccctccccccaagccccactccccttcattcacacatgtttaaagacattcgtaggctgagaaatgattcctgctgctcctctgacacccggaatgtgccttgtgattggcagagtgtccctccagaatagcttaattttttccccatttcttgactaatgtcctctactccttggccctgtaattgagaattgggcttgcaatggccagcacacgagcatcttccctgaaagctcagaaatgatggctctcc

SEQ ID NO: 350451 - DNA, 563 bp, Homo Sapiens
tgagcccagtactgacagcctgcttaaagtttcacccccagaggacgaagaggtcaagaaccttgcagaaaagttggccaggttcatagcggacgggggtcccgaggtggaaaccattgccctccagaacaaccgtgagaaccaggcattcagctttctgtatgagcccaatagccaagggtacaagtactaccgacagaagctggaggagttccggaaagccaaggccagctccacaggcagcttcacagcacctgatcccggcctgaagcgcaagtcccctcctgaggccctgtcagggtccttacccccagccaccacctgccccgcctcgtccacgcctgcgcccactatcatccctgctccagctgcccccgggaagccagcctccgcagccaccgtgaagaggaagcggaagagccggtgggggcctgaagaggataaggtagagctcccacctgctgaactggtgcagagggacgtggatgcctctccctcgcctctgtcagttcaggacctcaaggtggctcggcttatgagaaggggaagcctgtgggtctagt

SEQ ID NO: 350452 - DNA, 1094 bp, Homo Sapiens
agcggagtgtgggattggatgagtctcaagatggacaaccgggatgttgcaggaaaggctaaccggtggtttggggttgctccccctaaatctggaaaaatgaacatgaacatccttcaccaggaagagctcatcgctcagaagaaacgggaaattgaagccaaaatggaacagaaagccaagcagaatcaggtggccagccctcagcccccacatcctggcgaaatcacaaatgcacacaactcttcctgcatttccaacaagtttgccaacgatggtagcttcttgcagcagtttctgaagttgcagaaggcacagaccagcacagacgccccgaccagtgcgcccagcgcccctcccagcacacccacccccagcgctgggaagaggtccctgctcatcagcaggcggacaggcctggggctggccagcctgccgggccctgtgaagagctactcccacgccaagcagctgcccgtggcgcaccgcccgagtgtcttccagtcccctgacgaggacgaggaggaggactatgagcagtggctggagatcaaagtttcacccccagagggagccgagactcggaaagtgatagagaaattggcccgctttgtggcagaaggaggccccgagttagaaaaagtagctatggaggactacaaggataacccagcatttgcatttttgcacgataagaatagcagggaattcctctactacaggaagaaggtggctgagataagaaaggaagcacagaagtcgcaggcagcctctcagaaagtttcacccccagaggacgaagaggtcaagaaccttgcagaaaagttggccaggttcatagcggacggggggtcccgaggtgggaaaccattggccctccaaaacaaccggtgagaaccagggcattccagctttctgtatgagcccaatagccaaggggtacaagtactaccgacagaagactggaggaagttccggaaagccaaggccagctccacagggcagctttcacagcacctggatccccggcctgaaaccgaaagtccccttccttgagggccctgttcagggggcttaacccccagccaccaccg

SEQ ID NO: 350453 - DNA, 746 bp, Homo Sapiens
cacttgttctggagggcccccgtaaatttcccaagtttaataaaccatcattctgttttggccatctattgcaaagggagggtttttaaaagcagagagactccagaatgggaatcccggagtctgaaagtaaaaacactccctcttcagttgttgcttctgtagtaaaatcaacaaattgcttacttatgactgttttcttccaagttgcttagaaagcttctactttttctaattgagaaattgagtcatttggagtcagagctgggattctaggaacacacacgaacctactgagaaccaaaaacaggaaggtgagtctttcctctctgaaaaaaaatctgcaaatcttccaaatatgattggtattcccataggcatgtaatgacattctgtccataaataccctttattctgtagcccagtcagactcagactcttagtggctactttccttccttactgtcttccatccttttattaagcagattggcttggctggtcatactctactgctggttttgcccgactctataaccaccgcctgtcccgtgtgagtgaaggcacatccttatggaaattgctactgttctttccagtgacaatctatttttcatggtggaagactagcatttggatgttttaggaatgactgaactaattctaaaaagaatgtttgagggaaaagttctctgcctgagatgaatgatttaaagaaataagatgggctgtagtctcagctaccc

SEQ ID NO: 350454 - DNA, 1424 bp, Homo Sapiens
agcgggggcgcaagataagctaggagccgcgcgagtcgtagtgtcgctgtttgcgggtctccgcgcgggaccggggcgcagcggggtcgctgaggcgagggtgtcatgtcagacaacgaggacaattttgatggcgacgactttgatgatgtggaggaggatgaagggctagatgacttggagaatgccgaagaggaaggccaggagaatgtcgagatcctcccctctggggagcgaccgcaggccaaccagaagcgaatcaccacaccatacatgaccaagtacgagcgagcccgcgtgctgggcacccgagcgctccagattgcgatgtgtgcccctgtgatggtggagctggagggggagacagatcctctgctcattgccatgaaggaactcaaggcccgaaagatccccatcatcattcgccgttacctgccagatgggagctatgaagactggggggtggacgagctcatcatcaccgactgagctggagtcatcttcctgcccttgccccatgcccaattttcattctcactttatatgtgtaaataataaaatattcaactttccaacccccttcccctctgcttatctgcaatgtcaccacctgttgcttccccgttaccgccatgctgcgtggagcatgcacctattccagtggccctgtgactgtcagctccttaagaagcaccaggggccctatagcccctttggatccccccacatccttccctccatctccctgttccccagagcaaaggctgctgcagggcgagacacctcaggctgccttccaagcagacagacaagtctttgtgcccagggagcatggttgccacggaaacccccaatttcctttccagtggggactggctgcaggggcttctcccttctcaggagtatcacagagcaggtctcatcaagccacccattgtttcctaaggacctgcttcgagcctcttatcgtgggctcggatcccctttccaggaccggtggccccagcaggaaccctggtggggtgtgtcgctgatctcccaccctccccaggcagagccctgctgggcaagtcagcagctggagcaaggaccgagcacctgcctacccctgcccccatggctctgtccccacttctcctcaggactctgcccacacgctgtcctctgtggcccacctctttggtgtgccacacccatgccttcttcctagcctctataagatatcctttccctcctatttggggctggtgatcccctgaggccttggggacatggtgctggggtggtggtgctcctgggtcccggtgttcattacgtcagagctggagctccccttcctctgcctgaggttcttaatgggtcctcttcctttcttcaacctgcttaccacctgaggttagaccagtcacactgggtcctccctc

SEQ ID NO: 350455 - DNA, 1408 bp, Homo Sapiens
  misc_feature (1211)..(1221): n is a, c, g, or t
  misc_feature (1247)..(1273): n is a, c, g, or t
tgggaaggggctcagcgtgggaaaggatggttgagttttaaccagaggcaaagcgtgagcgggatcagtgtgtgcggaacgcaagcagccgagagcggagaggcgccgctgtagttaactcctccctgcccgccgcgccgaccctccccaggaacccccagggagccagcatgaagcgagctcaccccgagtacagctcctcggacagcgagctggacgagaccatcgaggtggagaaggagagtgcggacgagaatggaaacttgagttcggctctaggttccatgtccccaactacatcttcccagattttggccagaaaaagacggagaggaataattgagaagcgccgacgagaccggatcaataacagtttgtctgagctgagaaggctggtacccagtgcttttgagaagcagggatctgctaagctagaaaaagccgagatcctgcagatgaccgtggatcacctgaaaatgctgcatacggcaggagggaaaggttactttgacgcgcacgcccttgctatggactatcggagtttgggatttcgggaatgcctggcagaagttgcgcgttatctgagcatcattgaaggactagatgcctctgacccgcttcgagttcgactggtttcgcatctcaacaactacgcttcccagcgggaagccgcgagcggcgcccacgcgggcctcggacacattccctgggggaccgtcttcggacatcacccgcacatcgcgcacccgctgttgctgccccagaacggccacgggaacgcgggcaccacggcctcacccacggaaccgcaccaccagggcagggctgggctcggcacatccggaggcgcctgctttgcgagcgccccctagcggcagcctcggaccggtgctccctgtggtcacctccgcctccaaactgtcgccgcctctgctctcctcagtggcctccctgtcggccttccccttctctttcggctccttccacttactgtctcccaatgcactgagcccttcagcacccacgcaggctgcaaaccttggcaagccctatagaccttgggggacggagatcggagctttttaaagaactgatgtagaatgagggaggggaaagtttaaaatcccagctgggctggactgttgccaacatcaccttaaagtcgtcagtaacaagtacccccaggaacacaaggtacactttcagataannnnnnnnnnnaaagactacagcgttgtcggtttacnnnnnnnnnnnnnnnnnnnnnnnnnnncatcatggtcagtgtattagcagtttttaaaaactagtggtgaaatttggttcagacatttaacattgaaatagtgagtataagccaaccactttgtggataggtttgtactgtggctaattaacttggtaacgc

SEQ ID NO: 350456 - DNA, 1260 bp, Homo Sapiens
tgcgggagtggtcgggggagtgttgtcctggtttgtggtgcgtgggggctgtgtgttggctgattgttgacagggggtggtttcggatgtggcgagcgttgccagtctgtgagggtgtgcaggtcattcgtcctgggcagaaggcggagcatctgggccgttctgctacttggcaccgctgatatcaggctgccgaggggtgaacctgcattgtagagagtgtgcacattgaaatcgtagatggccatggtgcattatggaatccctgccatgtatgaagggtgagtactttgaagttgcagctgcgaagagtcggtgtttcttctttgttcgtattctgattggtttgttctgtgtctacgtgacggtgcccagtctgccttgcgcatcatcgtctgtgccgcctcctgggttatttggacacacgcctcctggccattcgtcaccgtcagtcagtttcttagggatcgtttccaatccgtctctcgcctaagtagaaatcaggcactggttgtggtccttgggttaattctcagccgacgattctgagagatgtagggtcagaggctgacaaggcgagtaattgtacctgcatgccttccccttcctccagtctgccctccagcaatgtctgtttggggtgtgggggcggtgggataaaaaggaaatctcatcctacaaaaagacaaagttggggaatcagtaaagtcctatttaaggtggtggcagaggggctgaggatgtaggaccagttggcagctgtgcggggtaggagagaaggcaggaactgtaggatcatacacctgggcaggtgagggaggcctggtcactctatcgaatgaacagatttggttggtgagtgtcaaaagggccggtcctctcaggatgggagtcgatgcttggagcctattacataggcacagggttaggccttcacactcacccttgccatgggtttgtgactgctggtcttagcaggaggacagcttgaggagggagtcactgagtcacctgcagcccaaatggaaaccaactcaaaagggccaaggccagaagcaccaccttcaatacaacagcaccaatgtggcagtgaggcgcataacactgcctgtgccacagctgagatcctttttctaaagcttcgggatccttcaacttctctccccacagaagctgggctgctgtggtggtatgtagcacaggaaaaatataagatcctttaaagaaacaaacactcagtccaggcgcagtggctcacac

SEQ ID NO: 350457 - DNA, 449 bp, Homo Sapiens
caaaatatattttttaaaagccacagtggaacactgcattcatccatgagagcatcactgagaccgcccttgcaccaatgtgaacccttgccaagtccctgcgaaaggagtccgctaagattgtttattcattcatttacccagctatccattcattgcttctttaattcaagtatttatggggccctaagtttctgtcaggcccagagaacaagacaggcaaaggctctgccctgcccccccggaacctgtatcctggtgagatgagcaaataaatgaaacggatgatgatggagaggagtcggtgcccctaaggaaactcagcagagtgtagtgtaggcatagagggggacagggggaaagcagcactttagatgggacagccaggcctgcagtctgttggtgagaagagccagtggaagaaccttccagactgaggtaagagagag

SEQ ID NO: 350458 - DNA, 1846 bp, Homo Sapiens
  misc_feature (1469)..(1469): n is a, c, g, or t
  misc_feature (1747)..(1747): n is a, c, g, or t
  misc_feature (1785)..(1785): n is a, c, g, or t
  misc_feature (1835)..(1835): n is a, c, g, or t
tctgaggatcccgtttgataggtaacaacatcttcctcaaagagctggagaagtacgagcaactgcctgaggatgtgggacactgctttgttacctgggcagacaaatttcagatgtatgtcacctactgtaaaaacaagcctgattccaaccagcttatcctggagcatgcggggcaccttctttgatgagatacaacagcggcatggtctggccaactccatctcttcctacctaattaagcctgtccaaaggatcaccaaatatcaactgctcctgaaggaacttttaacttgctgtgaagaagggaaaggggagctcaaggatggcctgggaggtgatgctcagtgtcccaaagaaagccaattgatgccatggcatgttcagcatgctgggaagggtttcgacgagaacctggatgtgcagggggagttgattctccaggatgcctttcaagtgtgggacccgaagtcgctgatccggaaggggcgggagcggcacttgttcctctttgagatctccttggtttttagcaaggagatcaaagattcttcaggacacacgaaatatgtttacaagaacaagctactgacctcagagctgggtgtgaccgagcacgtgaagggcgatccctgcaaattcgccttgtggtctgggcgcaccccatcctcagacaataaaacagtgctgaaagcctccaacattgaaaccaagcaggagtggatcaagaacattcgagaagtgattcaagaaaggatcattcacctgaaagaagctttaaaggagccacttcagctccccaaaacaccagccaaacagaggaacaatagtaagagggatggagtggaggatattgacagccagggggatgggagcagccaaccagacaccatctccattgcttctaggacctctcagaacacagtggacagtgacaaggatggcaaccttgttcctcggtggcacctgggacctggagatcctttctccacttacgtttagcgcgcatcctgggacttgtccctgcagctcaccgggttagccgtggcaccgttgggacctcccaccaggactccaatcacccacctctcttgagacttctctggcagggctggtgtggggtgcagcctttgctcagagggcaacatgttccaagcaaaatctccccgcctgggccatgggctcaccctcggggctcccttcttctctactgggtgcaattcgaggttgctgagcttctctccaaagtctaaaatggtggggcagtagggacctgtgagaggcccaatggcccaatgtacttcccccagatcccacttcagaacagcaggtacgcccaggctcctgcttgccctagaggtctgcaacatgagtgaagaggttaattagagggacacacttatctctgaagtttttctccaggctgaacatttctattatcagtggcccctaatctggaaaaacccatncattctaatctagcttgtatccccacatcatgagaaagagggaagaagaagaagggatgatgtgtggtagagaagatgagggttaactttagcctttcccaaacactggcaacaaccacttcctcaacaatttttctatttgcttcagcctactcagattttttcaggtttttctagctcctccataacctcactccctcccgagggtctctgggttcaaaggaccaccctaccagcccctattttgcttcagggtatcctgttgaaggggtggggtnggggagagtgaggaggatattaaattgaaaacttgggncacatgtttgataattgtttggaacttgggatgatgggaccggggggcantcatttttacc

SEQ ID NO: 350459 - DNA, 2629 bp, Homo Sapiens
  misc_feature (1664)..(1673): n is a, c, g, or t
gagcgaggcctgggtggcgaattcggcacgagggagactttgagctgcagaaggtgtgttacctaccgctcaacaccttcctcctgcggccactgcaccggctcatgcactacaagcaggtcctggagcggctgtgcaaacaccacccgccgagccacgccgacttcagggactgccgagccgctttggcagagatcacggagatggtggcacagctccacggtacgatgatcaagatggagaatttccagaagctgcacgaactcaagaaagatttgattggcattgacaatcttgtggttccgggaagggagttcatccgtctgggcagcctcagcaagctctcggggaaggggctccagcagcgcatgttcttcctgttcaacgacgtcctgctatacacgagccgggggctgacggcctccaatcagtttaaagtccacgggcagctcccgctctatggcatgacgattgaggagagcgaagacgagtggggggtgccccactgcctgaccctccggggccagcggcagtccatcatcgtggccgccagttctcggtccgagatggagaagtgggttgaggacatccagatggccattgacctggcggagaagagcagcagccccgcccctgagttcctggccagcagcccccctgacaacaagtcccctgatgaagccaccgcggctgaccaggagtcagaggatgacctgagcgcctcgcgcacatcgctggagcgccaggccccgcaccgcggcaacacaatggtgcacgtgtgctggcaccgcaacaccagcgtctccatggtggacttcagcatcgcagtggagaatcagttgtctggaaacctgctgaggaaattcaaaaacagcaacgggtggcagaagctgtgggtggtgttcacaaacttctgcctgttcttctacaaatcacaccaggacaatcatccccttgccagcctgcctctgctcggctactcgctcaccatcccctctgagtccgagaacatccagaaagactacgtgttcaagctgcacttcaagtcccacgtctactacttcagggcggaaagcgagtacacgttcgaaaggtggatggaagtgatccgcagtgccaccagctctgcctcgcgaccccacgtgttgagccacaaagagtctcttgtgtattgatggccggacacactcgtttccgcagtggctgctttcctggaagacgtttcctttcttctgtattaatgaagcctggtaaaattaacacctgtctgaaaatcaaaaacatggcttcccagcagctctcctgtctccacagccgcgtttttttaaccccgacctctcagcgtctgaatgaacagcgctcccacctccagtcctggcatccgctgggggcgctgttctttagctagtgccagtattaaaacattgtcattacgagagtgccaaatgacatcttccctccaccctgcccctgaaaaacagtacacacacatccgttcaacacaagacagggcaagtgtttttcttcctaaaaaaagttctttcttttattattttcacctattggctgctgcattttacgaagtggacttcccggtgtttgtttgtttgtttgcaatacactcagtgcagccttaagcaaatgagatcattttcagatttcannnnnnnnnncagtctttctacttttgtaataataggaagttagtaggactcacttctctgattaataagcaatttgcagcacacagcgttccactgcggggtttcacgctcacctgaaaacacctgttcccaacctacttcttggtgcaagttgaccaaatcgttttaagtggtaactctttccaaccgtagcagggttgttttctgttaagcaaagccgagatccagtgcaatacctggactgtcaccgtcctgtgagtggtgtacacaatgggaagataataagccgtggtgttttgctgtctgtctgtgtcacaagcatgaaaacccgtgtgtcattgatcagcaccatttgtggtatgttccgtgatgagcgtttagtgagcctgctggctgcagagcactatgaaatcatggtacgtagtccccggcacctgtcgttattcctatatcctcctgcaactgtggtttgaaactgcgcattctctagtagtatatatcgtgcctgtcttcaaaaacatttccctttttatactcattccccccaggcatggggtagtgtcagtcggactgcacagggaacacggtttccagtggctttggcccctactcgggaaacgtctgcctgttctcgatggtgatggggtggctgccattcccttggttttcctaagccctttctaacgagagtctcaaacaagcggaggcgagggccaattcaaccccattctttccagcgccccgcaccatagcacctgcccacctgagaaccaggaacgcaccctctctgtggagctctgactggtgtagctggaaacaaacagcaacttgcaaacggacgaagagcctgccgtgtgttaatcatttgccttacaagatgtaccagacggtttccagtactaacaaagggaataaaaatacctcacgccacaatccagcatattgatgttttaaggcaaaacaac

SEQ ID NO: 350460 - DNA, 1119 bp, Homo Sapiens
cctggctctgaacttagggaccttgtctcccaacctgagccccgacaccaagcaggcctctcccttgatcagaccgccgctgaatgaccaggccggcccccggacggacgatgaggatgagggccggaggaagagattcccaagctgataaagcgtacttcatagctaaggaagtgtctaccacctagcgaacatatctgaaggatctcgaagttatcacttcgtggtttcagagcacagtgagcaaagaggacgccatgccggaagcactgaaaagtctcatattcccgaattttgaacctttgcacaaatttcatactaattttctcaaggaaattgagcaacgacttgccctgtgggaaggccgctcaaatgcccaaatcagagattaccaaagaatcggcgatgtcacgctgaagaacattcagggcatgaagcacctggcggctcacctgtggaagcacagcgaggccttggaggccctggagaatggaatcaagagctcccggcggctggagaacttctgcagagactttgagctgcagaaggtgtgttacctaccgctcaacaccttcctcctgcggccactgcaccggctcatgcactacaagcaggtcctggagcggctgtgcaaacaccacccgccgagccacgccgacttcagggactgccgagccgctttggcagagatcacggagatggtggcacagctccacggtacgatgatcaagatggagaatttccagaagctgcacgaactcaagaaagattttgattggcattgacaatcttgtggttccgggaagggagttcatccgtctgggcagcctcagcaagctctcggggaaggggctccagcagcgcatgttcttcctgttcaacgacgtcctgctatacacgagccgggggctgacggcctccaatcagtttaaagtccacgggcagctcccgctctatggcatgaccattgagggaaagcgaaaacgagtgggggggtggccccactgccctgaccctccggggccagcggcaggccatcatcgtggccgccaagttctcggtccgaaaatgggaaaagtggggttgaggacatccaaaatggccatttgaacctggcgg

SEQ ID NO: 350461 - DNA, 1679 bp, Homo Sapiens
  misc_feature (43)..(43): n is a, c, g, or t
aaccagaaggggtttccaagaaaccagtgtcccctcgggtttnttacccaggtttcccttgtcccactttcagcgccttcccccagttaagaaaggttttggtgttccccgcccggcggggcgagccaaaaaaaagcaaggaatgttttccctttctgcgcccctgggggcccaccccgctcccgggatgcgctggttcggaaaggggggttacccccagtgccccgcccccaccctgatcaccgggtgtgtctggggtctccgggaaggccagactcccaggccgcacccagaggggcccccggccaggtccttccccagggtccaggggatgccagccaggaggagcagaggccccggcggggctccttgaggcgagtctggaactgcactacagccacgaggatctgcagccgtgaggggtgagtcagcagcgaggaggcgatggagaaggccctcggccggataacggggatgaggtccaacaggtagtcgggagggatggcggcagctgtgtgcgggaagtcacagagcacctccaggatggtcctgcggggccggttgcagtattcaaagagctcctcctggccttgggcagaactgaactccagcagcttctcccgctccagctcatggagggatagacaggccaggagttcgaagaaggagcggcgaggcacgctggcgatgtccaggtagtgggacacgaggtgccgcatggagcagggctggggcagcctcgtgggggaggagacatctggctcccgcggctgcagcatgaagagctggtcagggtccaggcccagcacctggcagaaccgctggacatgggcagccgagttggagggctgaatcagcaccacatcaccagcagcaaagctgatgccagagcccaagatgtcaaactcaatcagccgaacgtcctggaagtgggaggggccggtgactctctggttggagatcatgggtgctaggaagggcttcgactctgacgggggctcctgagagccggggtgagctacccgctgcccctcagagcccgtgctgggtgcctcttggaggaacagcagggtgaacttggagggcagggggactccgggagggatctcagtgaggcccggaggcggcgggtacagccccagaaccctgtcccacaagtctcgcagccaggggtccacagcagcgtcgggccccagctcatgctggtcatcgcccaggcacacgggcaggagggcgctgcccccaagctgcagtagccgtcggtgcagcttcttggccacgaagttgaacttggcgtatgaggagtccccgaggcccaggacggcaaagtccatctgacagagggcagtggagggcaggttcttccggaatataaacctccagaagttcttcatgttgtcaggggggtctccttggcctgtagttgcacaaacaaatatcaccaggggctcgttaatcagattcaccaccgggtaggagtccagggcctgcacccggcagccaagccgccggcgccgggcctcgcgacccagtctctccgacacatcctgagccgtgcctgtctggctgccgaagagcaccagaagctgcgggctcggcatcggggtgcgcccggtggtctggtctgagactaaaaactagaaggcagttcccgccggacgggttgcagggaccgctcc

SEQ ID NO: 350462 - DNA, 675 bp, Homo Sapiens
tttgttggcccgcttgtgtctgtacatctgcatcatcctctgtcggaacacatcgaatgtgtcttctttgtgctcctgcccgtcagcacccaacccttccccttccgagggggttcccctagggagtgaaaaagagagtcagttgtgcacctgagcccagggcctggcatgccaggaactgggcatgggcacaaacagtccatgagatgcaggtgtttgggacacacactgagacatcaaagaaagggaaaatcaagacgcgactcacagtagaaacaaggagtactcaccctcgaagagctggcttttgagggggtgcccagagggccctggttacctcggaatgccttacccagcaggaactaagctcagtattaaatgaaatgcctgctggaggttatgatcggggtttaataaactttgggcctgtgttcgggaccctggctggcccggctatgggttcccgggaatgggaaagcagttccagacggaaactacacagaaataccacttagcttttatgatggtcacaaatgtggccaaaatgaccagggccaacaagctggttaaaaaatctacaccaggacagaaaggaaccctgtaaacacctgcacatgtaaatgatcagcttctcatctgaagatgccttctgtttaaaaaacaaaaatcaactcc

SEQ ID NO: 350463 - DNA, 1179 bp, Homo Sapiens
ggaaatcctggctttctttaagccacagacttcctaggctgtggtcccagctccttgtctgcctggtgccctgtcaccttgcagtgccaccacccccaggggctctgcttgcttccagtggcttctgtagctttggcaactggcagatctttatggcagtagaggtgccagcatggaggatggagtttgggtttataacccaaccctcgaacgaaccagcctgtgggggcctggagtggagctggttttggggagtcacaggtgcggggggttcatcatctcctttctccttctcctttcctgacccctccgacagcttccatgttggccatgggtcaggtgaatggatggagctccaagcggggctcagcccattgacccgagcgaggcgcacacacctgcagcgtggatcaagcgcactctctccagcatcgccctgaccattccatgtgctttgtcctagcatgttcattcttgactttctccacttcattttattaaaaagttaaatgctttaggaatctgtggcgtgtggccactgaccgccccccacctcctgccgctcctccaagtttgagctgagatggttctgtgagtccttggcaggggtcaaagggcacatctccttgaacctagaaagccccctacactctcagaggacacctctcctgtggattcagcgctggggcagtgaaggtgtcgggagccagcagagcatggtgcgtgctgccagctgccggccagccgggatagaggagatgccactggccctccgtgcccccagcccctccctcttaaccgaggctgtccttgctctctgcagaggccgctctgcaggatcctcgtgtcgcgcgtgatgtgtggtggcacagccgtgtcaaagtcacagtgtcttttctgtcgttctagttccagggtcacccccgagaggacaacaggcatctggaagtgctctctcgccactctgggtgctttactgtctctggcttgtttccatcactggaaatcacttagagaattgtagtgtttttggtccttgataaagcctagaagacatttgtgatgttacaaaatggaagttttcttttgtttctgttttttaagatctaagaagttgtgaatgttgttaatcatttagccgttgcaataaatgtagaggaaatgcagtgtgaaaaaaaa

SEQ ID NO: 350464 - DNA, 2429 bp, Homo Sapiens
gctaaaatgcttgcctcattcaacatgttccttaaaaccagagcacagagatttttgcttttttactatcaaatttttaaagcactctgctttgaaaacacccagagttgataatgagtttttaaacatgcttttagacaaaggtgctgtgaagaccaaaaattgcttttttgaaatcataaagccttttgacaagtacataatgagacttcaagaccggcttctgaagagtgtcacacctttgcttatggcctgcaatgcctacgagctaagtgtcaagatgaagaccctcagtaatccccctggacttggctcttgccctagaaaccaccaactctctctgccggaagtctttggcccttttgggacagacattttccttggcctcttctttccggcaggagaaaatcttagaagctgtcggcctgcaagatatagctccctcacctgctgcgtttccaaacttcgaagactccactttgtttgggcgagagtacatagaccacctgaaggcctggctagtcagcagcggatgtcccctccaggttaagaaagccgaaccagagccgatgcgacgaggaggagaaaatgattcctcctacgaaacctgaaattcaggccaaggctccaagtagtctgagtgatgctgtcccccagcgagcagatcacagggtagtgggcaccatcgaccagcttgtgaaacgtgtcatcgaaggcagcctgtctcccaaagagagaactcttctcaaagaggaccctgcttactggtttttgtctgatgaaaatagtctggagtataaatattacaagctgaagttggcagaaatgcagcggatgagcgagaacttgcgaggagccgaccagaagccgacctcagcagactgtgcagtgagggccatgctgtactcccgggctgtccgcaacctcaagaagaaactccttccgtggcagcggcgggggctcctccgtgctcaagggctccggggctggaaggcgaggagagcgaccaccgggacccagaccctcctatcctcaggcaccaggctgaaacaccacggccggcaggtccaggcctctcacaggcaaaaccatccctgccagacagaaatgatgctgccaaggactgcccgccagacccagttggaccttctcctcaggaccccagcttagaagcctcaggcccatcccccaagccagcaggagtggacatctctgaagcacctcagacctcttctccctgcccatctgctgacattgacatgaagacaatggagactgcagagaaactggctagatttgttgctcaggtgggaccagagatcgaacaattcagcatagaaaacagcaccgataaccctgacctgtggtttctacatgaccaaaatagttctgctttcaaattctatcgaaagaaagtgtttgaactatgtccatcaatttgtttcacgtcatctccgcacaaccttcacactggtggtggtgacaccacgggttctcaggagagccccgtggacctcatggaaggggaagcagagtttgaagacgagccccctccgcgggaggctgagctggagagcccagaggtgatgcctgaggaggaggacgaggacgatgaggatgggggagaggaggcccccgctcctggaggggcgggcaagtctgagggcagcacccctgccgacggccttcccggcgaggctgccgaggacgacctggctggagcacctgccttgtcacaggcctcctcaggtacctgcttccctcggaagaggatcagcagcaagtcattgaaggttggcatgattccagctcccaagagagtgtgtctcatccaggagccaaaagtccatgaaccagttcgaattgcctatgacaggcctcggggtcgtcccatgtccaaaaagaagaaacccaaggacttggacttcgcccagcagaagctgaccgataagaacctgggcttccagatgctgcagaagatgggctggaaggagggccatggcctgggctccctcggaaagggcatcagggagccggtcagcgtgggaaccccctcggaaggggaagggttgggtgctgacgggcaggagcacaaagaagacacattcgatgtgttccgacagaggatgatgcagatgtacagacacaagcgggccaacaaatagttccagggtcacccccgagaggacaacaggcatctggaagtgctctctcgccactctgggtgctttactgtctctggcttgtttccatcactggaaatcacttagagaattgtagtgtttttggtccttgataaagcctagaagacatttgtgatgttacaaaatggaagttttcttttgtttctgttttttaagatctaagaagttgtgaatgttgttaatcatttagccgttgcaataaatgtagaggaaatgcaaaaaaaa

SEQ ID NO: 350465 - DNA, 336 bp, Homo Sapiens
  misc_feature (22)..(22): n is a, c, g, or t
  misc_feature (45)..(45): n is a, c, g, or t
  misc_feature (56)..(56): n is a, c, g, or t
  misc_feature (132)..(132): n is a, c, g, or t
ttgtaaactctaactccctgcnttctgggcgcttggcttctcaantaaaggctaanttaccagcttctcttgcatctgggtttgtccaaagtttggggccaatgagatgtgaacggaagttgcatgtattanttctagtttgtgccctaaaaaagaatatgtatgtgttacccttgccctcttaccctctccactggctggggtgcagatgtgatggcaggaattggggcaactactttggacccagaggcagaagcccttgtgatgaggatggcagaactgctctattagccctggactgttactatgaaagataaataaacttgtatcttattc

SEQ ID NO: 350466 - DNA, 589 bp, Homo Sapiens
cctcccaaagagcatatcaaggatatatatatacataatttgttagtttaacataaggcgaagagtaccatttggttttaagagtaaatataggctgaatttattcaagaccaaagcaacctatttaatgaggacaaatgagtgaaaccagctgttttagaatttatctgcagacactggagtgctcctttaaacgaagaaacagcctcccatggcagaggaaaagccaggtccttacaaaggcctctcccatcccagtacttcttctgcctgctgctctgccctgggacgtaggccttcctgccgtttctagtcacaggcaccctcctgcctcagggcctttgcacatgccattccttctacctgaacattcttccccagagagccacatggttcacccctcactacctgccagtctttgctccaatgtcacctttcaacgaggccttccctgacttatttaaaaggacaacacaccccaccctccctccctacccacctctctgcatcttcttcttgtgcacctatcaccatctgagtgctgcagatgttaatcattcatccatttatttgattctcgcctccccat

SEQ ID NO: 350467 - DNA, 769 bp, Homo Sapiens
  misc_feature (413)..(421): n is a, c, g, or t
  misc_feature (596)..(597): n is a, c, g, or t
gggcacgctcaaagacaggcctgtgctcaggacaattttgggggggtctcagggagaaagtgcagggtctttgtcacatacaggaaacaagggcatcatcatcatcaccatatctgttaaaactacttcttccttttgtgtatcatgctcctaatcttccacaccactacatgagtactgttcatatcctaattctaccattttagagacagatgccagtccaggagctggtggcccctggctggctgtttcactgggctcctctgtttgggagaaccttctgggtctaagatgggagcacggtcagcagcagcgttgcctgatcatccagcaggaagtgcaagtgggtttctgggtggtcgtgtgatgatctagcacagctcagaactggtcccccgggacagaaatggtgnnnnnnnnnctggaagcccctgctagaacccctgagccatctcaatgtgcagtgaaggggttgagttgtagaaccaaactgaaggggggctgctaggaaatgggggccggagggtcctatttcaaagagttgatcatttacagcatcgcatcagagtgaaccacatggaaagctggagtgatgnnccccctctgtgcctggtcaaaatacagaccttggcagcaatttccttcatgaggatggagcgcgaatgggcaaagtcatctgcaaggtcatcctcactcttactcaaaggtcatgctctgccatgttttccggagggtgcaacaatagcttaatgaccgagtctgagatgcc

SEQ ID NO: 350468 - DNA, 1200 bp, Homo Sapiens
ggcaccgcccctggaggcagcccttttgagcaagccccttttttcccgggggaaggtggccccgtttaaagccgtttagaaggctgggcttgggtgttccaggggttttcaacccttgaaaggtttttccagcttggccttgtttaggcagggtctccgggacatcttgggctcccccaactcggaggatgtggggccagtgctggagtgttttgataaagaaagggtttgtgactcccaggaccacgtttggtggggcctgcgtgcgtgtggtgaactccttgaactcgctgtcatggatggtgaagtagggacggaagtcgcagcagaacctgaggggctgcaggcagctggtcaaggccagcaccatctccgaggacacgtcgggcgagggtgccaggactagcaggggctccccgaggagcatgagctcccacagtgtctgcatatgagtcaacacaggccggaagcacctgaacaggtccagctcgtggacgctagcaagaaccactggggctggcagcaggttctctttggtcaaactgcttcggaggactggactcggacttgtccaccctggatgggatgcgcacctggacaacaacgcccatgacaggtaggttcagggtctgcccaggtgcaggcgccggccactggtcgatctcactgcacactgcttccaggcagggcgccagcttgtcaaagtactcgggggcgatgaggcttagcagcgcttggaacagccggacaaagggcaagcgggacaccagcaccaaagacttctggaagtagcccctcttcacagagctgtccttcacctgcctgaagtacacgtagccgaagtagtgtgccggctccctctgcagtgccacaggggccctgctgttgtagtgcctgtcgtcggcatgccaggggctcctctgccctccacactggcgcatgcggaagctgaactgagtgtctccaaggcagcctccttgtctgtgagccggaagtcgttcggatacaccagctccagcgcctggcccagctccaggtcgaaggtgaccacgcacacacactccagccaggcggagaagcgcgcccagggccccgccggggtccgcgccgcccgacctgaagacgtgggtccagccgcgcccaggcagccgcgagcccggcgaggccctgtgatcccatactcccgggccagtaccagcc

SEQ ID NO: 350469 - DNA, 881 bp, Homo Sapiens
gtctgcatatgagtcagcacagcccggaagcacctgaacaggtccagctcgtggacgcctagcaagaaccacctggggctggcagcaggttctcttggtcaaactgcttcggaggactggactcggacttgtccaccctggatgggatgcgcacctggacaacaacgcccatgacaggtaggttcagggtctgcccaggcgcaggcgccggccactggtcgatctcactgcacactgcttccaggcagggcgccagcttgtcaaagtactcgggggcgatgaggcttagcagcgcttggaacagccggacaaagggcaagcgggacaccagcaccaaagactggagctggcccagggtagcacgtcccaccaacttcacaggacagctgccccaggaacgcctgacttctggaagtagcccctcttcacagagctgtccttcacctgcctgaagtacacgtagccgaagtagtgtgccggctccctctgcagtgccacaggggccctgctgttgtagtgcctgtcgtcggcatgccaggggctcctctgccctccacactggcgcatgcggaagctgaactgagtgtctccaaggcagcctgagtgcgagtcgggaaaagacaggtagcagatgctgcttttctccttgtctgtgagccggaagtcgttcggatacaccagctccagcgcctggcccagctccaggtcgaaggtgaccacgcacacacactccagccaggcggagaagcgcgcccagggcgccgccggggtccgcgccgcgcgacctgaagacgtgggtccagccgcgcccaggcagccgcgagcccggcgaggccctgtgcccaacagcgcgtccatcccgggaattccggaccggtcca

SEQ ID NO: 350470 - DNA, 1123 bp, Homo Sapiens
tcagttccttataaaggagggttctagcggctacactcttatacagcgcccgtcgggcatgcgcgggcacgcgccgtgggcggccgtagtggggtagcatgagacgaaaatggtaacgcagggggggttgcgctaacacacctagtaattcctgtgcgaaatactcttaagagggagcctagcgcctcagcgtcaaggccatacccgcatccccggcgggaatcatgcgggcgggaggggtccccgggactatgcggggggttcccccaggcacgcatgattctccacccagggttcttcatagtgatccagccccagtccggaagcccctgaacaggtccagctcgtggacgctagcaagaaccactggggctggcagcaggttctcttggtcaaactgcttcggaggactggactcggacttgtccaccctggatgggatgcgcacctggacaacaacgcccatgacaggtaggttcagggtctgcccaggtgcaggcgccggccactggtcgatctcactgcacactgcttccaggcagggcgccagcttgtcaaagtactcgggggcgatgaggcttagcagcgcttggaacagccggacaaagggcaagcgggacaccagcaccaaagacttctggaagtagcccctcttcacagagctgtccttcacctgcctgaagtacacgtagccgaagtagtgtgccggctccctctgcagtgccacaggggccctgctgttgtagtgcctgtcgtcggcatgccaggggctcctctgccctccacactggcgcatgcggaagctgaactgagtgtctccaaggcagcctgagtgcgagtcgggaaaagacaggtagcagatgctgcttttctccttgtctgtgagccggaagtcgttcggatacaccagctccagcgcctggcccagctccaggtcgaaggtgaccacgcacacacactccagccaggcggagaagcgcgcccagggcgccgccggggtccgcgccgcgcgacctgaagacgtgggtccagccgcgcccaggcagccgcgagcccggcgaggccctgtgcccaacagcgcgtccatggcggcggccgcgggttgccggggaaacgcgggcca

SEQ ID NO: 350471 - DNA, 1080 bp, Homo Sapiens
taaacttacggctaggtacgaggcctgggtgttaaattcggcacgagggcggaactccgggtgccggttgaggttgctggtggacctgctctggtggtcttggatgaggccccatgagcgcggcgcccctggtgggctacagcagcagcggctccgaggatgagtccgaggacgggatgcggaccaggccgggggatgggagccaccgtcgtggccagagcccccttcccaggcagagatttccagtacctgacagtgtgctgaacatgttcccgggcaccgaggaggggcctgaagatgacagcacaaaacacgggggacgggtgcgcaccttcccccacgagcgaggcaactgggccacccacgtctatgtaccatatgaagccaaggaggagttcctggatctgcttgatgtgttgctgccccatgcccagacatatgtcccccggctggtaaggatgaaggtgttccacctcagcctgtcccagagtgtggttctgcgccaccactggatcctccccttcgtgcaggctctgaaagcccgtatgacctccttccacagattcttctttactgccaaccaggtaaagatttacaccaatcaagagaaaaccaggacctttattgggcttgaggtcacttcagggcatgcccagttcctggacctggtttcagaggtggacagagtcatggaggaattcaacctcaccactttctaccaggatccttctttccacctcagcctggcctggtgtgtgggtgatgcacgtctccagctggaggggcagtgcctgcaggaactacaggcaatcgtggatgggtttgaagatgctgaggtgctgctgcgcgtgcacactgagcaagtccgctgcaagtctgggaacaagttcttctcgatgcctttgaagtgagcaccagaggccttcctcctccagggccctctgcagaccaggctgagatggaggaacctgctaaaatcgatggagatgcttctagcctcccagtaggaggccccagccatgccttcaacctggcaggaggtgtagccactcctcatcctccctgaagggctgatattct

SEQ ID NO: 350472 - DNA, 266 bp, Homo Sapiens
atatcagcactcagggaggatgaggagtggctacacctcctgccaggttgaaggcatggctggggcctcctactgggaggctagaagcatctccatcgattttagcaggttcctccatctcagcctggtagaaagtggtgaggttgaattcctccatgactctgtccacctctgaaaccaggtccaggaactgggcatgccctgaagtgacctcaagcccaataaaggtcctaggtatctcttgattggagtaaatctttacctgg

SEQ ID NO: 350473 - DNA, 1832 bp, Homo Sapiens
  misc_feature (68)..(209): n is a, c, g, or t
gcatggactgaagtcagaagacctgaccttttatttcagatctctgccatggcctaacgacgtgaccnnnnnnnnnnnnnnnnnnnnnnnnnnnnnnnnnnnnnnnnnnnnnnnnnnnnnnnnnnnnnnnnnnnnnnnnnnnnnnnnnnnnnnnnnnnnnnnnnnnnnnnnnnnnnnnnnnnnnnnnnnnnnnnnnnnnnnnnnnnnnnaagacacttggcaaacttttctctcctataataaacatatacaactcaagcttatttcggaaaaagatattggtgatgttgtttaaagtatgagatagggcatggagctgccacctatgtaccagctattccagatgaccaagccctgctagaataaagactgacttttcattgtgacctctgaaggatgtgcagctcagctttcacctatccccacgttcacccaagccaaaaagaagaattgttcattcaaactggaaatgatctccagcttggaaatgagacttctcatgagcttattctaagatcagagtctgaaaattattttctcaaaagttacaaataaatgtcttttaacagtactgtcagactagtgaccaacaagttactttatgaggatggatgatgatattagagttcaagcaattgtccagtttgtttcgatgccacagtttgcttttaaattcccatagtgagcttccatcttgagacccactcaacacagaaggattacataaaggttgatcacccacgctctacagatgaacaaattgagacccagagatgctaaactgctctgcaggtcacaaacctgaacagcagcatagccaaaatgggaacggagctcttctgacttcaagcccctgcacttttttcttaaccacattaattttatgaatatctatgtggtcaaagtctcttttgtaaaatctgagtataagctgaactagatcatgtctctgtaagctaagatggcagaaacacattgtcatgttagtttggaggagcaaacagatataagtatgtgttgtaatgttatagtgagctgttatgtatcccccagcaatgtccaaagtgatcagagctactagatgacttattacaatgttcagatcccactccttcattcctcctctctcagtgacctgtctacccccaagctttagaactgagctctctccaacttagaactcattagagtttgttgcattagtgattggatctcctcatgaaagttttttgaccaatgacagtagagcccctttaagctagccaggcccaagatagggaagcactgctggtttacatttctgctctttctaattcagttgtctattgcatgcagacatcccctgcccgacttctccattatggaaggctaaggccatccttccttgtccagtttctctacctacacactaacatgccttttccccatggagtgaactctgccagttgtctttggacattttctgcagatgcaggctcagttctgctcttttgttcccacccacttctagatcttcctccatttaatcccttattcttataaggagtctaatttttgtgtattgtccttgattagggcagctgacagctttacaccaaagctgaagtctctcacttaatcctaagcaaggggctagggagaactaagatatccttcccatatcaagggatataggttactagaagggtggaggtctcttaacaggctcactcacctttcagagtttaaattatggtcaggcttaagaagctctctcttgtgactgagtgtattgcatagacatgtctgtgaaaataaaagcacccattttgctaaggctttctgagaggaaa

SEQ ID NO: 350474 - DNA, 484 bp, Homo Sapiens
aatggccataggggttcctcaaaaactgccttaggaagcagttaacttgaaattatattcaaaaatcctttccccaggtccttttaaggattttccccaaatagcttctgtcaagtcccaaaagcaccgaagctcgttgaggtagccgccatgtttccagtcagccggcaatgtcccagtgcagtccccccacagggcctctcttcccagggttcacatttttaagattcacaaacagttgattgttttttgacttcgtgacagtcatcctgtccctgttgttgacgtgaggggatgtggcacactgggtgagcgtgtggtgactgggattggtgaagtagtggctattagcgtttccaccattgctgtgaggaagggttcctgaaatggtataatctgcattgacgaccctcatagcaggggtgtaggtaactgctggcatgcttgattcctttcccttctgcttgtgtctataaataatgta

SEQ ID NO: 350475 - DNA, 616 bp, Homo Sapiens
  misc_feature (441)..(449): n is a, c, g, or t
cagcacctatgtggagactagactggatgacttaacagccctttcccaactttgagatcctgtcattgtaatgactgagagcgcctttggatgacttccatgaagcaactgctctgggcaacagcctccctcaataggcaaggcccccagagtaagctccttcttccatcctctccctcccaacaggcagttgccctgcaggatattaacaaaaagcttcccacaaaataaaaagcctaaacaccaaaattagatgcaacactgcagctgcaaacaattgttactatctgttctctgaaaggctagcagtgactatttagctatgacaggaacatctaaaaacttggcagctgtaacatgtaagtaaaattcctcttcattttacaacaccggtcttgaatcctttggtttttaatctttcatgagattcagctgtgatcnnnnnnnnnatatgctgttgccaacctaagagtttgttccttgaagcaagaagtttgtccattggtttttaaaacatcttaaaacaacatgaatggcaggatactgatgttgccatgtgagaaccttcagggcatatcaaagaaccataccaggctggaactgaggcaggaaccat

SEQ ID NO: 350476 - DNA, 925 bp, Homo Sapiens
gctggtacggtccggaatgtctcgggatatcgtcgaccacgcgtcggaggcggcctcttgtgcgatccagggcgcacaaggctgggagagcgccccggggcccctgctatccgcgccggaggttggaagagggtgggttgccgccgcccgagggcgagagcgccacaggagcgggagaaaaggagcgctcgcccgctccgccgtgcctactcgctgcctccccggcgttggctctcatggactcctacgcttgctggctgctcctcaccacccgcgcccgcctcctcactcgccttttcgttcgccggggctgctttccaagccctgcggtgcgcccgggcagagtgccggggctgaggggcccggggccagacaccgagcagcggtgcgctgtggggtcctgggcagagcagcggacggacggggaggggccatgtactggcgcgggctgcagcggggcccgtcatgcaagccaagtgacctgagcggcagcggacggacgaactgaacccacagtactgacacctggggacggagcgggacccggagacacggagcccggagtagcgacgtagagccggaagcgatgacacgtgcgctcagctggagatgcggagacacgaacaagactatcgagggcgctctggggcaaccccctgaaccttgatggggctccacgaccatggccgaaattacagacatggacaaaagaggtgaactcagagcatatcatccaacgggaaggacatcagacagacacaggaagccgggggggaaagatgcaggggcggagatacccgtactacaaataagggggcatggaacacaacggcacgaggccggaagccgacaggggaaggcacaaaacgggaacaccaaggtaaaggctggacgatggaaaaagaccatggaggagggaggaagg

SEQ ID NO: 350477 - DNA, 751 bp, Homo Sapiens
  misc_feature (139)..(200): n is a, c, g, or t
tggcaggtgttgggggcgctggcagctgcaaacgcgcgggctggcgctgcttacggctgtgtgcagcaccggggtgccccgggggacgtgcagccagcaggtggcgcaggcggtgacgcagctgcgcaggtgcgagtgnnnnnnnnnnnnnnnnnnnnnnnnnnnnnnnnnnnnnnnnnnnnnnnnnnnnnnnnnnnnnnataatctgcgtgcattcgtcgataactgtctgtatgcgaagcactgacgcggccgtgagcacctgcagggcttcaccctgcgccacaacgagcgaaccgctgtacaggaactctaccagctgtcgcactgtctgcgcgggcaccaccggaggcacacggatctcagagtggccgagcagcagcttgtcttggaagaagggtgagccggccgccagcacgcagcggtgggcacgcagcgaagcttcacgaatgcgcacagtcacgtcacagaagtgtcccccaagcctctgcccattgagggtctcaagcagagagcgtgagaagttctgcaggtgtatgtgatgcacagcctctgcagccgccatctccgactcctcttcaggcaccaggctctgccgtggccgcttcctcctgaccgactacaaggccgcacttccgggccgttaccccggcggaacggaggcctgcggtcgatcccggaaattccggaccggtaccagcctggttttatctcttcatcgcatgccctgtttatccacatcaacccccga

SEQ ID NO: 350478 - DNA, 1773 bp, Homo Sapiens
  misc_feature (415)..(415): n is a, c, g, or t
  misc_feature (443)..(443): n is a, c, g, or t
  misc_feature (449)..(449): n is a, c, g, or t
  misc_feature (451)..(451): n is a, c, g, or t
  misc_feature (455)..(455): n is a, c, g, or t
  misc_feature (467)..(467): n is a, c, g, or t
  misc_feature (475)..(475): n is a, c, g, or t
ggatggaagcggccacggcagagcctggtgcctgaagaggagtcggagatggcggctgcagaggctgtgcatcacatacacctgcagaacttctcacgctctctgcttgagaccctcaatgggcagaggcttgggggacacttctgtgacgtgactgtgcgcattcgtgaagcttcgctgcgtgcccaccgctgcgtgctggcggccggctcacccttcttccaagacaagctgctgctcggccactctgagatccgtgtgcctccggtggtgcccgcgcagacagtgcgacagctggtagagttcctgtacagcggttcgctcgttgtggcgcagggtgaagccctgcaggtgctcacggccgcgtcagtgcttcgcatacagacagttatcgacgaatgcacgcagattatcncccgcgctcgaccccgggcacctctgcncccacntncctncccacccctatncccccgcnactcgcacctgcgcagctgcgtcaccgcctgcgccacctgctggctgcacgtcccccggggcaccccggtgctgcacacagccgtaagcagcgccagcccgcgcgtttgcagctgccagcgcccccatacacctgccaaggctgaggggcctgatgctgacccctcactgtccgcggcccctgatgaccgaggtgacgaggatgacgaggaaagtgacgatgagaccgatggcgaggatggcgaaggtggcggcccaggcgagggccaggcacctccttccttcccagactgtgctgctggcttcctcactgctgctgctgacagcgcgtgcgaggagccccctgcacccactggcctcgctgactacagtggtgccgggagagattttcttcggggagctgggtcagctgaggacgtatttccagacagctatgtatccacttggcacgacgaggatggcgctgtccccgaaggctgtcccactgagacccctgtccagcccgactgcatactgtctggatcccgcccgcctggtgtgaagaccccagggccgcccgttgcactcttcccctttcacttgggtgcccctgggccacccgcaccaccccccttcagcaccatcgggggccagcaccctgccgcccccacccgccttctaccccacactccagccacgatggcgagcacccgcagttagctcagtcatgtgagggagtgtcccagtgcgtcgcactcatgtcttgcttcccatcacacggtgcgcccatcaggtcaccctctgctcgcatcgccaggattctgatgccacctacggtatgatgtgcagccactgtcgcaagacgttcagctcccggaaaaactacaccaagcacatgttcatccactcgggggcagaagccgcaccagtgcgccgtgtgctggcgatccttctctctacgcgactacctgctcaagacacatggtcacgcacaccggcgttgcgcgccttccagtgcgccgtctgcgccaagcgcttcacgcgagaagagctcgctcaacgtgcacatgcgcactcaccggcccgagcgcgcggccctgcgcccgcctgcggccaaggtcttctcgcaccgggcgctgctggagcgccactggccggtgcaccctgtgccctgatggcgctggggcctggctcgcccacggtggatccggggcctcccgcacatgtcggccacgcgcgctgcgggacccgtggttccccgacactagacccgctccctcctgagctgcaggtcctctctctcccttcgccctttctcca

SEQ ID NO: 350479 - DNA, 2750 bp, Homo Sapiens
  misc_feature (126)..(126): n is a, c, g, or t
  misc_feature (669)..(669): n is a, c, g, or t
  misc_feature (744)..(744): n is a, c, g, or t
  misc_feature (771)..(771): n is a, c, g, or t
  misc_feature (900)..(900): n is a, c, g, or t
  misc_feature (903)..(904): n is a, c, g, or t
  misc_feature (907)..(907): n is a, c, g, or t
  misc_feature (909)..(909): n is a, c, g, or t
  misc_feature (913)..(913): n is a, c, g, or t
  misc_feature (2171)..(2184): n is a, c, g, or t
  misc_feature (2206)..(2217): n is a, c, g, or t
  misc_feature (2501)..(2514): n is a, c, g, or t
gtccgggagcgcggcggagacgatgcctgagatcagagtcacgcccttgggcggccggccaggacgtgggccgaagctgcatcctggtctccattgcgggcaagaatgtcatgctggactgtggantgcacatgggcttcaatgacgaccgacgcttccctgacttctcctacatcacccagaacggccgcctaacagacttcctggactgtgtgatcattagccacttccacctggaccactgcggggcactcccctacttcagcgagatggtgggctacgacggccccatctacatgactcaccccacccaggccatctgccccatcttgctggaggactaccgcaagatcgccgtagacaagaagggcgaggccaacttcttcacctcccagatgatcaaagactgcatgaagaaggtggtggctgtccacctccaccagacggtccaggtcaggttcccagggccacagctggcacagtcactgcccacccccacaccaaccatgccctccgcccgttctacacagtttctggaaggctggggcctcagggtgagcccaccccacctcactcttgcgtccagcaccgtggggacaccaggaggcgtcagcgcgaggatgcgggtcccagaccagactgggcgccgacccgggagagcacgtgcanggtggggagctgcctggattgacaagtgccgccccaacctgctcatcacagagtccacgtacgccacgaccatcngtgactccaagcgctgccgggagcganacttcctgaagaaagtccacgagaccgtggagcgtggtgggaaggtgctgatacctgtgttcgcgctgggccgcgccaggagctctgcatcctcctggagactttctgggagcgcatgaacctgaaggngcnnatntncttntccacggggctgaccgagaaggccaaccactactacaagctgttcatcccctggaccaagccagaagatccgcaagactttcgtgcagaggaacatgtttgagttcaagcacatcaaggccttcgaccgggcttttgctgacaacccaggaccgatggttgtgtttgccacgccaggaatgctgcacgctgggcagtccctgcagatcttccggaaatgggccggaaacgaaaagaacatggtcatcatgcccggctactgcgtgcagggcaccgtcggccacaagatcctcagcgggcagcggaagctcgagatggaggggcggcaggtgctggaggtcaagatgcaggtggagtacatgtcattcagcgcacacgcggacgccaagggcatcatgcagctggtgggccaggcagagccggagagcgtgctgctggtgcatggcgaggccaagaagatggagttcctgaagcagaagatcgagcaggagctccgggtcaactgctacatgccggccaatggcgagacggtgacgctgcccacaagccccagcatccccgtaggcatctcgctggggctgctgaagcgggagatggcgcaggggctgctccctgaggccaagaagcctcggctcctgcacggcaccctgatcatgaaggacagcaacttccggctggtgtcctcagagcaagccctcaaagagctgggtctggctgagcaccagctgcgcttcacctgccgcgtgcacctgcatgacacacgcaaggagcaggagacggcattgcgcgtctacagccacctcaagagcgtcctgaaggaccactgtgtgcagcacctcccagacggctctgtgactgtggagtccgtcctcctccaggccgccgccccttctgaggacccaggcaccaaggtgctgctggtctcctggacctaccaggacgaggagctggggagcttcctcacatctctgctgaagaaagggcctcccccaggcccccagctgaggccggcaactcacccagccgccacctctgccctctcccagctggacagaccctgggcctgcacttcaggactgtgggtgccctgggtgaacagaccctgcaggtcccatccctggggacagaggccttgtgtcacctgcctgcccaggcagctgtttgcagctgaagaaacaaactggtctccaggctgtcttgcctttattcctggttagggcaggtggtcctagacagcagtttccagtaaaagctgaacnnnnnnnnnnnnnngatatagggcagagataaaaannnnnnnnnnnncagaaataacattcctggcgggaggcgccactatgatagactcagcacagcccgtttttttgtgtaaaagggcggccccaccatagaagggtgggcttattataaaaagaagagagacgcgcgggtgaatacagaacacgacctcggtcgacggagaggaaaaacgtttatgtgtgtgtcatctttgagagagagagcaccccacctgctgtgtggggggggcgacacaatggtggcgagaccacaccatcagcatgaagaaattataagagctgagcgggtgnnnnnnnnnnnnnncatcggagatgtttgatgattgaggtgtaaaccaaacacaatgtgatataatgtggtgggatcgaggaagaaattggtgacaaaggcatgtacttaattatgatagaaaatatattccgcggcgcggcttcgtaataataaaacggctgataggagagtgacagaggaatcgagataatgcaaagaagtaatagagatgaaaagaggagtagcagcaataagcattgaattgtgaa

SEQ ID NO: 350480 - DNA, 1060 bp, Homo Sapiens; identical to SEQ ID NO: 261649

SEQ ID NO: 350481 - DNA, 1572 bp, Homo Sapiens
tgcgtgtgtcatgcaggtgcacgcggcaggtgaagcgcagctggtgctcagccagacccagcctctttgagggcttgctctgaggacaccagccggaagttcctgcgccatctcccgcttcagcagccccagcgagatgcctacggggatgctggggcttgtgggcagcgtcaccgtctcgccattggccggcatgtagcagttgacccggagctcctgctcgatcttctgcttcaggaactccatcttcttggcctcgccatgcaccagcagcacgctctccggctctgcctggcccaccagctgcatgatgcccttggcgtccgcgtgtgcgctgaatgacatgtactccacctgcatcttgacctccagcacctgccgcccctccatctcgagcttccgctgcccgctgaggatcttgtggccgacggtgccctgcacgcagtagccgggcatgatgaccatgttcttttcgtttccggcccatttccggaagatctgcagggactgcccagcgtgcagcattcctggcgtggcaaacacaaccatcggtcctgggttgtcagcaaaagcccggtcgaaggccttgatgtgcttgaactcaaacatgttcctctgcacgaaagtcttgcggatcttctggttggtccaggggatgaacagcttgtagtagtggttggccttctcggtcagccccgtggagaagtagatgggcaccttcaggttcatgcgctcccagaaggtctccaggaggatgcagagctcctgggcgcggcccagcgcgaacacaggtatcagcaccttcccaccacgctccacggtctcgtggactttcttcaggaagtctcgctcccggcagcgcttggagtcacggatggtcgtggcgtacgtggactctgtgatgagcaggttggggcggcacttgtcaatccaggcagctcctaagtgtcggtctggggtcatgttataatcacccgtgtagaccacagactctgagcccactttaatctggaacatggctgcccccagcacgtggcctgcatagtaggccttgatctccagctcatcatctacctggaccgtctggtggaggtggacagccaccaccttcttcatgcagtctttgatcatctgggaggtgaagaagttggcctcgcccttcttgtctacggcgatcttgcggtagtcctccagcaagatggggcagatggcctgggtggggtgagtcatgtagatggggccgtcgtagcccaccatctcgctgaagtaggggagtgccccgcagtggtccaggtggaagtggctaatgatcacacagtccaggaagtctgttaggcggccgttctgggtgatgtaggagaagtcagggaagcgtcggtcgtcattgaagcccatgtgcattccacagtccagcatgacattcttgcccgcaatggagaccaggatgcagcttcggcccacgtcctggccggcccccaagggcgtgactctgatctcaggcatcgtctccgccgcgctcccggacccgcgaggcccgcctgcggtgatgcactgcgcaggcgcaaccgcgct

SEQ ID NO: 350482 - DNA, 817 bp, Homo Sapiens
gggggggaaaaaaccttcggcaaggtagcgaggcctgggtggcgaattcggcacgagggggcttcaatgacgaccgacgcttccctgacttctcctacatcacccagaacggccgcctaacagacttcctggactgtgtgatcattagccacttccacctggaccactgcggggcactcccctacttcagcgagatggtgggctacgacggccccatctacatgactcaccccacccaggccatctgccccatcttgctggaggactaccgcaagatcgccgtagacaagaagggcgaggccaacttcttcacctcccagatgatcaaagactgcatgaagaaggtggtggctgtccacctccaccagacggtccaggtagatgatgagctggagatcaaggcctactatgcaggccacgtgctgggggcagccatgttccagattaaagtgggctcagagtctgtggtctacacgggtgattataacatgaccccagaccgacacttaggagctgcctggattgacaagtgccgccccaacctgctcatcacagagtccacgtacgccacgaccatccgtgactccaagcgctgccgggagcgagacttcctgaagaaagtccacgagaccgtggagcgtggtgggaaggtgctgatacctgtgttcgcgctgggacgagcccaggagctctgcattctcctggagaccttctgggagcgcatgaacctgaaggtgcccatctacttctccacggggcttgacgagaagggcaaccaactactacaagctgttcatccctggaccaccagaagatc

SEQ ID NO: 350483 - DNA, 2129 bp, Homo Sapiens
  misc_feature (673)..(673): n is a, c, g, or t
  misc_feature (1213)..(1213): n is a, c, g, or t
ccagaggcactgaggagggcagcaggggctggtagagactgagggagactgcacaggccaggtcacacagctgttcagaggacaccacagaagccaggaactgcagcacactgttaaacagctcaatgatggcgccaggctcctcagaagcaagaccgcccagacgcctctctcttctgtcatggaaaaagcggccactaaactcatggccaatcccctcttcgacgtactgaatgagagtctggcagcagaggtcaagggaatgggggcagtgggaaaccagccactgcactgcttgcaaaaccttagttgaaccttgtagatcattaatggtatcagggatctcggtaacagtgtaatctgaaatcagcttagctgaaaccaagtcctgtagcatcagaccatcttctacttccttctcaacggcgtcccctcctgggctaggcacaagaaccaccagaggaaagcgcaggctggaagggctagcctgcaggagctgcttgagctgcagcaaggccgacagccagtacacgtcctcctctgccatgtcctcactcttcattttggggggaagcagcagcatgagcccactggctcccaggaggtccttctgtgtctccacagcatcaaatggcaccatcactgaagggcgccatgggccacctttatacancacgttaacagaaatcatctgatcccccttgctgctaagtgagttgaaaagcgaaagcgtctgaatcccaccagcatcgctggatgtgtcatccactgagccttcatctcccatgaacttgacttttaaccaatttgctagaattctgccacaactctctggggactgctcctctacatccggcaacaccagcaccagcttccaaaacacatgctcctgcctcccagggaggtgctcagccacgagggatggcaggtccagagacgcccatgccacatcactcagcagctgctggtagaagtgctgaaccttcatctggtgagctgtcttgtttctgagccgccttaacctggtgcaggagatgcccaatctccctgcatggcccaggtccaggaggcccctggccaggttctcttcagcaatggggcactctgcgctgggcgccagcgccctcagccggtcgctcacgtccacgcagcagggcgcagcagggaaagcccgcatttggcgcctcagtttcttgcgggctgtgacagcttnccctccaccgctgtagatacttgcagaagcactgaagctcctggagggtctcctttgcagtctggaagatttcctccacgagaaacaagtccactaagtgggcacagacatcctcacagcaacgggccacacggaccctctggtctgtctctactgcattcttcaactcctgggagcaggtttccctcacaaactccatcatcacgcgttccatcagctccacggccaggccctggctcagctcacttaacaccagctctctctcttgtttcaacctttcctcttcagcccgctgcctctcctgctcccttcgctctctttccttagacacttcttcagctgcaatgtgcctcaaaatgcccgtggttgcagctgttaacaaatcctccatagcagcattagaaacacccagggcggcagcttgcgtaggcagcacccgcagagccaacttcctcacagtccctctgcagggcctcctggatgagctcgtccaccacctgcgccaggtcctcgtcagagtacatgggcacgggctctggaggcggtggttcaggctgcacagacagctggaagaggctgggcgccacagacggggtcagtgccaggacaggaggcagaggcactggtgagggcgcaggggctggtagagactgtgggagactggacaggggtgcatccggctctacaccacactcctctcctctccctccgcccactgtgtcggagccgggtctctgggtgctgacgggcagctccgcggccaggctctccccgatgtacttgttctgggagttgaagctgcacacaggggtatgacgagggacggggggcaatggccctccgttcacaatttccccgactgacaccgtcagcttcctagtaataaacaccgacttcctggtcttggataatccct

SEQ ID NO: 350484 - DNA, 771 bp, Homo Sapiens
  misc_feature (201)..(470): n is a, c, g, or t
  misc_feature (483)..(491): n is a, c, g, or t
gagacggagggtggtgagggacgaagagacggagggtggtgagggaaggaggaagggctggctggctttcatgggtgcttattttaaggagtccaacaaagttggaacttaggttaaaaatgatcttatagacttgacttaaaatatgagaagacagttcacaaatgaggaacgcaatggtggctttaagatgtcattctnnnnnnnnnnnnnnnnnnnnnnnnnnnnnnnnnnnnnnnnnnnnnnnnnnnnnnnnnnnnnnnnnnnnnnnnnnnnnnnnnnnnnnnnnnnnnnnnnnnnnnnnnnnnnnnnnnnnnnnnnnnnnnnnnnnnnnnnnnnnnnnnnnnnnnnnnnnnnnnnnnnnnnnnnnnnnnnnnnnnnnnnnnnnnnnnnnnnnnnnnnnnnnnnnnnnnnnnnnnnnnnnnnnnnnnnnnnnnnnnnnnnnnnnnnnnnnnnnnnnnnnnnnnnnnaaactctgtctcnnnnnnnnntgtcattctctccccaaaagacttgataaccaagtctttcagtaaagctcctgaaagattttaaaacaaatttctgtgtgtttcccactgacttcttaacctcaattaatatattcttttgggaaaaatcaattccagaaaaaactcttcactagcttaaaatgtcccttggcttacaaccaatcattactgttgactctcaagaactgaagacattcccgaccctgtaaacaaatgaacttcagttcttgagagtctccgtcgaactgggtaccgagct

SEQ ID NO: 350485 - DNA, 742 bp, Homo Sapiens
aaaaaaatttattgacacctacataggaaaagtgaacttttaaattaataattccaaaattcaaatcacgaattgtttcaaaaattttacatgatagaattcatatttagtaagcgatacgggtatattttaatgcatttgattttaaaaacggggtagggcctactaagaacaggccaagccctggccccagtgggtttggatataatcctgagggcagctgggaaccactgagagaagcaggagaatgttctctgtggctacagtgaggagaatggattggagggaggccagactggaggcccagtggctagagaccagataggcagttacagtcttccagactgcgagacaatctctctttagtgccaagattagcataaaatcatagcattatataacccaattattctttgattcctgcatccccaatctgactcagcattctaaatttacttaagatctggggacaagggtttttggcaaatccttgaaggcaaatgatgttacagtcaatcagtatatgccttgagccagacagacatgggtacgggcctcagttctgctgcttgctagctatgtgactttgcacaagtgatttaacttctctgggccttggattccttactggtaacacgagcataatcgattcctcacagaattaagtgagaaaactatgtatgtaggacttcttatggagtgggtacttagaaataaatggtagccgttatcatttaaaaaa

SEQ ID NO: 350486 - DNA, 546 bp, Homo Sapiens
gtgcgccggaggcagcggcggcgtggcgcagcggcgacatggccgttgtctcagaggacgactttcagcacagttcaaactccacctacagaaccacaagcagcagtctccgagctgaccaggaggcactgcttgagaagctgctggaccgcccgccccctggcctgcagaggcccgaggaccgcttctgtggcacatacatcatcttcttcagcctgggcattggcagtctactgccatggaacttctttatcactgccaaggagtactggatgttcaaactccgcaactcctccagcccagccaccggggaggaccctgagggctcagacatcctggaggagccatgggcgggacggtcagcgccgtggcctcattggtggacttggctgcatccagtgatgtgaggaacagcgccctggccttcttcctgacggccaccatcttcctcgtgctctgcatgggaccctacctgctgctgtccaggctggagtatgccaggtactacatgaggcctgttcttgcggcccatgtgttttctggtga

SEQ ID NO: 350487 - DNA, 1098 bp, Homo Sapiens
  misc_feature (109)..(109): n is a, c, g, or t
gacctggcccgcggggggccctggtgattggagcgctgtttgtggggcggcaattggtggggcaagtggcctctggggaagacccaggccccgtagtgtcccaaaaaanaacctccccctgagaaggggtgggcccgtgaaagcggaagtcatcccccgttttcggggcaatgttcccccccggaggggcggcagagatgccgtgggatttcccttgacgactgaagtaagttttcagggcccggagcagggaatggcactttcgtccagaatgtttggcgctgtcagacatggagcccttctttttcttgcagtcctcctcgctggaccgtgcagcgatgatcaccgtgcacgccatgagcagctccagcaggagcagcaggatgagggttgaagttgatgtttattgctgatgggttcagggactagtttgcatccaaaccaaattaaacacgtagtggtcacagcaaacgtggaaacaaacaatatctgaaagttgggaatcacattggcgttcctcctggagacggtgaagctcacaattgccgaggggatgcaagagcctgcagcacagcgcaagtaatccatctcagccgggaacacgttccccaggtacagcgaaaaccccgaggtcaccaggaggcagctccccatcagcacagagaagacccacgtcttgtggctgaagcaggggggcagtctcttcgacagctgcaggtcgctcggcttcgcgtctggggcatagctggcggggtcttgccggccccgctccagcgtgggcatccggtcataggccagctcctctctgaatggctcctgggtcatggcacttggggacaccacagctgtgctgaatgtacagccacgtgtcaccagttctttatctgaatagtctgggttcagggtgagattctacactttaaatgcctcattgatccatctgggccctccaggtgcaacacctgacaacatccatcggcaacttcgtccatgaacacatcacgccggggactcaagcacgttaaactgctccaattggtagctaaacgagagattgcaaaacatgcctctactcaacggcttaatgtctgagcactt

SEQ ID NO: 350488 - DNA, 3023 bp, Homo Sapiens
  misc_feature (1433)..(1433): n is a, c, g, or t
  misc_feature (1472)..(1507): n is a, c, g, or t
  misc_feature (3006)..(3006): n is a, c, g, or t
cgcaaaccacagggccgaatccggagccgcccaaggccacacagctaagccgagtgcgtgaatgcttatgtgaccgtgtgaaggaggttcccaccgtgtggctgtgggggatggaaaaaggctacttggaaagatgtagaagaccttcgagtaaacagttacgtttcagaaacagagcctgctcagaatgtgtacttggtgggattctattcttagggacgcttctttcttctgagagacccgagctctgtggcgagtggcacaggcagggccccttcctttcctagttgggttctgacagctccgaggcagtggtttacacaaccaacacgaaacatttctacgatccacccgattcctcccctcattgatattcaggaagcagctctccttcccctgccttcagctcaagtttgctgagcttttgtttcatttgtgaatacttcttgctggaagtccctcacccagagaccagtgctcccaacggcagagcagcgggggagataaagaactggtgacacgtggctgtacattcagcacagctgtggtgtccccaagtgccatgacccaggagccattcagagaggagctggcctatgaccggatgcccacgctggagcggggccggcaagaccccgccagctatgccccagacgcgaagccgagcgacctgcagctgtcgaagagactgcccccctgcttcagccacaagacgtgggtcttctctgtgctgatggggagctgcctcctggtgacctcggggttttcgctgtacctggggaacgtgttcccggctgagatggattacttgcgctgtgctgcaggctcttgcatcccctcggcaattgtgagcttcaccgtctccaggaggaacgccaatgtgattcccaactttcagatattgtttgtttccacgtttgctgtgaccactacgtgtttaatttggtttggatgcaaactagtcctgaacccatcagcaataaacatcaacttcaacctcatcctgctgctcctgctggagctgctcatggcggccacggtgatcatcgctgcacggtccagcgaggaggactgcaagaaaaagaagggctccatgtctgacagcgccaacattctggacgaagtgccatttcctgctcgggtcctgaaatcttactcagtcgtcgaggtaatcgcaggcatctctgccgtcctcggggggatcattgccctgaacgtggatgactcagtttcaggcccacacctctcagtgacgttcttttggatcctagtggcctgctttccaagtgccattgccagtcatgtggcagcagagtgtcccagcaagtgtctggtggaggtcctgattgccataagcagcctcacgtctccgctgctgttcacagcctctggatatctgtcattcagcatcatgagaatcgtggagatgtttnaaggattacccgccagccattaaaaccatcctacgatgnnnnnnnnnnnnnnnnnnnnnnnnnnnnnnnnnnnnaggccggcctcaacacgggcaccgccatccagtgcgtgcgcttcaaggtcagtgcaaggctgcagggtgcatcctgggacacccagaacggcccgcaggagcgcctggctggggaggtggccaggagccccctgaaggagttcgacaaggagaaagcctggagagccgtcgtggtgcaaatggcccagtgacccccagacgcggaaaccgggtggcagcgcccagcctggccccaagcatggaaacgcacaacccctaatcgccctgagctactgcttctaacacctcttttcccttgtgtgagggcaaaccaggctgcaggtggggttttcacttcctagggtagtttaattttaaaataggccaatgttggctagtctgtgcctcagtgagatcagtcagctccgagtggctcccgtgtcgtaacagcaggagcatggccgcaacttcccaggccgaggaagggcccccggctcggcctcttgagagccccacccctgaactggccccagctcctcttcctgcctctctcatggcttgggctggagtgggctctctggacctgaccagactgtgggtccctgcgtctcctgcccactctgaccgggcttcctccctccacgcttagggtctgtcccgggtactcagtcagcccagtgggatcttacccacttccctgcaaggtgcacctgccccaggctcaggctgcccagcggctcttcctggacagtgagagcagggctgggcgcctctgtcctggcccgggagccgcaggggcccctcctccagagcctgggcgcaagcgacacaggctgccgctgctctcccaggtgaaatccacaccagtccacgccgggtcgcctgccctgtctccctacttagacccagtcattctagagggatccaccgccacactggccggcccacgtcctgggtgctgtcatgcccagcttggagtgccacatggccgctgcccacgtcccgggcactgtcatgcccagcttggagtgccacgtggccgctgctgtgacaggcagtgttcttgggggtggggctgcatccaaggctttgtaaaccggctggaccacgtctccctggccccagtgacccggggaagctgagcccctccctcctgtgtttgctcccattactcaaaatgcaggacagatcaggtcagagcccaggaattctcacaggttcacccagcgccctctacctcctagcaagtactttgtcttgatcctcactgagaaggccccagggcagcggtcttctccatctctgctgttttggggtcttagggtacagcccaggcggtcactgcccacctgccaggctgcagggacagttgggtgtgagaataacactggctttgggtagtgccatggccaggagtgggtttccctgcgtcgtcctcgtcccgagggcgcctgggtcctcccagctgacggcagtaaatccacagtgagttgggacgactgtgaaactggaatgctgtnactttgataaattactt

SEQ ID NO: 350489 - DNA, 1979 bp, Homo Sapiens
aaaaaagcacgaatggctccaggtggaacagagaagctgtcaaaactaacagacaaaaaaaggcacacgggtcgacctcttaaaaacccaaactgaacggcccaagcccccttcctgccttttcatggctgggctggagtggctctctggcccgaccagactgtgggtccttgcgtctcctgcccactctgaccgggcttcctccctccacgcttagggtctgtcccgggtactcagtcagcccagtgggatcttacccacttccctgcaaggtgcacctgccccaggctcaggctgcccaacggctcttcctgaacagtgagaccaggcctgggcgcctctgtcctggtcccggaacccgcaggggcccctcctccaaagcctgggcgcaagcgacacaggctgccgctgctctcccaggtgaaatccacaccagtccacgccgggtcgcctgccctgtctccctacttagacccagtcattctagagggatccaccgccacactggccggcccacgtcctgggtgctgtcatgcccagcttggagtgccacgtggccgctgcccacgtcccgggcactgtcatgcccagcttggagtgccacatggccgctgcccacgtcccgggcactgtcatgcccagcttggagtgccacgtggccgctgctgtgacaggcagtgttcttgggggtggggctgcatccaaggctttgtaaaccggctggaccacgtctccctggccccagtgaccgggggaagctgagcccctccctcctgtgtttgctcccattactcaaaatgcaggacagatcaggtcagagcccaggaattctcacaggttcacccagcgccctctacctcctagcaagtactttgtcttgatcctcactgagaaggccccagggcagcggtcttctccatctccgctgttttggggtcttagggtacagcccaggcggtcactgcccacctgccaggctgcagggacagttgggtgtgagaataacactggctttgggtagtgccatggccaggagtgggtttccctgcgtctcctcgtcccgagggcgcctgggtcctcccagctgaccggcagtaaatccacagtgagttggggcgactgtgaaactggaatgctgttactttgataattactttccagcaggtgtttccttcacaatgggtttgtttctttccttctgatctgagaagacatgaacgttttctcttcaccgccgtggggtgtattgactggtcccccatgggctgctggaaaggcccggagatgcatctgtggcctggggccatcaagatcaaagaaccaggaggcctgggagatgcagctggatggggcggcctgcagaccctgccagggggtttgaggaccctcccaggtttcccactgcggaacaggagtgactctggctgccaagataccttcatggtgttcatgacaagtggaatcattattttcaaccattgaagggggatgcaggcaagacaccttcccagctgctcctagaggggacaagccaggccctctctgcagtcctcggcagctccggaaggacacagtcaggggccgggcaaacactttggccacagccccaaacaagcgccaccgtgggagaggagaggctgctgtcactggtaccggatgcagaccccaccctgtctgcaggccacccccacctccctgcagctttgaggctggcggggtctgctcctgggaatggggtgggagccacagggacgacccggggcgggctgatgtcttcttgggggcagaccagagagctcaagtttcagagtcagaattaggcacttggagcgtttttgctggcttgcactttcttattttcttattttagagcgcttaaaaaatccggaaaaatggggtttaaaagaactgtctctttcagtctacatttttgtttaatacgcttgagcaataaacgctgacttgcagacgtggcaaaa

SEQ ID NO: 350490 - DNA, 513 bp, Homo Sapiens
  misc_feature (48)..(48): n is a, c, g, or t
  misc_feature (59)..(59): n is a, c, g, or t
  misc_feature (73)..(73): n is a, c, g, or t
  misc_feature (110)..(110): n is a, c, g, or t
  misc_feature (166)..(166): n is a, c, g, or t
  misc_feature (240)..(240): n is a, c, g, or t
  misc_feature (453)..(453): n is a, c, g, or t
  misc_feature (457)..(457): n is a, c, g, or t
caagcaaaaaaaccttccccactgctccctaaaagggaacaaccccancccctctctanaatccctcggcaanctccggaaaggacacagtccaggggcccggggcaaanactttggcccacaacccccaaacaaacgcccaccgtgggaaaaggaaaaggcctgncctgtaaactggtacccggaatgccaaacccccacccctgtcctgacaggcccaccccccaccctcccctgcanctttgaggctggcggggtctgctccctgggaatggggtgggagcccacagggacgaacccggggcgggctgatgtcttcttgggggcagaccagagagctcaagtttcagagtcagaattaggcacttggagcgtttttgctggcttgcactttcttattttcttattttagagcgcttaaaaaatccgggaaaaatggggtttaaaagaacntgtnctctttcagtctacatttttgtttaatacgcttgagcaataaacgctgacttgcag

SEQ ID NO: 350491 - DNA, 1251 bp, Homo Sapiens
  misc_feature (57)..(93): n is a, c, g, or t
cgccccttgaaaggatgactactatgggcgacctcgggggtgacgcggtggcggcgnnnnnnnnnnnnnnnnnnnnnnnnnnnnnnnnnnnnnatcaggccaaatcggccgagctcgaattcgtcgagagcgtggagcagctaatcctcacagacctgtaggagctggagtgggagctcaagcaggattcttcccgagtccctggcatcctcagaagcttcaactctggaggcaatgggtcgaaaggaagaagatgactgcagttcctggaagaaacagaccaccaacatccggaaaaccttcatttttatggaagtgctgggatcaggagctttctcagaagttttcctggtgaagcaaagactgactgggaagctctttgctctgaagtgcatcaagaagtcacctgccttccgggacagcagcctggagaatgagattgctgtgttgaaaaagatcaagcatgaaaacattgtgaccctggaggacatctatgagagcaccacccactactacctggtcatgcagcttgtttctggtggggagctctttgaccggatcctggagcggggtgtctacacagagaaggatgccagtctggtgatccagcaggtcttgtcggcagtgaaatacctacatgagaatggcatcgtccacagagacttaaagcccgaaaacctgctttaccttacccctgaagagaactctaagatcatgatcactgactttggtctgtccaagatggaacagaatggcatcatgtccactgcctgtgggaccccaggctacgtggctccagaagtgctggcccagaaaccctacagcaaggctgtggattgctggtccatcggcgtcatcacctacatattgctctgtggataccccccgttctatgaagaaacggagtctaagcttttcgagaagatcaaggaagggctaactatgagttgtgagtctccattctggggatgaacattcctgagtcagcccagggactttaatttgccaccttggcttgaaaaaggatcccaaccgaagggggaccccccgggggaacaaggcctttgagcactccccgggacatggacggaaaacactggccctccccccgggggccacctcaccccctctcatataagcctccccaaaatccagagaaaactttgtccataccacaccaagtgggcacgccaagcgctttaaccggccccacggactcgtggccggccccccacttctgggaacccccct

SEQ ID NO: 350492 - DNA, 3595 bp, Homo Sapiens
  misc_feature (3251)..(3251): n is a, c, g, or t
  misc_feature (3253)..(3276): n is a, c, g, or t
  misc_feature (3296)..(3296): n is a, c, g, or t
  misc_feature (3325)..(3325): n is a, c, g, or t
  misc_feature (3416)..(3434): n is a, c, g, or t
  misc_feature (3466)..(3477): n is a, c, g, or t
tccggaattctcgggatcgctgacccagcccgccaggcgctcctgaccgtcgcttcctccggtcccaggtccccggccctcgcctcagccccggcccctggtccccagccctcgtcgcagccccggccgcccgccgccgccatgtccaaggaggagcgccccggtcgggaggagatcctggagtgccaggtgatgtgggagcctgacagtaagaagaacacgcagatggaccgcttccgggcggctgtgggcgccgcctgcggcctggcgctggagagttatgatgacttgtaccattggtccgttgagtcatattcagacttctgggcagagttctggaaattcagtggaattgtcttctcacgtgtgtatgatgaggttgtggacacatcgaaaggaatcgcagatgtccccgagtggttcaaaggcagtcggctcaactatgcagaaaacctcctgcggcacaaagagaatgacagagttgccctttacattgcaagggaaggcaaagaggaaattgtgaaggtgacttttgaagagctgaggcaagaagtggctttgtttgcagcagcaatgaggaaaatgggtgtgaagaaaggagatcgggttgttggttatttacccaacagtgagcacgctgtcgaggcgatgctggctgcggcaagcattggtgccatctggagctccacgtccccggacttcggtgtgaatggtgtgctggaccggttttctcaaattcagccaaagctcatcttctctgtggaggctgttgtctataatggcaaagagcacaaccacatggaaaagctgcagcaggtggttaaaggcctaccagacttgaagaaagtggtggtgattccttatgtgtcctccagagagaacatagacctttcaaagattccaaacagtgtgtttctggatgactttcttgccaccggcaccagtgagcaggccccccagctggagttcgagcagctgccccttcagccaaccactggttcatcatggttctccatcgggcaccacgggcgcacccaagtgcatggtgcattccgctgggggcaccctcatccagcatctgaaggagcacctgctgcacggcaacatgaccagcagtgacatcctcctgtgctacaccacggtcggctggatgatgtggaactggatggtgtcccttctggccacaggagcggccatggtcttgtacgatggctcccccctggtgcccacgcccaatgtgctctgggacctggttgacaggataggcatcactgtcctggtaactggggccaagtggctgtcagtgctggaagagaaggccatgaagccggtggaaacccacagtctccagatgctccacacgatcctgtccactggctccccactgaaagcccagagctacgagtatgtctacaggtgcatcaagagcagcatcctcctgggctccatctcaggaggcaccgacatcatctcctgcttcatgggccacaatttttctcttcctgtgtataaaggggagattcaggcccggaacctgggcatggccgtggaagcgtggaacgaggaaggaaaggcggtctggggagagagcggcgagctggtgtgtactaagccgatcccttgccagcccacacacttctggaacgatgagaacggcaacaagtacaggaaggcgtatttctccaaattcccaggtatctgggctcatggcgactactgcagaatcaaccccaagaccgggggcatcgtcatgcttggccggagtgacggcaccctcaaccccaacggggtgcggttcggcagctcggaaatctataacattgtggaatccttcgaggaggtggaggacagcctgtgtgtcccccagtataacaagtacagggaggagagggtgatcctcttcctgaagatggcctccgggcacgccttccagcctgacttggttaagaggatccgtgacgccatccgcatgggcttgtctgcgcgacacgtgcccagcctcatcctggaaaccaagggcatcccgtatacgctcaacggcaagaaagtggaagttgccgtcaaacagatcatcgctggaaaagccgtggagcaaggaggtgctttctcgaaccccgagaccctggatctgtaccgggacatccctgagctgcagggcttctgagtcagactggctggcgtgtcactcagccgcacccgtgtgcactgtaacttttgtgtgctcaagaaattatacagaaacctacagctgttgtaaaaggatgctcgcaccaagtgttctgtaggcttggggagggatcgtttctctgttttgttaaatctggtgggtacctggatcttccacacgagtgggattctggccttcagagaccaggagggagtgtctgggccgcaggtgtggcactgtggtgagagtgtgtgtctttgcacacacagtgcagcgggaacggtggggctggctggtgctgaagacagacacactcctgagccaaggtcttgtcttcaacctccccgtcccgttgtcccattttgctctgtgaaggtgcaaatccctttcttcccttcccatctcaggctctcctgttttccctcagggtccagtatgcctttgagctttagctgttagaaaggaacccccgtgacttgacacagctttcacagctggctgctaggaccggcgggctgggtgttcacgtgtgtctgtgtcatggatgcaatgcaggccctggaggactgtgcgtcacccgtcaaccagagcgtgcctccgggccagcttccctccaaggaatgagtggatttcatacaggatctctttattgcacagactgaatggctttacatgtttctaatgtgaattaggcatgtgaagcagtgggtgtccacccgtgtccctcatgggtgagccctccagctgtgagcccaggcagtgtggtcaccgagtgaggaccctcctcaccaggaaccgcatccctgtgctgcctccacctgagagttgctagggggttcttgtcgagatcatgtcatcagcacccctaagtcaagtcacgggtttccatagccaggcagttggtatgtacaattcagttcagcgtatgaacttgtatctctaatctgatgtccatttttatattttttgaaactgagcacaatgaaatcctttcttgaatcattttccttttggattataaaaatatgggggaaagtgctatgatgaattttatgcaataaatgtatacatgtgtgcacatgcnannnnnnnnnnnnnnnnnnnnnnnncaagggacaacaacacgcanacgaaggccgcgaccgacacagaaaaaanagagaacaaccaccccaaaaaaacaagagaggcacgccagggcaccgaacaaaggacgaacaagaaagagaggaaagaaaattgtcgcggnnnnnnnnnnnnnnnnnnnaagaaattcttttcgtaacaacattatttttnnnnnnnnnnnncgggccccgtgtacgagaaaaaagaaaagaactcggacacctatgcgttggtctccccaccaaagaaacaccctcggcggtaagaaataaagagagggcttcgtaaccctcaccgccc

SEQ ID NO: 350493 - DNA, 624 bp, Homo Sapiens; identical to SEQ ID NO: 264783

SEQ ID NO: 350494 - DNA, 498 bp, Homo Sapiens
  misc_feature (178)..(178): n is a, c, g, or t
  misc_feature (318)..(318): n is a, c, g, or t
tggaattcaaaagggaaccctttaatgcaacaaaactgaaaggctttaaaaggtttcctaaatgtgaaattaggcatgtgaaaacaagtgggtgtcccaccccgtgtcccctccatgggtgaaacccctcccagctgtgaaaccccaggcagtgtggtcacccgagtgaggacccctncctcacccaggaacccgcaacccctgtgctgccctcccacctgagagttgcctagggggttccttgtcgagatcatgtcatcagcacccctaagtcaagtccacgggtttcccatagcccaggcagttggtatgtacaantcagttcagcgtatgaacttgtatctctaatctgatgtccatttttatattttttgaaactgagcacaatgaaatcctttcttgaatcattttccttttggattataaaaatatgggggaaagtgctatgatgaattttatgcaataaatgtataacatgttgcacatgcacccatgctg

SEQ ID NO: 350495 - DNA, 567 bp, Homo Sapiens
gagggaaagagggagaaaggattgggaggagaaaaggagagcaaagaagaagataagaatagagagagtgagctgagaatttgagcttgctcagagttgactttcgggagggtttttgtcctataatatgtggcatcctgcgggtgacagggaggtgagttaggtggacacgtataggacgtgccctttcataaggcttgggcagtcatttggcgagtgagctgaaatccatgtcttgttagagatagggatggggtaggcagaaaggagctccaaactatgggtttgggattggcacccctatcctatcatcacccagagtcttcattgttgagatgctgcccatggaaaacagattgggacatagattttggaatcaaggtctctgctcctggcatctcctctgtgcgtctccctctgcctttgctccctggggactgtgggcaggaggagcttcttcggaggaccgggagtgggcctccagtccccctgcccctgtagaggaataatgagggaggacatggggaagttcactgttcaaagggcttggcacagcttgttgagccc

SEQ ID NO: 350496 - DNA, 1210 bp, Homo Sapiens
gtcccatggaatataagtaacaccaagttctacatcccaatactgcttataatctgcctttattcctttgtttaaggcccaggcaatctttatggatttctggttcactttatagtttcctcggctcagtttctgcagggcacgataggcatcttgcctatgaaccataacaatataggcacaacccctgggaggaatcatattaattgattcaattggaccaaactcttccaagagactggcaacatcctgctgagtagttcttttgtccagctgccccacccagagggtagtactgcaaacacttgcagtttccggtttcacttgagggaggcctttttgtcgacgttctctctctttttctcgatcccgtctttcttgagatcgagatcggggagaatgtcggcgtctatccctggaccgagatcgagaacgtcgatgccgagaccttcgagatctagaaccagatctagatcgcctcctttttggtgacctggatgctgacctagatcttgactttctgttatcagacatatgtcgcttaacctcttgaatacaaggttgttctacttccatttcctgctgatgcggcttctgtgtaaggtggttcattttgtgcctgaaaaagaagcttggaaagggctgctgcactggtggaagttggaggaatcacaggctgagccatgggaggaaaatgggagggtgtaggaaagaagtccaaatcctggcatttgtccacttaggaggaagtggaacctgatggtgcattggatcctgttgtattcccatccatttcgtggctgaaactgatccatattttgatgctgtgtgtatgctggctgctgcatgccatctccaggaaagccaaatggtgcctgtggaggaggaggagaggcagcagcgggtgcagcagcagcaggcacggtggcggtgggtgcagggggtactgcggcagcaggtgctgtcgtggtgacggccagtggtatcctctttctttgattcttccacagcttctggctcatcatcatagtcaaatctatcaagcaacttcttgtcaaatgcagttttctgttcaggtggggggaaagcagctttttgttcagatggttgtgtaggagttgtctttaactgagctgtgatagcctgaacctgagccatcacagcattgtcaagggcaggagactgggtttggaggctgtgaaaagtctga

SEQ ID NO: 350497 - DNA, 1304 bp, Homo Sapiens
gagcgaggcctgggtggcgaattcggcacgaggtgaagaccagcgctgccgccgcctccttttcctcatcctgcgaacgggactgagagggggcccgccacctctccgcctctgcctcggccgcccgcctcgccgcttcgggcgcagcctcttcctgcccgggcctcggactccgccgctcgtcgcctccccccggccaccaggcccggctggtttcccagccccgctccgccgcggcgcgaggtctatgtgaccggcgggcccggagcagccgccgccgcagcgcgaacatggacgccgtcaacgccttcaaccaggagctcttttcgcttatggatatgaaacctcccatctctagagccaagatgattctcatcactaaagctgctattaaagctattaagctttataagcatgtagttcaaatagtagaaaagttcatcaaaaagtgtaaaccagaatacaaggttccgggattatatgtaattgactcaattgtgcgacagtctcgtcatcagtttggaactgataaagatgtttttgggccaagattctctaaaaacataactgccacattccaatatttatatctttgtccatctgaagataagagtaaaatagttcgtgtgctgaacctttggcaaaaaaatggagtgttcaaaattgaaattattcaacctcttttggacatggcagcgggaaccagtaatgcagccccagtagcagaaaatgttaccaataatgaaggctcacctccacctccagtaaaagtttcttctgaacctcccacacaagccactccaaactccgtcccagctgtaacacagttgcccagctctgatgcttttgctgctgtggctcagctggttcagacaactcaagggcaacagcttcagcagatccttcagacttttcaacagcctccaaaaccacagtctcctgcccttgacaatgctgtgatggctcaggttcaggctatcacagctcagttaaagacaactcctacacaaccatctgaacaaaaagctgctttccccccacctgaacagaaaactgcatttgacaaggtatatttctctcacataacccaccccaccatttatatcactcaacttgagttatggaaattatcacttctgtatcccttctgtggattgttcattatgtcgttttgtaatttgagagattttccccctcaacaagaaaacatcgattattttccctggttttaaatacgacatgtgctcagtgcaaaaatttccagggtttgaagctgaatttactagtgtaaaattaaaaaagtg

SEQ ID NO: 350498 - DNA, 723 bp, Homo Sapiens
gaggtacgcggtgcggtctcccggtacccggagcggctctgattcatggtttaacttgtggccctaaagaactggaaacccaaaggaacgaatattcctgccccacagagtcccgtctttggtgaggctgtttctggagtttacatgatgaccaaggtactaggcatggccccagttctgggccctaggcctccacaggagcaagtggggcctctgatggtaaaagtcgaggagaaagaagagaaaggcaagtaccttcctagcctggagatgttccgccagcgcttcaggcagtttgggtaccatgatacccctggaccccgagaggccctgagccaactccgggtgctctgctgtgagtggctgaggcccgagatccacaccaaggagcagatcctggagctactggtgctggagcagttcctgaccatcctgccccaggagctccaggcctgggtgcaggagcattgcccggagagcgctgaagaggctgtcactctcctcgaagatctggagcgggaactggatgagccaggacaccaggtctcaactcctccaaacgaacagaaaaccggtgtgggagaagatatcctcctcaggaactgcaaaggaatccccgagcagcatgcagccacagcccttggagaccagtcacaaatacgagtcttgggggcccctgtacatccaagagtctggtgaggagcaggagttcgctcagatcca

SEQ ID NO: 350499 - DNA, 1191 bp, Homo Sapiens
gcgttcttccgtgcgcccaccgacacctccttggtgcacaggatcacctctgggatgagggcagtgatgaactccttgtgttcagctgagagcttcctcacgatgtgtaggaggcacttcaaacggggcctcttggcgggtgaggaggtgctccgcagcgagtccagcagtgtcttcttcaggtcctccaggtggctctgcacgaagagggccccggggccctgaggactggcacacacctcctccagcactcggtaggccttcttctgcaccccgtgggccttgctctctaggtagggccggatggtggagtatagcttactgatggcagcttcgtcagcaccacggagccaaaggccacgaccaggtcccaggacagacaatctggtaaagccagagctggcagggtcgagcaccttctcactggctttttccaggagactgttcaccaactgagtgtcagtgatggtgaggtaagttctgatggtttccagcacagccccggcgaggggctggagtgtccccggctgccacgggctgcccatacaggttgaagaggatcggcagaaagttcttggcaaagcgactcacttcagcacggtcagcctctgcctggcagcccttggtgatgagggtgcgcagggcctggcacacggtgaccctcaggtctggacgctcgctgatggccatgcccagcgtccgtgccagccctttgaaggagatggccacatctgtaggccttgtgcagaacccaggcaggagtgtccacatctgccactggagtgtgtcgtagatcttagattccactgtgctgcctgcctgagccaggtccatggctttgctcttcagggtgttagccaggggcaagaagtaggtggtgaaaaaaccaagttgcgtttcctgaacatggtctcggatgacaggcagcagccagctccgtgggaaatccagagtctcctcagagccatcaatttccaaaggcacagcctgcagcaccacctcaggtcccatactggtcaccgcagcccccactgcctggtcaagagccgccgtgtgggggaaatgaggggagaggcgcaggtcacacagggactggaggcacttcctcatcacagggtgggcctgtctcccacacgcctcgaagaagacacacagcagctgcaacacggagctccaggccgcatggaattt

SEQ ID NO: 350500 - DNA, 905 bp, Homo Sapiens
  misc_feature (723)..(756): n is a, c, g, or t
caggatagagagcatgcatttaatagcagaaatcctaaagttacactcagtataaattgattgaaagcaagaatattgcaaacagcatgatggatatgaggcagacaaccttggcttaacaaataatccagcattatcattattgttatgactgtggtgggggctatttaaaggagtatccaactctccagcacagatgggggttccttcacctgaatcccctcaaaggctcttgaaataaatcacttgataataaaaggcaatccctgcatacccaccccgaccccaacagaatcaactgatgtcaagtttatatgcaaagggaaaaaatttcttttgtgcttggaatgaattttgaagaagcttattcccccctattgcttgtctccctttcttaaatcaggtaaagaagctgtacaggtttaattaagagcttatacaaaatgctggggtgctttattcacagtaacggcttgaaatcagttcatttccaaattgagtctctgggattggtgaaggactctacattttagaaattagcagatttaaagtaaaagcagatatgctcaaaagaagaaaagtgtgcttttctttgtccttaaaggaacttcattcatagcaaagcatgcacaaacaaggcctgtttaacaaacacagatctgcccgggccctactgtaacagaatcagggagggtacaagtcatcgttatcttgatctaactnnnnnnnnnnnnnnnnnnnnnnnnnnnnnnnnnncacaaatgtaccatattgtgtatatcatctgggatattttaaaggacaatttatctacctattaagtgtcactgggttctaaacaatgaaacttgttatctggatagcaaaaaacactaagttgtaaagccacaagcttcaattacttt

SEQ ID NO: 350501 - DNA, 854 bp, Homo Sapiens
  misc_feature (221)..(221): n is a, c, g, or t
  misc_feature (360)..(360): n is a, c, g, or t
  misc_feature (571)..(571): n is a, c, g, or t
  misc_feature (712)..(712): n is a, c, g, or t
  misc_feature (780)..(780): n is a, c, g, or t
  misc_feature (796)..(796): n is a, c, g, or t
  misc_feature (808)..(808): n is a, c, g, or t
  misc_feature (815)..(815): n is a, c, g, or t
  misc_feature (838)..(838): n is a, c, g, or t
tgccgcagcgaccacaagcctgtttccggcacgttcgacttggagctgaagccattggtgtctgctccgctgatcgtcctgatgcccgaggacctgtggaccgtggaaaatgacatgatggtcagctactcttcaacctcggacttccccagcagcccgtgggactggattggactgtacaaggtgatgtggtggcaaggcaggaagtccatcagcgacanccctggttcatccttcccgagggctcctgggagctgggcagatgctgacgaactcaccctcatccaccccagcggttcttctgtagctaaaggctggcagtgaagggcggcggggaggcacacagtacggtagccaggnccagcagggagaccatctcttccttaggacttgccttaggtcccatgtcctccctgaccactgatggcctgactccccctcacaggtggggctgcgggacgttaatgactacgtgtcctatgcctgggtcggggacagcaaggtctcctgcagcgacaacctgaaccaggtacgtcaccagcaccaggtacatcaccagcaggcaggcctncttcagcactcctgtcttgtggaaggaacagagtgctgaataacttgtcactcagagctgggtggagcccagagccctgggagctgaccccagtcctgtccatccccctccaggtttacatcgacatcagcaatatccctnaccactgaagatgagttttctcctctgtttattacagcaacagtcttgcgtttttgtgggttgggggntaaggcagaacctttncagatccccgcntgggttnctttgaaggggagggacccattngggtggaaaggcacag

SEQ ID NO: 350502 - DNA, 2591 bp, Homo Sapiens
  misc_feature (25)..(25): n is a, c, g, or t
  misc_feature (27)..(27): n is a, c, g, or t
  misc_feature (1934)..(1934): n is a, c, g, or t
  misc_feature (1944)..(1944): n is a, c, g, or t
  misc_feature (1963)..(1963): n is a, c, g, or t
  misc_feature (1965)..(1965): n is a, c, g, or t
  misc_feature (2193)..(2209): n is a, c, g, or t
gcgtgagaccggccgcccgcacgtngnctctggccgggacccgctggccgggagacgcgaacctgccggaccaccgcgcggggacgacggcggccatgagctcgcggaagctgagcgggccgaaaggcaggaggctcagcatacacgtcgtgacttggaacgtggcttcggcagcgccccctctagatctcagtgacctgcttcagctgaacaaccggaacctcaatcttgacatatatgttattgggtctcccatgtccgtatgcaggggatcctcttactggtctttgccaagtatcagcatttgccctatatccagattctgtctactaaatccacccccactggcctgtttgggtactgggggaacaaaggtggagtcaacatctgcctgaagctttatggctactatgtcagcatcatcaactgccacctgcctccccacatttccaacaattaccagcggctggagcactttgaccggatcctggagatgcagaattgtgaggggcgagacatcccaaacatcctggaccacgacctcattatctggtttggagacatgaactttcggatcgaggactttgggttgcactttgttcgggaatccattaaaaatcggtgctacggtggcctgtgggagaaggaccagctcagcattgccaagaaacatgacccgctgctccgggagttccaggagggccgcctactcttcccgcccacctacaagtttgataggaactccaacgactatgacaccagtgagaaaaaacgcaagcctgcatggaccgatcgcatcctgtggaggctgaagcggcagccctgtgctggccccgacactcccataccgccggcgtcacacttctccttgtctctgaggggctacagcagccacatgacgtacggcatcagcgaccacaagcctgtctccggcacgttcgacttggagctgaagccattggtgtctgctccgctgatcgtcctgatgcccgaggacctgtggaccgtggaaaatgacatgatggtcagctactcttcaacctcggacttccccagcagcccgtgggactggattggactgtacaaggtggggctgcgggacgttaatgactacgtgtcctatgcctgggtcggggacagcaaggtctcctgcagcgacaacctgaaccaggtttacatcgacatcagcaatatccctaccactgaagatgagtttctcctctgttactacagcaacagtctgcgttctgtggtggggataagcagacccttccagatcccgcctggctccttgagggaggacccactgggtgaagcacagccacagatctgagccaggatgggagtgaatcccaggcggaggccagagctggcagccagctctgcctttccactgccgggagtgctgggggcccagcctggccccctgaagagacagccaagtgtcgtccacatactcctcccagagtgagctctaaccaggctcatttgctctctccactactcatctctggaattagccgcttaaatacaggtttttgttgctgagatgtgagtgaaaccagctagtgtgtcaacagtgaagacctggggacagttctgcgtctcatttctggattcctaccccctcttctagtcttgcccaagtagtcctgccaggcacatgccccatttggcacaggcctgcattcttgtcgtgccgtcctgggcctcaggctgtctgggaggggagatgctcacatttgtacaggctacatagactggtgcaagcagtgctggattccaggagtcttggcatctcatagcttgtccccgtgaggagtgagcagagggtctgggatttctgctttcagcaaaagcagtctgactcagtgggcagaatggaggggcccctctagccaggctcttacgccatgggtatgagcaggttgatnagggtcttcngccagcacaaccttcctcntnactcacggcatggagtctgactgcatggaagttccagatcctgacagagagaactgggaaggatccaggttcgcttccgttggtagcttgagtcccatgcctccaccctgccatctgaggaaggggtgacaagtggtcaaggagctgtggccacagacttttccagggtggtccttggcaggtgaggtgcgtctgtgccacccttgtcaggagtcattgacgacgggnnnnnnnnnnnnnnnnngggacctcagagtgggggcaggcagaagggagaaccagctcaagacattttggaggatctggccctggggttcttcagagaacaccctctaggggctttggggacatggcctgtccccacatccagcacttgcctccgccatggtcactcggcagcccttttcccaggagaagacacctctgggagcctgctcagtgcttgtcctgccatcctgtgtcctgggactgagggttactccagttgctctgtgttgcatactctcccccgcaagcctgtgtatgaagaattgtcccctggcttccagcaggccatggctggctgttttgtgactgttacattgtgcaggggtaattattagcgtggcttttacacttaaaaaaaa

SEQ ID NO: 350503 - DNA, 1265 bp, Homo Sapiens
  misc_feature (13)..(13): n is a, c, g, or t
  misc_feature (51)..(51): n is a, c, g, or t
  misc_feature (104)..(104): n is a, c, g, or t
  misc_feature (160)..(160): n is a, c, g, or t
cttgtggtcgctnaatgccgtacgtcatgtggctgctgtagcccctcaganacaaggagaagtgtgacgccggcggtatggaagtgtcggggccagcacagggntgccgcttcagcctccacaggatgcgatcggtccatgcaggcttgcgttttttctnactggtgtcatagtcgttggagttcctatcaaacttgtaggtgggccagcacagggctgccgcttcagcctccacaggatgcgatcggtccatgcagggcttgcgttttttctcactggtggtcatagtcgttggagttcctatcaaacttgtaggtgggcggggaagagtaggcggccctcctggaactcccggagcagcgggtcatgtttcttggcaatgctgagctggtccttctcccacaggccaccgtagcaccgatttttaatggattcccgaacaaagtgcaacccaaagtcctcgatccgaaagttcatgtctccaaaccagataatgaggtcgtggtccaggatgtttgggatgtctcgcccctcacaattctgcatctccaggatccggtcaaagtgctccagccgctggtaattgttggaaatgtggggaggcaggtggcagttgatgatgctgacatagtagccataaagcttcaggcagatgttgactccacctttgttcccccagtacccaaacaggccagtgggggtggatttagtagacagaatctggatatagggcaaatgctgatacttggcaaagaccagtaagaggatcccctgcatacggacatgggagaccttgatgaagctcagaggggaaagcacatccatgaggaaactgctccacgagtcattaaaggcagcatcggaaaggaggcttatgatcccagagttcaattcctgcaaaccaataacatatatgtcaagattgaggttccggttgttcagctgaagcaggtcactgagatctagagggggcgctgccgaagccacgttccaagtcacgacgtgtatgctgagcctcctgcctttcggcccgctcagcttccgcgagctcatggccgccgtcgtccccgcgcggtggtccggcaggttcgcgtctcccggccagcgggtcccggccagagcagccctgcgggcggccggtctcacgcgcctagctgtcgcggactgtttttcttccggactccgaccgtccgccccggcttccgtcagagacgcgccctccgcgcaccccgggatctggatcccgggaattccggaccggtcca

SEQ ID NO: 350504 - DNA, 1048 bp, Homo Sapiens
ggcctgggtggcgaattcggcacgaggccggaagaaaacagtccgcgacagctaggcgcgtgagaccggccgcccgcagggctgctctggccgggacccgctggccgggagacgcgaacctgccggaccaccgcgccgggacgacggcggccatgagctcgcggaagctgagcgggccgaaaggcaggaggctcagcatacacgtcgtgacttggaacgtggcttcggcagcgccccctctagatctcagtgacctgcttcagctgaacaaccggaacctcaatcttgacatatatgttattggtttgcaggaattgaactctgggatcataagcctcctttccgatgctgcctttaatgactcgtggagcagtttcctcatggatgtgctttcccctctgagcttcatcaaggtctcccatgtccgtatgcaggggatcctcttactggtctttgccaagtatcagcatttgccctatatccagattctgtctactaaatccacccccactggcctgtttgggtactgggggaacaaaggtggagtcaacatctgcctgaagctttatggctactatgtcagcatcatcaactgccacctgcctccccacatttccaacaattaccagcggctggagcactttgaccggatcctggagatgcagaattgtgaggggcgagacatcccaaacatcctggaccacgacctcattatctggtttggagacatgaactttcggatcgaggactttgggttgcactttggtcggggatccatttaaaaatcggtgctacggtggccctgtggggagaaggcacaggctcagcattgccaaggaaacatgacccgcctgcctccgggagttcccaggaaggggccgcctactctttccgccccacctacaaattttgataggaaactccaacgactatggacaccaggttaggaaaaaacgcaagccctgccatggaccgcatcgcaatcctgttgggaaggctgaaaacgggcaacccctgttgttgggcccccaaaacttctccttaacgg

SEQ ID NO: 350505 - DNA, 2003 bp, Homo Sapiens
agcgttttccggccgtgcgtttgtggccgtccggcctccctgacatgcagccctctggaccccgaggttggaccctactgtgacacacctaccatgcggacactcttcaacctcctctggcttgccctggcctgcagccctgttcacactaccctgtcaaagtcagatgccaaaaaagccgcctcaaagacgctgctggagaagagtcagttttcagataagccggtgcaagaccggggtttggtggtgacggacctcaaagctgagagtgtggttcttgagcatcgcagctactgctcggcaaaggcccgggacagacactttgctggggatgtactgggctatgtcactccatggaacagccatggctacgatgtcaccaaggtctttgggagcaagttcacacagatctcacccgtctggctgcagctgaagagacgtggccgtgagatgtttgaggtcacgggcctccacgacgtggaccaagggtggatgcgagctgtcaggaagcatgccaagggcctgcacatagtgcctcggctcctgtttgaggactggacttacgatgatttccggaacgtcttagacagtgaggatgagatagaggagctgagcaagaccgtggtccaggtggcaaagaaacagcatttcgatggcttcgtggtggaggtctggaaccagctgctaagccagaagcgcgtgaccgaccagctgggcatgttcacgcacaaggagtttgagcagctggcccccgtgctggatggtttcagcctcatgacctacgactactctacagcgcatcagcctggccctaatgcacccctgtcctgggttcgagcctgcgtccaggtcctggacccgaagtccaagtggcgaagcaaaatcctcctggggctcaacttctatggtatggactacgcgacctccaaggatgcccgtgagcctgttgtcggggccaggtacatccagacactgaaggaccacaggccccggatggtgtgggacagccaggtctcagagcacttcttcgagtacaagaagagccgcagtgggaggcacgtcgtcttctacccaaccctgaagtccctgcaggtgcggctggagctggcccgggagctgggcgttggggtctctatctgggagctgggccagggcctggactacttctacgacctgctctaggtgggcattgcggcctccgcggtggacgtgttcttttctaagccatggagtgagtgagcaggtgtgaaatacaggcctccactccgtttgctgtgacgggtctgctgcagtcctcagtcgggggtcctgggcaccatgtgactccccatcctcccatgaggggtccctgccctggatgagtcctagctgggggacaccctgagagctcgagcccctcccacccgggcatccgctggctgcctcctgtcagctgggcaggcggggcccacagtacctgccccaccaggacagcctggctcaggcctttctgggctgcttctcacatcctgggctggatgtgggtttggaagctctggaaccatcccggactcgcccactcctggattcgagggccctcgcagggacagctctgcccagcatcaccccagggcctggcagtgatagagctgagagctccacccccacatacctgccacccacctggccagccacagcacgtgtgtcacctgcagagagccacccagacgtccccaccgagtccagcacggcaagggtgcaggggctgccctagaaatggactcagaggagcctggcccaccctcttgaaactggtcctggaccttggctcagctctgccgcctcaggacgggagctggggagggggtcctgggtcggacccaaggcacccacacttgagaaagcctccgcctggacgtcagggaggcctgcgagctgccacagtgcaggtgcagccgttcccaccgccctgctgctgcttgacacgggcataggagatacaagtggtgtgtgcggcggttcat

SEQ ID NO: 350506 - DNA, 1587 bp, Homo Sapiens
gggagcgtcttccggccgtgcgtttgtggccgtccggcctccctgacatgcagccctctggaccccgaggttggaccctactgtgacacacctaccatgcggacactcttcaacctcctctggcttgccctggcctgcagccctgttcacactaccctgtcaaagtcagatgccaaaaaagccgcctcaaagacgctgctggagaagagtcagttttcagataagccggtgcaagaccggggtttggtggtgacggacctcaaagctgagagtgtggttcttgagcatcgcagctactgctcggcaaaggcccgggacagacactttgctggggatgtactgggctatgtcactccatggaacagccatggctacgatgtcaccaaggtctttgggagcaagttcacacagatctcacccgtctggctgcagctgaagagacgtggccgtgagatgtttgaggtcacgggcctccacgacgtggaccaagggtggatgcgagctgtcaggaagcatgccaagggcctgcacatagtgcctcggctcctgtttgaggactggacttacgatgatttccggaacgtcttagacagtgaggatgagatagaggagctgagcaagaccgtggtccaggtggcaaagaaccagcatttcgatggcttcgtggtggaggtctggaaccagctgctaagccagaagcgcgtgggcctcatccacatgctcacccacttggccgaggctctgcaccaggcccggctgctggccctcctggtcatcccgcctgccatcacccccgggaccgaccagctgggcatgttcacgcacaaggagtttgagcagctggcccccgtgctggatggtttcagcctcatgacctacgactactctacagcgcatcagcctggccctaatgcacccctgtcctgggttcgagcctgcgtccaggtcctggacccgaagtccaagtggcgaagcaaaatcctcctggggctcaacttctatggtatggactacgcgacctccaaggatgcccgtgagcctgttgtcggggccaggtacatccagacactgaaggaccacaggccccggatggtgtgggacagccaggtctcagagcacttcttcgagtacaagaagagccgcagtgggaggcacgtcgtcttctacccaaccctgaagtccctgcaggtgcggctggagctggcccgggagctgggcgttggggtctctatctgggagctgggccagggcctggactacttctacgacctgctctagagagccacccagacgtccccaccgagtccagcacggcaagggtgcaggggctgccctagaaatggactcagaggagcctggcccaccctcttgaaactggtcctggaccttggctcagctctgccgcctcaggacgggagctggggagggggtcctgggtcggacccaaggcacccacacttgagaaagcctccgcctggacgtcagggaggcctgcgagctgccacagtgcaggtgcagccgttcccaccgccctgctgctgcttgacacgggcataggagatacaagtggtgtgtgcggcggttcat

SEQ ID NO: 350507 - DNA, 1098 bp, Homo Sapiens
gtccggggccggtgaccgcaaatctttagccccaggggacgggggggccatttggggcccaggcttattcccccttagagtaggtcctaagctccgagggcctgaaaccattccgagccgggggggccaggggttcaaagtcccttggggggtgaacatgcccaattgtttccgttccgggggtggatggcaggcgggatgaccaggaggcccagcagccgggcctggtgcagagcctcggccaaagtgggtgagcatgtgaatgaggcccacgcgcttctggcttagcagctggtttccagacctccaccacgaagccatcgaaatgctggttctttgccacctggaccacggtcttgctcagctcctctatctcatcctcactgtctaagacgttccggaaatcatcgtaagtccagtcctcaaacaggagccgaggcactatgtgcaggcccttggcatgcttcctgacagctcgcatccacccttggtccacgtcgtggaggcccgtgacctcaaacatctcacggccacgtctcttcagctgcagccagacgggtgagatctgtgtgaacttgctcccaaagaccttggtgacatcgtagccatggctgttccatggagtgacatagcccagtacatccccagcaaagtgtctgtcccgggcctttgccgagcagtagctgcgatgctcaagaaccacactctcagctttgaggtccgtcaccaccaaaccccggtcttgcaccggcttatctgaaaactgactcttctccagcagcgtctttgaggcggcttttttggcatctgactttgacagggtagtgtgaacagggctgcaggccagggcaagccagaggaggttgaagagtgtccgcatggtaggtgtgtcacagtagggtccaacctcggggtccagagggctggccaggctgaaacggtggctgcctcagctcccaggcacccagtctttgaccccagcccattccatgaccactggctccttctctgtcttctgggtggaaatctgcatgtcagggaggccggacggccacaaacgcacggccggaaaacgctcatcccgggaattccggaccg

SEQ ID NO: 350508 - DNA, 779 bp, Homo Sapiens
  misc_feature (711)..(711): n is a, c, g, or t
  misc_feature (742)..(742): n is a, c, g, or t
  misc_feature (747)..(747): n is a, c, g, or t
caatcgtgttggccctccggcgatctcccgttggatgaattgcacaggctgaaactcgagtcccctttgatttgcgcttcattaattattcatgattcaggttggaaggcctgctgacgaccccctgtggccgttctctgagctttcctgtcacatcgtttccttccacgctctttggttccttgtggtcctgctccttctgctgtcagaggagcagagagttgatcttattgattctggatacggatactttctaggtgatctggataatcaggataacgaccctcaacagcggcggaaagggagcagccatttggtgtgtctcagaaaatcccgctcagttccgaggcctcctagatgtggaatcctgctcagagttgttcccaggtcagagaatggagagagcctgggcatgatgggatatccctgcctagatctttcagtgagtctctacctcagctactcttaggatcagggggagaaccatggaaaggcccggtgtcagacatccggaaagaagagggatgaatgtttcacctctgaagtacatcccaaatgtgggagttaacttcagctttgctggggtctacttggccagcgaaactctgcctggttcattcgcacatccggaagccacttcacggggagccgtcgcaaccggaaccacacacttggcatcggcggttgagccaaatgggggactcgtgggtncaagcaacgttcccccacgtgtttagcgttncgtgnagatttcaatttggcgggatttttattagggt

SEQ ID NO: 350509 - DNA, 1727 bp, Homo Sapiens
tctgtgggcgccgcccccagcctgggcgcgtccatcgtcgagtaccttctcctctgcctccccctccctctgcttctatctctctccaattgccctccctggcctgcggccgcccggtcctccttcccagcccagtgcagccaggcacccgggttcggcttgctcaggtctctgtccgggactgggaagccacggagggccgggaaagtggcacactcctggagctcaagcttcctactctctcatcgctgaataactaccgggcaggactgggtggaacagacagcatatttaggtcattgatgggctgctgggtggatggagctggaaagtgatgggcactgctttctggggctgcccaggttccttccgagggctcgcttttcctgggcagagcgggaaagaggaggggcaggccggtcgcgaaacgcaaatagtcgagaatagcgatccggggagaagcaggtgtctgtggggcccaagagaagtaccatctcgagcatccttagtccagaaatggggagctatgaaccttaagattagactactaactcgaatctaaatgagctgcccttgtctcctacaaaagaaaagttgggcagctacggaactctaatgaggcttccatcatgctctgaaccaaatcatgatcaaaactaactgacaaaccgtcacggaatctgccagacctcactctggccttgctgcttctctccagctcctgaacttttctttcttccatcatgctctgagcccattccttgaaaactaaaaggtccctgactcccagtctgcagccatcctgggcctgctgagctctgattcaagtgcctgcctctgccccttggtgggctgaagcttcatggaggtatccaccaacccctcctccaacatcgatccaggcaactatgttgaaatgaatgattcaatcacccacctaccctctaaagtggtgatacaagatattactatggagctacactgccctctgtgcaatgattggttccgagacccactgatgctaagctgtggccacaacttctgtgaagcctgtatccaagacttttggaggctgcaagcaaaggaaacattctgtcctgagtgtaagatgctatgtcagtataacaactgtacattcaacccgtgtactggacaagttggtagagaagattaagaagttacccttactcaagggccatccacagtgcccagaagcatggagagaacctgaaactgttcagtaaaaccagatgggaaactgatctgctttcaatgcacaggatgctcggttgtctgtgggggcagtctaaggagttcctgcaaatctctgatgcctgtccattttcttcatggaggaacttgcccatccaaccagggtcaacttggagacaactctgaaggagcttcagaccctgaggaacatgcagaaggaagctattgctgctcacaaggaaaacaagctacatctgcagcaacatgtgtccatggagtttctaaagctgcatcagttcctgcaccagcaagaaaaggacattttaactgagctccggggaagaggggaaagccttgaaatgaggaaatgaagttgaatcctgacccgctttcaggaaccaatggctctttatccaaggaaaatgttggtggaccattccaggaaaaaccggaaacaacgaaactcccttcgaattttttcaaagaaaattccaaaatcctccttaacaaaaatc

SEQ ID NO: 350510 - DNA, 831 bp, Homo Sapiens
gaacttttctttcttccatcatgctctgagcccattccttgaaaactaaaaggtccctgactcccagtctgcagccatcctgggcctgctgagctctgattcaagtgcctgcctctgccccttggtgggctgaagcttcatggaggaggagcttgccatccaacagggtcaactggagacaactctgaaggagcttcagaccctgaggaacatgcagaaggaagctattgctgctcacaaggaaaacaagctacatctgcagcaacatgtgtccatggagtttctaaagctgcatcagttcctgcacagcaaagaaaaggacattttaactgagctccgggaagaggggaaagccttgaacgaggagatagagttgaatctgagccagcttcaggagcaaggtctcttagccaaggatatgtgggtgagcattcaggcaaagacggaacaacagaactccttcgactttctcaaagacatcacaactctcttacatagctgggagcaaggaatgaaggtgctggcaaccagagagcttatttccagaaagctgaacctgggccagtacaaaggtcctatccagtacatggtatggagggaaatgcaggacactctctgcccaggcctgtctccactaactctggaccctaaaacagctcacccaaatctggtgctctccaaaagccaaaccagcgtctggcatggtgacattaagaagataatgcctgatgatcctgagaggttcgactcaagtgtggctgtactgggctcaagaggcttcacctctggaaagtggtactgggaggtagaagtagcacagaagacaaaatg

SEQ ID NO: 350511 - DNA, 1966 bp, Homo Sapiens
  misc_feature (42)..(78): n is a, c, g, or t
  misc_feature (1876)..(1891): n is a, c, g, or t
ctgttcatcactatgggcgctcgggttatcgcggggcggcgnnnnnnnnnnnnnnnnnnnnnnnnnnnnnnnnnnnnnatcaggccaaatcggccgagctcgaattcgtcgagagcggcttctcctctgcctccccctccctctgcttctatctctctccaattgccctccctggcctgcggccgcccggtcctccttcccagcccagtgcagccaggcacccgggttcggcttgctcaggtctctgtccgggactgggaagccacggagggccgggaaagtggcacactcctggagctcaagcttcctactctctcatcgctgaataactaccgggcaggactgggtggaacagacagcatatttaggtcattgatgggctgctgggtggatggagctggaaagtgatgggcactgctttctggggctgcccaggttccttccgagggctcgcttttcctgggcagagcgggaaagaggaggggcaggccggtcgcgaaacgcaaatagtcgagaatagcgatccggggagaagcaggtgtctgtggggcccaagagaagtaccatctcgttaaaaattcagattgaactatcttacaaatggctcccagaagatccactccctgtgggaacacagcagttgtggaagtgaagacaggactggacccagaataagggttcaaatatgtggggaaatctgacctctaaattcttataagtcagagagtgactgaacaacagcagtgagacatcgaagagttttaatatctgctgtaaaccttggcacagatcatttacttctctaagactgaatccaaaaagcacaatggaatactataataagctgagacagcatggtgaattccagacaagcctgagcattccctatagccagagaaggaggcccaacacctaacatagccttggatgcagaactgatagaacttggggaaagtgatgaagtagttgacctcacctgtgaatctctagcacctgtagtgattgacctaactcaccgtgactctgtagtgattattgaacaaaggaggaggccaagagcaaacacaaggccactccaagaccacactggcagttgtgtggtgaacaatgatgaggagggagtgaaaagggacagagatgtatgtataaccaacagtgcccaccataattccctgcaaaaaaattttttttgtcatatactacctggttatattcagtgtcaagtttgcatggatggatgctcagagattgaacttagtatacaacacatctactctatagaatgtggccacatctgtagtcagtgcttctgcacttcctttacacatactaacactgcccagtttgtttgaaaaaaatcagcctccatcagtatcactgcagttatatatgatgtatgccttattgctcaagacagatcctgtggctggatttttccatgtctttgtgcaggaactatgggttgttggcatccaatgctctgagcttaaaaatactgattttcaaaattgctatctggcagcatataagaaacctctttgatttctcatatgccctgagactgctttctgttccctttggctttatgctccagctctggactctcgctgccccaatgcgccaaataccgtggcctgttccttaaagccacctcccccctttcttcaacgccatcaaatctttcctctggcccccctgtaacaacattcctgcgacccctctacataaagaaccaccccccttacagatggcggcaccacacgcatgatcccaaaggtttctttggcataaacctgctaagcggcgaatctggcccagaacctccaccttctgggctcttgggtgggcttttcgttccccagccttcccgtgaacnnnnnnnnnnnnnnnnccccactcaacgggtctttgggaagccccctttttccctttgtggaaaaaatccctaaaaagggggtctcctctc

SEQ ID NO: 350512 - DNA, 2999 bp, Homo Sapiens
  misc_feature (45)..(81): n is a, c, g, or t
  misc_feature (2707)..(2745): n is a, c, g, or t
  misc_feature (2794)..(2862): n is a, c, g, or t
  misc_feature (2916)..(2925): n is a, c, g, or t
atgtatgatatataggggaccgcgctttatcgcggtggcggccgnnnnnnnnnnnnnnnnnnnnnnnnnnnnnnnnnnnnnatcaggccaaatcggccgagctcgaattcgtcgagagcggggagtgggcggctgcgggacgcgcgcggagtcgcgcggcgggcgggacctggccgagctggagggcgccggggagcggggctcgggcggtccccgaggcccggcggagcgggcttctggggtgtctgcggcggcgccgggggaacgggctggggatggggcgcctagccgggcggtggccggggcctcggccatgttcgcggggctgcaggacctgggcgtggccaacggcgaggacctgaaggagaccctgaccaactgcacggagccgctcaaggccatcgagcagttccagacagagaatggtgtgctgctgccatctcttcagtcagccctccccttcttggacctgcacgggacgccgcggctggagttccaccagtcggtattcgatgagctgcgggacaagctgctggagcgagtgtcagccatcgcttcggaggggaaggctgaggaaaggtacaagaagctggaagaccttctggagaagagcttttctctggtgaagatgccgtccctgcagcccgtggtgatgtgcgtcatgaagcacctgcccaaggttccggagaaaaaactgaagctggttatggctgacaaggagctgtatcgagcctgcgccgtggaggtgaagcggcagatctggcaagacaaccaggccctcttcggggacgaggtttccccactcctgaagcagtacatcctggagaaggagagcgctctcttcagtacagagctctctgtcctgcacaactttttcagtccttcccccaagaccaggcgccagggcgaggtggtgcagcggctgacgcggatggtggggaagaacgtgaagctgtacgacatggtgctgcagtttctgcgcacgctcttcctgcgcacgcggaatgtgcactactgcacgctgcgggctgagctgctcatgtccctgcacgacctggacgtgggtgaaatctgcaccgtggacccgtgccacaagttcacctggtgcctggacgcctgcatccgagagcggttcgtggacagcaagagggcgcgggagctgcaggggtttctcgatggcgtcaagaagggccaggagcaggtgctgggggacctgtccatgatcctgtgtgaccccttcgccatcaacacgctggcactgagcacagtcaggcacctgcaggagctggtcggccaggagacactgcccagggacagccccgacctcctgctgctgctccggctgctggcgctgggccagggagcctgggacatgatcgacagccaggtcttcaaggagcccaagatggaggtagagctcatcaccaggttcctcccgatgctcatgtccttcctggtggatgactacactttcaatgtggatcagaaacttccggctgaggagaaagccccagtctcatatccaaacacacttcccgaaagcttcactaagtttctgcaggagcagcgcatggcctgcgaggtggggctgtactacgtcctgcacatcaccaagcagaggaacaagaacgcgctcctccgcctgctgcccgggctggtggagacctttggcgacttggcctttggcgacatcttcctccacctgctcacgggcaaccttgcgctgctggccgacgaatttgcccttgaggacttctgcagcagcctcttcgatggcttcttcctcaccgcctctccaaggaaggagaacgtgcaccggcacgcgctgcggctcctcattcacctgcaccccagggtggccccatctaagctggaggcgttgcagaaggccctggagcctacaggccagagcggagaggcagtgaaggagctttactcccagctcggcgagaagctggaacagctggatcaccggaagcccagcccggcacaggctgcggagacgccggccctggagctgcccctccccagcgtgcccgcccctgccccgctctgagggccctccagacctgctcgggtgctggggccatgccgagtcgcggccctgctcagccggaagaggctcccggacctggatgtacagggcagtctctcttcccggggctatggctgggcctgtcctgccgtcatggccccctgcttcctgctccttggagctggctcccggaccttgcccaccatccatgcagtggctcccagggcagagcctctccttgtactttggcagccatagaaagcgtgctcattttctgttttcctgtgttaggaaaaaaccacctgttttccaaggggagagggcggggcctgagggtgggggcggggcctcttcattggcccagcttggcgaaagcgaggcacactgcttactgccttggggttgtggagatggacccgtgacctcgtggaggccgtgtgggggcagcagcctggcctgtgccatggtgggtgtcctggggcctgtgcggagggagccacctcaccctgcagcccaggttgcaggtgtggccttgtttctccttgcccagcagtgctgccttcagcggccgtgacggggccagctggacacacggtgagattttctcgtatgtaaataaaaggcaatttggtaaacgtgaaaactagcaacaaaacaccaaaactcgaggcnnnnnnnnnnnnnnnnnnnnnnnnnnnnnnnnnnnnnnncatggtcatagctgtttcctgaccccacctttcttgtacaaagtgggannnnnnnnnnnnnnnnnnnnnnnnnnnnnnnnnnnnnnnnnnnnnnnnnnnnnnnnnnnnnnnnnnnnngaatcgggctggcataacccgggaaatttaaccccgcctaaaatgagcgggccnnnnnnnnnngtgatcccaaagggatctttctttgaaaatccttttttttcctgccaaggaaatctggctggcttgccaaaacc

SEQ ID NO: 350513 - DNA, 595 bp, Homo Sapiens
  misc_feature (380)..(380): n is a, c, g, or t
  misc_feature (566)..(566): n is a, c, g, or t
tgctaccagtttccttactgaatacagccatactcagcccctctcgcatccagcccgtcagggtcagggtcagggtcaggctccctcaagacgagcaccgcattgtctgccctcttttgcgtaggatttttctctcagacccaggggacattgccttggacttttctctacaaatgccctcagatgtaagaccagaaatgattctgcttgtggaactcgtggctttctgtcctattttccttttatgtgagccctgcaggttgcctttggcgcccacaccagttctgtcttcatgtcgctgcatcgtgaagccccatttgcctttagtccctgctttgtgtgtcttcacttccacagccagtgttgcccctcagggcatnactttgctggtgaacgggctgtagagtcttgagtatgttattggcctaagtgggcatgaggccccagcatccgactccatctgccagggctgcagggcacagcagcactggcataggacagggcacgctctgtctttccaacgtggcaccagccttttcttacatattttgcctgtttttaaaaantacgagggagaggggtgcagatgggataa

SEQ ID NO: 350514 - DNA, 2048 bp, Homo Sapiens
  misc_feature (400)..(400): n is a, c, g, or t
ccgggtctacacacagtgactttattactctatggatgctggtgaactgccctccccaaccagcttcacgggggcaggcatctctgtccatcccatgcctttgggtcacagggggcagcaagaccaagaagaccacagccaggccctgggttcagcttcagagccatcacccgctgcctcccccaacccccaatctcctgagggaggagaattcctagggacaagacccagacccctttccttcagcctctgcttcaccaagggggcctggcctgcgcccgagctcctcctggcctgcccctcaggggtcccaggtcctcacctctgctcttcaggcaggaaaagggcagggagagaggaatggaggagggagagggaggctgggacgcaggagaaagangaggggggaaggaggagacattaggagagaggccccttcacacagagagagaggccgagaaatcagggagaaggggggggctgaggtgagacatgagaaggaaagtgaaatttgggggaaaaggagattggaaaggaataggaaggcgttgggaagttcagacaagggaggcgcaggtggaggaggacgatgggagggaaggaggagaggaagaggccaagtggcgctgggagagagcaggtaccgcccgggggcagcaccaagggcgggagatggcgctggccgggaggcggctaacccaagggccagggcgggaaggggcctccaccatccgggcccggagctaccgccccctgcgcgctggccgctgcccggccgtggatgcgctggtggcgcagcacgtgctcgcggcgcccgaagcccttgccacactcccagcaggcaaagggccgcgctcccgagtgcgtcttgcggtggcgcaccaggtgctcgcgccagtagaaggtcttgccacactcgcagcacgcgtggggcttctcacgggcgggcagagggcgcagcgcgggcccggggctgccggggctgccggggtgcgtgtcgcggtggcgccgcaggtgctccttgcgccgaaaggccttcccgcactcagggcaggcgtgcggcttctcgcccgagtggctctgccggtggcgcagcaggtgagctggtttcagggacgttttgccgcactcggggcaggacgtggtgcccggggccgctaggaaggcgggcaggccaggcgccagcggggggctgctgggctcctgcttgtaggggcgcacagcctgggagtccccaggcgccggcccctcagccccaggggcggtgcctaagggaatcatcccactgtcctcctttccacctgtggccccagggccctgcgtcacatcctgaggcaccctcgttgctgacgacccatcgggggaggctgctggcccccagagctcctccagcagggccaccgcctcctccccgctctgcggctgccggctgcacacccaggcctgcgtgtcggcgggcagcgcgctcaggaactgttccagcaccagcagctccaacatctgctccttggtgtgcacctcgggccgcagccagtcccggcacagggcgcggagcagccccagcgcctcccgcgggcccggcgcgtcgcccaggtggaagcggcggaagcggtgccacggggagtccagcgccaggccctcggcctcctgcttcacgggcaccgccacctccatggggcctcccggaccgcagcgcctgctctgcctggcccagggggcaaagaggtctctgtgagggggcagcgctcactcgggtggtgaggaaagggtgtgcccttcctgggatcccagggagtcaagtccaggctgggtcctgccctgggcccctggcctctgtacctcagtcctgcagctcctcccgcagcctgtcctcactctctcaggcgaggccccccaagccccctcacctccccgcacatgcgcacaaagctcgccgggactccatgccccagcaggctttgcgccaaactcccccgtccccctcccccaatcccatactccgagccgctcgttcagcccaacaactccccatgaagccccggcctcac

SEQ ID NO: 350515 - DNA, 670 bp, Homo Sapiens
ctcctccccgctctgcggctgccggctgcacacccaggcctgcgtgtcggcgggcagcgcgctcaggaactgttccagcaccagcagctccaacatctgctccttggtgtgcacctcgggccgcagccagtcccggcacagggcgcggagcagccccagcgcctcccgcgggcccggcgcgtcgcccaggtggaagcggcggaagcggtgccacggggagtccagcgccaggccctcggcctcctgcttcacgggcaccgccacctccatggggcctcccggaccgcagcgcctgctctgcctggcccagggggcaaagaggtctctgtgagggggcagcgctcactcgggtggtgaggaaaaggtgtgcccttcctgggatcccagggagtcaagtccaggctgggtcctgccctgggcccctggcctctgtacctcagtcctgcagctcctcccgcagcctgtccctcactgccaaggcagagaagaattccttggaaattcttcccaactgtatctcgcaatgtctggcaggaatgaacgcggcttctcagaggttgatactgtagcttctgtctcgcccccacttccagccctttactctctggagagaaatctctcaagttgagattgaagctgccttttttgcaggaatccggaccggtccagc

SEQ ID NO: 350516 - DNA, 1593 bp, Homo Sapiens
  misc_feature (338)..(338): n is a, c, g, or t
  misc_feature (1492)..(1492): n is a, c, g, or t
  misc_feature (1506)..(1506): n is a, c, g, or t
  misc_feature (1573)..(1573): n is a, c, g, or t
cccaccaggccactgtttgtgtagagctggcatgttctccccatgtctgtgtgggttttcaccaggtaatccaggttccttccacaccccagagatatgcatgttggatgaatcggtgtgtctaaatgggcacagtctgagtgagtgctggtgggtgtgagtgcacctgtgatggaatggcgtcctgtccggggctggttcttgctttgtgccatgtgctgctgggatagtctccagcctcctgcaacccacatgtgattccatgttagtagagcttctgagccactcctctcagtttagaattttgtgtaggcagaacattgtctcaagatgcccantagtggggccggttgagagagtagagcctcctgacgcgaagcactgagaagagcacagcatcatttcttcagtctttctgccaggaatgcaaggcttgagtctgaggaaacatggactgggccaagttgagggtcatcctcatgaatgaaaggtctgtcctctttaagactgtcagggacgcagatccagagccagagaaagaacgaggaactgttccagactccggtcgctggacgtgctctcgcgtagctccgcctttcgtaagtccccccgcctcgcatgatggctgcggtgccgccgggcctggagccgtggaaccgtgtgagaatccctaaggcggggaaccgcagcgcagtgacagtgcagaaccccggcgcggcccttgacctttgcattgcagctgtaattaaagaatgccatctcgtcatactgtcgctgaagagccaaaccttagatgcagaaacagatgtgttatgtgcagtcctttacagcaatcacaacagaatgggccgccacaaaccccatttggccctcaaacaggttgagcaatgtttaaagcgtttgaaaaacatgaatttggagggctcaattcaagacctgtttgagttgttttcttccaatgaaaatcagcccttaactaccaaagtatgtgttgtccccagtcagccagtggtggagttggtgttgatgaaggttttgggagcctgcaagttgttgctccgcttgttggactgctgctgcaaaacttttcttttgactgtgaaacatctaggtttgcaagagttcattattttaaaccttgtgatggttgggctggtgagcaggttatgggttctctataaaggtgtcttaaaaaggttgatttgttatatgagcctttgtttggattgcttcaagaggtcgctaggattcaaccaatgccttacttcaaagattttacctttccttctgatatcactgaatttttaggacagccatattttgaagcctttaagaaaaaaatgcctatagctattgcagctaaaggaataaataaattgctaaataaactgtttttaataaatgagcagtcaccaagagccagtgaagaaaccttgcttggaatttcaaaaaaagctaaacaaatgaagatcaatgtacagaataatgtggntcttggacagccantaaagaataagagagtcttcaaagaagagtcatcagaatttgatgtgagggctttctgcaaccagcngaaacacaaagctactcagg

SEQ ID NO: 350517 - DNA, 1009 bp, Homo Sapiens
gctggaccggtccggaatttccgggatgtccccccgcctcgcatgatggctgcggtgccgccgggcctggagccgtggaaccgtgtgagaatccctaaggcggggaaccgcagcgcagtgacagtgcagaaccccggcgcggcccttggttgagcaatgtttaaagcgtttgaaaaacatgaatttggagggctcaattcaagacctgtttgagttgttttcttccaatgaaaatcagcccttaactaccaaagtatgtgttgtccccagtcagccagtggtggagttggtgttgatgaaggttttgggagcctgcaagttgttgctccgcttgttggactgctgctgcaaaacttttcttttgactgtgaaacatctaggtttgcaagagttcattattttaaaccttgtgatggttgggctggtgagcaggttatgggttctctataaaggtgtcttaaaaaggttgattttgttatatgagcctttgtttggattgcttcaagaggtcgctaggattcaaccaatgccttacttcaaagattttacctttccttctgatatcactgaatttttaggacagccatattttgaagcctttaagaaaaaaatgcctatagcttttgcagctaaaggaataaataaattgctaaataaactgtttttaataaatgagcagtcaccaagagccagtgaagaaaccttgcttggaatttcaaaaaaagctaaacaaatgaagatcaatgtacagaataatgtggatcttggacagccagtaaagaataagagagtcttcaaagaagagtcatcagaatttgatgtgagggctttctgcaaccagctgaaacacaaagctactcaggagaccagttttgattttaaatgttctcaatccagactaaagacaaccaagtattcttctcagaaagtgataggaactcctcatgccaaaagttttgtgcaaagattccgagaggctgagtcttcacacactttctgaagaatccag

SEQ ID NO: 350518 - DNA, 818 bp, Homo Sapiens
agcgggtgacagtaacagagactgcgcaggggacctgagcgggagagtcctggcgagggcgctggccgagaggtgctcggcttgtagcaggtcccgcactccagcctctcgctgccagggtttgctctctgcttgtcctgggctgaggtgtccatgacggagtcatccaaggaggaaaaaatctgttccgggtgagcccaggccgccccggatatgcgatggctgaggagcagacaccagggaccacactgaggttgggtttcagaccaagacactggattctcctagttaagataaagagctttgggtgcctgacagtgaaaatggtgtaatctgcgttaacagttcacagcttgaaggcatgacaattaaagaacacacatggacttgtggcacatggaaatgtgcgcacagaaaaaggaaatctataattcttttaaagtaggaaggcattcttccttgccaaaatgggtacattctgttcggttatcaagtttgaaaatctacaagaattaaagagactgtgtcactggggtcccatcatagcccttggtgttatagcaatatgttctaccatggccatgattgactctgtgttgtggtattggcccttacatacaactggaggaagtgtgaatttcatcatgttgataaattggactgtcatgattctttataattacttcaatgccatgtttgtcggtccgggctttgtcctctgggggtggaaaccggataccatgtatctccagtatgtaaagtctgccaagcatacaaagcaccacgttcaccatcactgccaaaagtgtcaccgatgt

SEQ ID NO: 350519 - DNA, 778 bp, Homo Sapiens
gcctgtatacacaagctcttcctgctccacagtctcctgagtcctcatactcaaaaggcacattgccgtagcgccgggaggaacctgtcttgggaactggagctgcagctgggtgatgatccgagggggtaggcggcaggcccggatcaactccaaaaagacccgcaggggagtccccacattccctctgggcatcagcactggtgggttcagctccggcagttgcttcaggtcagccagggtgaaggcttcattctctgccttccaactctgcagttccttccgggtcttgaagggaaaggagcccagacctgatgcctccgtaggtagccgaagtctgcggatgagacagcgacccggtagccaagtcccgtgagaatccagccaccggcggcccgagtacatgcgaataagcctctgagcttgagccaacccccttaccgagatgacgcagcagcaggtgcgggtctggattggagtagagtctcgagtggagagaggccggacatcggtggccgaagtctgagagagaagctggccctcagcggctgggtcggtaggaattagggcagagttaggagcggcctgcggaggggcccgctcaggccgatgccggtagtggaaacagaggaagccaccgccgcgctcttctcggaactggctaaaatagctccgtaaatgggccgagcgcaacacggaggggataccgctcactaccaggtaaactgtcgcctcctcctccgcctcgccgggcaccgccatcttggattgtcacatc

SEQ ID NO: 350520 - DNA, 1096 bp, Homo Sapiens
  misc_feature (218)..(218): n is a, c, g, or t
cttcacagagctccaccggctctgcttctcctctcccccagcagctgtttgtcctggacaaggcaagtcgcctgtatctagaggtgcccccgatggcatgtccgggggacgcggctctgtcctgtgctctctaagggacagccccatccccgagagctaccctcctgctcacccgccacacacacattcacacacttcttgaaagccccatgcccttnatttagacgttacaggaagggaagtggttttgggggtttatttttgacaatctgggtttgaaattagacagcgcgactcagggcatcagcttgctgggctcagctgagggtgggcctggggtctccctgaggtctgtttgcccagggctgggaaaggagagaaacttcctactgcactgctcccctgagtcctctgaccctgtgcccccgcaccctgctgtctcagggctatcctttccctgacgtcaggcttgaaaggaaacagggaagtgaagccatgctgagagacgctccataactccttcagggagaggcggggagggctcagagtacctgggagccggcaggacagtggtgggattgggggtcccaggtctccggggtgggggcagtcactcactatgagtgaggagtcggcgcgaggattggaggagggaaggatgttgtcagctggggagccagcgtctgcaccgcaaaatcccgaggtggagcgtgttcatgcagatctgggcaaacctccatcatcatttgcccggtgaccctggttatattccctctcatcactgtaggctcaggctgctcctgtggtgcctgtggctggagctgaacgctgtgtatcccccttcccggggagggcttgactggtctctgatggcacccccgtctttccccagcgccggcatcggcgtacaggcaccatcattgtcatcgacatgctcatggagaacatctccaccaaggggcctggactgtgacattgacatccagaaagaccatccagatggtgcgggcgcagcgcttcgggcatgttgcacgacggatgcgcagtacaagttcatctacgtggcattcgccaatcattgaaaccattaagaaaa

SEQ ID NO: 350521 - DNA, 1995 bp, Homo Sapiens
  misc_feature (1359)..(1359): n is a, c, g, or t
gcaggatcgaggaggaagtggctgattactgagcggttcttcctcacctggcttgggccactgtgcacagctgtgccgctggctcagccccgccccctgcggcctctgccgtggcttccccctccctacagagagatgctgtcccgtgggtggtttcaccgagacctcagtgggctggatgcagagaccctgctcaagggccgaggtgtccacggtagcttcctggctcggcccagtcgcaagaaccaggtgacttctcgctctccgtcagggtgggggatcaggtgacccatattcggatccagaactcaggggatttctatgacctgtatggaggggagaagtttgcgactctgacagagctggtggagtactacactcagcagcagggtgtcctgcaggaccgcgacggcaccatcatccacctcaagtacccgctgaactgctccgatcccactagtgagaggtggtaccatggccacatgtctggcgggcaggcagagacgctgctgcaggccaagggcgagccctggacgtttcttgtgcgtgagagcctcagccagcctggagacttcgtgctttctgtgctcagtgaccagcccaaggctggcccaggctccccgctcagggtcacccacatcaaggtcatgtgcgagggtggacgctacacagtgggtggtttggagaccttcgacagcctcacggacctggtggagcatttcaagaagacggggattgaggaggcctcaggcgcctttgtctacctgcggcagccgtactatgccacgagggtgaatgcggctgacattgagaaccgagtgttggaactgaacaagaagcaggagtccgaggatacagccaaggctggcttctgggaggagtttgagagtttgcagaagcaggaggtgaagaacttgcaccagcgtctggaagggcagcggccagagaacaagggcaagaaccgcttacaagaacattctcccctttgaccacagccgagtgatcctgcagggacctggacagtaacatcccccggtccgactacatcaatgccaactacatcaagaaccagctgctaggccctgatgagaacgctaagacctacatcgccagccagggctgtctggaggccacggtcaatgacttctggcagatggcgtggcaggagaacagccgtgtcatcgtcatgaccacccgagaggtggagaaaggccggaacaaatgcgtcccatactgggcccgaggtgggcatgcagcgtgcttatgggccctactctgtgaccaactgcggggagcatgacacaaccgaatacaaactccgtaccttacaggtctccccgctggacaatggagacctgnattcgggagatctggcattaccagtacctgagctggcccgaccatggggtccccagggagccctggggggtgtcctcagcttcctggaccagatcaaccagcgggcaggaaagtctgcctcacgcagggcccatcatcgtgcactgcagcgccggcatcggccgcacaggcaccatcattgtcatcgacatgctcatggagaacatctccaccaaggggcctggactgtgacattgacatccagaagaccatccagatggtgcgggcgcagcgctcgggcatggtgcagacggaggcgcagtacaagttcatctacgtggccatcgcccagttcattgaaacactaagaagaagctggaggtcctgcagtcgcagaagggccaggagtcggagtacggggacatcacctatccccagccatgaaaaatgcccatgccaaggcctcccgcacctcgtccaaaacaaggagggagtgtatgagaacctgcccctaggaacaggagggaggaagaagttgaaaaaccgcgggtcagcaaaacaggagaagagccaggggttcccttaaaaaggaattgaacggtgcctggccctcaggggggcatgccttcagccctgaacctgggggaaacattttcc

SEQ ID NO: 350522 - DNA, 2005 bp, Homo Sapiens
  misc_feature (709)..(831): n is a, c, g, or t
  misc_feature (1671)..(1671): n is a, c, g, or t
  misc_feature (1716)..(1716): n is a, c, g, or t
  misc_feature (1822)..(1822): n is a, c, g, or t
  misc_feature (1824)..(1824): n is a, c, g, or t
  misc_feature (1847)..(1847): n is a, c, g, or t
  misc_feature (1888)..(1888): n is a, c, g, or t
  misc_feature (1890)..(1890): n is a, c, g, or t
gggagcgcgactcagggcatcagcttgctgggctcagctgagggtgggcctggggtctccctgagcgccggcatcggccgcacaggcaccatcattgtcatcgacatgctcatggagaacatctccaccaagggcctggactgtgacattgacatccagaagaccatccagatggtgcgggcgcagcgctcgggcatggtgcagacggaggcgcagtacaagttcatctacgtggccatcgcccagttcattgaaaccactaagaagaagctggaggtcctgcagtcgcagaagggccaggagtcggagtacgggaacatcacctatcccccagccatgaagaatgcccatgccaaggcctcccgcacctcgtccaaacacaaggaggatgtgtatgagaacctgcacactaagaacaagagggaggagaaagtgaagaagcagcggtcagcagacaaggagaagagcaagggttccctcaagaggaagtgagcggtgctgtcctcaggtggccatgcctcagccctgaccctgtggaagcatttcgcgatggacagactcacaacctgaacctaggagtgccccattcttttgtaatttaaatggctgcatcccccccacctctccctgaccctgtatatagcccagccaggccccaggcagggccaacccttctcctcttgtaaataaagccctgggatcactgtgnnnnnnnnnnnnnnnnnnnnnnnnnnnnnnnnnnnnnnnnnnnnnnnnnnnnnnnnnnnnnnnnnnnnnnnnnnnnnnnnnnnnnnnnnnnnnnnnnnnnnnnnnnnnnnnnnnnnnnnnnnngggggggggggccgcttaaagcagctgggaaaggagggaaacctaggacccgcttttcatttcacggggaggcaataaactgcgaagtttagaatttcgggcggggggctcggttctctcgaagcgacatagcgcggaaaagactatgggccacatcttacactgcttaaacgaggaactactactttcgttcacggcgtatccccgcgagcgcaacaccaatacccctactcgccactctggcggtataaaaaatacaaaaaaccactcaggctgaacgagcgggtaacaaggaactccaaccatggggagggtccgtgtgtcctattaaggataatgaaggtatattgctcaaaactaaaccagggaacccaaaagggtaaccccataggggaggccacccggaggaaccgcccaccccatacccgagtgtgtacaggtgggttttacaaaaaagaagaaccttccccaaggcgcctctggggtattgaagttactttccggcggccgttcccctccaatgatagcgcctgctccgggccgcagattttacaaactccctttggaaaaatcgccgatccacttttttatccaaccctattgggtgcaatgtggtgtcgttttcccttgcataaaacacgggccagaaaaaacacacgctcgatccccgcgttttaagggtgtggtgaagagacagaatgttaaccacacaccagagtagcaccgccgtgtgtcggacgtgtctctccgcttgctataacactacaccacaatctcacagtgtttgcctccccaactcgggtcagattcgcctcacgcgacatttgccagcgaaacagngtgagaccttaacgcactcgcgcatacgcactattgtcacacatncaccagcaccacagatatcacggcgagtctatacatcagctaccgccgcccaccctttatctacggaggtgatgatccggggccgacaagtaacccccctcgacananattctgtacgccgcatatttttntaccgttagagggagacggatgccgcgcacacctcaccctnanacactaatagatcacagacgtaaccccccgcccttcatcgcccgaatacgcgtttgcggcgcacagtgctactgtccggaccgataacgcggattcacgccccgaccaactagtt

SEQ ID NO: 350523 - DNA, 890 bp, Homo Sapiens
  misc_feature (136)..(136): n is a, c, g, or t
  misc_feature (138)..(139): n is a, c, g, or t
  misc_feature (143)..(144): n is a, c, g, or t
ggggccattggcctggcaggcaggatcgaggaggaagtggctgattactgagcggttcttcctcacctggcttgggccactgtgcacagctgtgccgctggctcagccccgccccctgcggccctccgccgtggcntnntccnncccttcccctacagagagatgctgtcccgtgggtggtttcaccgagacctcagtgggctggatgcagagaccctgctcaagggccgaggtgtccacggtagcttcctggctcggcccagtcgcaagaaccagggtgacttctcgctctccgtcaggaccgcgacggcaccatcatccacctcaagtacccgctgaactgctccgatcccactagtgagaggtggtaccatggccacatgtctggcgggcaggcagagacgctgctgcaggccaagggcgagccctggacgtttcttgtgcgtgagagcctcagccagcctggagacttcgtgctttctgtgctcagtgaaccagcccaaagctggcccaggctccccgctcagggtcacccacatcaaggtcatgtgcgagggtggacgccacacaatggggtggtttgggagaccttccaaaggcctccacgaacctggtgggaaccatttcaagaaaaacgggggaattgaggaaggccctcaggccgccctttgttctaacctgccgggcaaacccttactatgcccaccgaaggggttaaatggccggccttaaacattgaaaaaccccaagtggtttggaaacctgcaaccaaagaaaggccggggagttcccgaaaggaataacaggtcccaagggcctggggcctttcctcggggaagggaaattttttttagacaagtattttgccgcgcaaaaatccccgggggaaa

SEQ ID NO: 350524 - DNA, 1395 bp, Homo Sapiens
  misc_feature (1253)..(1253): n is a, c, g, or t
agagatgggtggagggactggggaaaggctgtttactccctcctgtctagtcggcttggtccctttagggctccggatatctttggtgacttgtccactccagtgtggcatcatgtggcagctgctcctcccaactgctctgctacttctagtttcagctggcatgcggactgaagatctcccaaaggctgtggtgttcctggagcctcaatggtacagcgtgcttgagaaggacagtgtgactctgaagtgccagggagcctactcccctgaggacaattccacacagtggtttcacaatgagagcctcatctcaagccaggcctcgagctacttcattgacgctgccacagtcaacgacagtggagagtacaggtgccagacaaacctctccaccctcagtgacccggtgcagctagaagtccatatcggctggctgttgctccaggcccctcggtgggtgttcaaggaggaagaccctattcacctgaggtgtcacagctggaagaacactgctctgcataaggtcacatatttacagaatggcaaagacaggaagtattttcatcataattctgacttccacattccaaaagccacactcaaagatcagcggctcctacttctgcagggggcttgttgggagtaaaaatgtgtcttcagagactgtgaacatcaccatcactcaaggtttggcagtgtcaaccatctcatcattctttccacctgggtaccaagtctctttctgcttggtgatggtactcctttttgcagtggacacaggactatatttctctgtgaagacaaacattcgaagctcaacaagagactggaaggaccataaatttaaatggagaaaggaccctcaagacaaatgacccccatcccatgggggtaataagagcagtagcagcagcatctctgaacatttctctggatttgcaaccccatcatcctcaggcctctctacaagcagcaggaaacatagaactcagagccagatcccttatccaactctcgacttttccttggtctccagtggaagggaaaagcccatgatcttcaagcagggaagccccagtgagtagctgcattcctagaaattgaagtttcagagctacacaaacactttttctgtcccaaccgttccctcacagcaaagcaacaatacaggctagggatggtaatcctttaaacatacaaaaattgctcgtgttataaattacccagtttagaggggaaaaaaagaaaantaattattcctaaacaaatggataagtagaattaatggttgaggcaggaccctacagagtgtgggaactgctggggatctagagaattcagtgggaccaatgaagcatggctgagaaatagcaggtatccagaccatgagcg

SEQ ID NO: 350525 - DNA, 451 bp, Homo Sapiens
tggtacagcgtgcttgagaaggacagtgtgactctgaagtgccagggagcctactcccctgaggacaattccacacagtggtttcacaatgagagcctcatctcaagccaggcctcgagctacttcattgacgctgccacagtcaacgacagtggagagtacaggtgccagacaaacctctccaccctcagtgacccggtgcagctagaagtccatatcggtgagttgatgaaggggaagaggaaaatcaccaataaagggtgaaacaaagggtcctgaaatacttggtaagagccagagatgatattcttagagataaaagctaagatgagatgactgctagtggtcccactgaatggtatcagagttgtagtcctagctctaagtaggtcttgggcaaaatgtcaaagcctgtcagaccagtagatataggactgctgcatcgcacaat

SEQ ID NO: 350526 - DNA, 583 bp, Homo Sapiens
cgtctgactacctgctattccagccatctttcattggtcccactgaattccctatatacggaggagttcccacactctgtatagtcctgtcctcaaccattaattctacttatccatttatttaggaataattgtttatttttcccctctaaactgggtaatttataacacgagcaatttttgtatgtttaaaggattaccatccctagcctggggggttgctttactgtgagagaacggtagggacagaaaaagtgttcgtgtagatctgaaacttcaatttctaggaatgcagctactcaatggggattccctgcttgaagatcatgggcttttcccttccactggagaaaaaggaaaaatcccgagtaggataaggatacaggctaagagttctatgtttcatgctagctcgtagagaggcctgagaatgaaggagtagcaaataaagagaaaagataaaagaagaagctgctactgctgcgttaatacagcatgaggatagggggtcatttagtctccgaccgtcctttgtcaattaaaattaatggtcttagcagtctcttgtgagcttcgaaagttc

SEQ ID NO: 350527 - DNA, 863 bp, Homo Sapiens
gttggattgtgtcatgagatcctccgttggtatgacaggaatggagaggtatcagcaatggctttgatgacttcacagcctgacaggatgctgaggtctgctcctcccgcttcctcccatgaactgcgatggcagcaatgccagtcctcgtctatccgcttcacaaggctcagggtatctttctagcgatggcaggatgcgaatcttgcaggtcacaggtctgcgtgtccctttaacaagagtgctgaggatcttctcaatcttgtcagggtctgacagcagggcagctcccattcctcccttggtggaatattgttttggacagcccatgttgacatcaataccagccacatcattttctacaagcctggccacagcaagggctcgctctgcgtctgaagtccccatctggaagaccaccctgttctgctctctttcacaggtgcggaagacaactcgatcatcaggggcgacaaagtccactgtgctgagcacctcattaacaactctcttgcactgaatcatcttgaggtcgatcagctcctcacagtaaacaatgtccgctccataatccagggccagcagcctcattggaagagtccctacccgaaccattggggccaggattagcttattatggtaacacagagagaggctattcaaaatcatttcctcctctgttacagcctattattttgttctgatacttcaggattactttgatatatgtgttctggctttgtacagagtaattctttgtttgatatctcgcagctgaactcttaaaaagaacctcgcttcttcctcacggtgctccagctccacacaccgtactgagcctcgccagccaccgtacccccgct

SEQ ID NO: 350528 - DNA, 802 bp, Homo Sapiens
gccaccatcacggaagaggctgccgtggcttgtcgaagtcctctatgtccgaatactgttggatgtggtcatgagatcctccgttggctatgacaggaatggagagggtatcagcaatggctttgatgacttcacagctgacaggatgctgagtcgctcctcccgcttcctcccaagaactgcgatggcagcaatgccagtcctctctatccgcttcacaaggctcagggtatcgtctagcgatggcaggatgcgaatctgtgcaggtcacagggtctgcgtgtcccgttaacaagagtgctgaggatctgcgcaatctggtcagggtctgacaagcaggacagctcccagtgcctcccttggtggaatattgttttggacagcccatgttgacatcaataccagccacatcattgttctacaagcctggccacagcaagggctcgctctgcgtccgaagtccccatctggaagaccaccctgttctgctctctttcacaggtgcggaagacaactcgatcatcaggggcgacaaagtccactgtgctgagcacctcattaacaactctcttgcactgaatcatcttgaggtcgatcagctcctcacagtaaacaatgtccgctccataatccagggccagcagcctcattggaagagtccctacccgaaccattggggccacggattagcttattatggtaacacagagagaggctacttcaaaatcatttcctcctctgttacagcctcgcagctgaactcttaaaaagaacctcgcttcttcctcacgtgctccagctc

SEQ ID NO: 350529 - DNA, 915 bp, Homo Sapiens
cggtccggaattcccgggatcttagttccgggcgcgctgcgaccgttggggctttgttcgcgggggtcacagctctcatggctgcagctagcgtgaccccccctggctccctggagttgctacagcccggcttctccaagaccctcctggggaccaagctggaagccaagtacctgtgctccgcctgcagaaacgtcctccgcaggcccttccaggcgcagtgtggccaccggtactgctccttctgcctggccagcatcctcagctctgggcctcagaactgtgctgcctgtgttcacgagggcatatatgaagaaggcatttctattttagaaagcagttcggccttcccagataatgctgcccgcagggaggtggagagcctgccggccgtctgtcccagtgatggatgcacctggaaggggaccctgaaagaatacgagagctgccacgaaggccgctgcccgctcatgctgaccgaatgtcccgcgtgcaaaggcctggtccgccttggtgaaaaggagcgccacctggagcacgagtgcccggagagaagcctgagctgccggcattgccgggcaccctgctgcggagcagacgtgaaggcgcacccacaaggtctgccccaagttccccttaacttgtgacggctgcggcaagaagaagatcccccgggagaagtttcaggaccacgtcaagacttgtggcaagtgtcgagtcccttgcagattccacgccatcggctgcctcgagacggtagagggtgagaaacgcaagagcaccaagtgcaggggctgcgggaagacctgggcaggctaatggaactcggggctgaaggcaaagcccctttttggggaaaccaaagcccacggggcggtcacaagattcctgacaaagtggccaaaagcactggac

SEQ ID NO: 350530 - DNA, 970 bp, Homo Sapiens
cccggggctgagcgctcggctgcagcggcgcggaggccgtctccctggtctgccgcggtccccgcccgtcccgccgccggctgccatggcaggagccggaggcggcggctgccccgcgggcggcaacgacttccagtggtgcttctcgcaggtcaagggggccatcgacgaggacgtggccgaagcggacatcatttccaccgttgagtttaattactctggagatcttcttgcaacaggagacaagggcggcagagttgttatttttcagcgtgaacaagagaataaaagccgccctcattctaggggagaatataatgtttacagcacctttcaaagtcatgaaccggagtttgactatttgaaaagtctagaaattgaggaaaaaattaataaaattaggtggttaccacaacagaatgctgctcattttctactgtctacaaatgataaaactataaaattatggaaaataagtgaacgggataaaagagcagaaggttataacctgaaagacgaagatggaagacttcgagacccatttaggatcacggcgctacgggtcccaatattgaagcccatggatcttatggtagaagcgagtccacggcgaatttttgcaaatgctcacacatatcatataaaattccatttcagtaaatagtgatcatgaaacatatctttctgcagatgacctgagaattaatttatggcacttagaaatcacagatagaagctttaacatcgtggacatcaagcctgctaacatggaggagctgaccgaagtcatcactgcagccgagttccacccgcaccagtgcaacgtgttcgtctacagcagtagcaaagggaccatccgcctgtgtgacatgcgctcctcggccctgtgcgacagacactccaagttttttgaagagcctgaagatcccagcagtaggtccttcttctcagaaataatttcatccatatc

SEQ ID NO: 350531 - DNA, 815 bp, Homo Sapiens
  misc_feature (627)..(627): n is a, c, g, or t
  misc_feature (726)..(726): n is a, c, g, or t
  misc_feature (781)..(781): n is a, c, g, or t
  misc_feature (786)..(786): n is a, c, g, or t
  misc_feature (793)..(793): n is a, c, g, or t
tggaagacttcgagacccatttaggatcacggcgctacggatgacctgagaattaatttatggcacttagaaatcacagatagaagctttaacatcgtggacatcaagcctgctaacatggaggagctgaccgaagtcatcactgcagccgagttccacccgcaccagtgcaacgtgttcgtctacagcagtagcaaagggaccatccgcctgtgtgacatgcgctcctcggccctgtgcgacagacactccaagttttttgaagagcctgaagatcccagcagtaggtccttcttctcagaaataatttcatccatatccgatgtaaaattcagtcatagtgggcggtacatgatgaccagagactacctgtcggtgaaggtgtgggacctcaacatggagagcaggccggtggagacccaccaggtccacgagtacctgcgcagcaagctctgctctctctatgagaacgactgcatctttgacaagtttgagtgttgctggaacggttcggatagcgccatcatgaccgggtcctataacaacttcttcaggatgtttgatagagacacgcggagggatgtgaccctgggaggcctcgagagagagcagcaaaccgcgcgccancttcaaaccccggaaggtgtgtacggggggtaagcggaggaaagacgagatcagtgtggacagtctggacttcaacaagaagatcctgcacacagcctnggcaccccgttggacaatgttatttgccgtggcttgccaccattaactttttacnttttnccggggncaaattcaatttggagacgcga

SEQ ID NO: 350532 - DNA, 919 bp, Homo Sapiens
agcggaggcgcaagatggcggcagccgcgaactccggctctagcctcccgctgttcgactgcccaacctgggcaggtaagccccctcccggtttacatctggatgtagtcaaaggagacaaactaattgagaaactgattattgatgagaagaagtattacttatttgggagaaaccctgatttgtgtgactttaccattgaccaccagtcttgctctcgggtccatgctgcacttgtctaccacaagcatctgaagagagttttcctgatagatctcaacagtacacacggcactttcttgggtcacattcggttggaacctcacaagcctcagcaaattcccatcgattccacggtctcatttggcgcatccacaagggcatacactctgcgcgagaagcctcagacattgccatcggctgtgaaaggagatgagaagatgggtggagaggatgatgaactcaagggcttactggggcttccagaggaggaaactgagcttgataacctgacagagttcaacactgcccacaacaagcggatttctacccttaccattgaggagggaaatctggacattcaaagaccaaagaggaagaggaagaactcacgggtgacattcagtgaggatgatgagatcatcaacccagaggatgtggatccctcagttggtcgattcaggaacatggtgcaaacttgcagtggtcccagtcaagaagaagcgtgtggaagggccctggctccctgggcctggaggaatcagggagcaggcgcatgcaggaactgttgccttcagcggacggactctacgggggcctgcccccaaacacagtgaagcaaggtcccagcaacatggatccatgggacagcactcatcggtgggtttgccatgccattaccaaaacttgccctgatgtg

SEQ ID NO: 350533 - DNA, 1259 bp, Homo Sapiens
gtagcgaggcctgggtggcgaattcggcacgaggatccctcgtgcggcacttgtctgtctgccacagagaatacgaggggcaggtaagccccctcccggtttacatctggatgtagtcaaaggagacaaactaattgagaaactgattattgatgagaagaagtattacttatttgggagaaaccctgatttgtgtgactttaccattgaccaccagtcttgctctcgggtccatgctgcacttgtctaccacaagcatctgaagagagttttcctgatagatctcaacagtacacacggcactttcttgggtcacattcggttggaacctcacaagcctcagcaaattcccatcgattccacggtctcatttggcgcatccacaagggcatacactctgcgcgagaagcctcagacattgccatcggctgtgaaaaggagatgagaagatgggtggagaggatgatgaactcaagggcttactggggcttccagaggaggaaactgagcttgataacctgacagagttcaacactgcccacaacaagcggatttctacccttaccattgaggagggaaatctggacattcaaagaccaaagaggaagaggaagaactcacgggtgacattcagtgaggatgatgagatcatcaacccagaggatgtggatccctcagttggtcgattcaggaacatggtgcaaactgcagtggtcccagtcaagaagaagcgtgtggagggccctggctccctggggcctggaagaatcagggagcaggcgcatgcagaactttgccttcagcggaggactctacgggggcctgccccccacacacagtgaagcaggctcccagccacatggcatccatgggacagcactcatcggtggcttgcccatgccataccccaaaccttgcccctgatgtggaacttgactcctggttgtgccgtcagcagtgaacatgaatccctgcaccaaaccctgcagtctataaccctgaaagctgtaaaatgaacccaagaagaagaaatatgcaaaagaggcttggccaggcaagaagcccacaccttccttgctgatttgatatttttggtcatggagaagggtgggattgggtgggaatggggtggaagggtgatggggagctaatgaactagggagaaaaactttccatgtttgcgagatcgtctatcagaattgtctcctggcatcctaaaccatgtaatatgacacttgggggtggggttgaaataggca

SEQ ID NO: 350534 - DNA, 602 bp, Homo Sapiens
  misc_feature (139)..(139): n is a, c, g, or t
  misc_feature (146)..(146): n is a, c, g, or t
aagctggtgcccccattgtacaggcgaggtccagagggatggcatctgcccaccccaccccttgccctcttgttgcctgcactcatttcccagggaccctcctaggataggaatgccctccttcctggccccctcccgncatcctnccagccacccacataatcaccatctcagcccaactctggtggccctctaggtctcccatgcattcttcctgccctagagtagccagctcacccaaggcctttatccccagcccaggagaagggtcagggagggaaggggctgcaccagccctgagacctcaaagacttgggagaaaagccaaaactcctcatgcccaggcccacatgtctgaccaccccagcccaccccgccaccaaggtaaaagcacaacaggagacccccttattaatgggtgaaatgattggggttgtttttttagtcacacagccccatcctcacccctttgccttgctgtctgtctccaccccagcctctgttccccatttgcctctctttcacctccaagcccccaaatgtaacctctagttgcggacgcggttgttctatcaataaagctgcagtgttctagcaaaaaa

SEQ ID NO: 350535 - DNA, 1314 bp, Homo Sapiens
cacacatcacacacattctcagacacacacgcacagcactgactcgatagagaggcgggtgcttcccggcctttggaagcatggaggactccgctgaaccctgaacccaacctcagccagtggctctgcagggactctccagagcaaagaccctgggaatactccccagcccctcaagctgcccagcgagaaaaaacacaaggattctgcacgccccatccgtgaccctcccggtctttggggaaaccaagaggatgagcacatgagaacatgctgaccttcactcctagcccaagctcttgtgaagtcacaggggagaggaggggaaacagggtctcttctgtctgggggcctgggagaagggcagcagctgcagacactgtggtgggagggtggccacctctgtgtggcacccaggcctgtcatggggcagaagggtctgcagcctgggatgagaggccagaatttggagccgagggcaggatcccagcaacatctataacatccccaccggcaccctggacacaggactgttagccaaactccctgcagttgtttggcaggagacctcaggggcagtgacaagcggtgtgacacccccagggctgtagtacttggctctcccaagactggctctactcaaactagctgtgtgaccttgggccactccccttccgcactctgggcttcagcttcttcatctgcacgaggggatcaaacttttgaggtccatcctcactctgacagcctgagccaggggctttcccagagcacagggaaaaggagaatgaatgagaaagaggtgtcaggcccatctctgagaggtaggggtggaaggagcattccaggaggagggggcttggtcttcaggcttcactcagcaccctaggagcctgtctgtgctcccaagggcaggatagcccagctgagacttccataagctgctatacagcacctggcccccggagtccttttcaccaacctgaaggggacaagggatggaagggccccagcaccctgagggctgaccctgaacaccccgttttaaggccacaaaatgcctcagtcaccctgacccagagggcgaggctgccactggggagatgtgctggatccagccagcctggtctcccctggcgggggtcactcatgggccacccatcaacacacagacactgacacaccatggcgcacaaagacacagcatgagcaacactgatacagagatgctggctcacaggcacacacagacacagacactgacaagtcaccaggtgatacacaaagacactcgtttcccctcgtgccgaaaaa

SEQ ID NO: 350536 - DNA, 453 bp, Homo Sapiens
  misc_feature (298)..(298): n is a, c, g, or t
  misc_feature (391)..(391): n is a, c, g, or t
  misc_feature (426)..(426): n is a, c, g, or t
ggaatgagtgtctttgtgtatcacctggtgacttgtcagtgtctgtgtctgtgtgtgcctgtgagccagcatctctgtatcagtgttgctcatgctgtgtctttgtgcgccatggtgtgtcagtgtctgtgtgttgatgggtggcccatgagtgacccccgccaggaggatccaggctggctggatccagcacatctccccagtggcagcctcgccctctgggtcagggtgactgaggcattttgtggccttaaaacggggtgttcagggtcagccctcagggtggctggggcccttnccatcccttctccccttcaggttggtgaaaaggactccggggggccagggtgctgtatagcagctttatggaagtcttcaagcttgggctatncctgccctttgggaagcacaagacaagggttcctnagggttgctgagtgaaagcctgaaaga

SEQ ID NO: 350537 - DNA, 848 bp, Homo Sapiens
  misc_feature (626)..(626): n is a, c, g, or t
  misc_feature (757)..(757): n is a, c, g, or t
  misc_feature (769)..(769): n is a, c, g, or t
  misc_feature (801)..(801): n is a, c, g, or t
  misc_feature (823)..(823): n is a, c, g, or t
  misc_feature (829)..(829): n is a, c, g, or t
acctcatggggaatgtctgggaagctggggacattgctatgcaaatgtgtgaatcttagtcatggatttgatttttagttatccccatacccccataggcaaggccttcccccagagttcctgctttggatccaaagcctgagaataggccattatggaccattggctccctaaatccctccttggcctcttggactgagcccctcagcctttcttcttacccttcagaaaggagagttctctttagatatgttcagggggatccttccatggctggaggtcaccttgactgggggcttggcttctccaaacctgaaacacagtagaagatagagatgtttatgatgcaaaaacctgctctgaggtcagaaagtgctagttttccaaatctctcccattgctgctggctatctggggaaagaagagaaaagcccattccagaggcagaagggaagctcccagccgagggtaaaagttgagacctgtatgcatgtatctctgtatatgtgtatgtaatcaccctcatcaccatccctgagaaaacattttcttttcaagtcagagcacgcctgaaagggtttgtggagagcccagctcaccagggactctggttgccgtagcaactntccagactgttctctctatcttctgctttgggcatcaagggagaccaggggactacatcttcccagcttctcaaatgggagcacctcccacatcgtggcttaggggctgggagtgccagggcacggatgtngggacttttggnaaatgtggaggaagcagggcctcaaaaggttnctgtcttggactttttcttccnagtttncccacccagtcaattgaag

SEQ ID NO: 350538 - DNA, 2652 bp, Homo Sapiens
  misc_feature (2606)..(2606): n is a, c, g, or t
ctgaggatgaaggtaacagtcctgtgagcactgaggctgggctgggaccaacacctgagccatggctccagcactctgattcctggcccagccatgctgctgagggtgcacagcccaggcctaccatcgcccccacccttggtggcagaaccgagcactacccagcaaggtgtaattactcaagcctccaggatggcaatccagttccgttcgctcttccccttggcattgcctgggatgctggcgctcctcggctggtggtggtttttctctcgtaaaaaaggccatgtcagcagccatgatgagcagcaggtggaggctggtgctgtgcagctgagggctgaccctgccatcaaggaacctctccccgtggaagacgtctgtcccaaagtagtgtccacaccccccagtgtcacagagcctccagaaaaggaactgtccaccgtgagcaagctgcctgcagagcccccagcattgctccagacacacccaccttgccgaagatcagagtcctcgggcattcttcctaacaccacagacatgagattgcgaccaggaacacgcagagacgacagtacaaagctggagctagccctgacaggtggtgaagccaaatcgattcctctagagtgccccctttcatccccaaagggtgtactattctccagcaaatcagctgaggtgtgtaagcaagattcccccttcagcagggtgccaaggaaggtccagccaggctaccccgtagtccccgcagagaagcgtagctctggggagagggcaagagagacaggtggggccgaagggactggtgatgccgtgttgggggaaaaggtgcttgaagaagctctgttgtctcgggagcatgtcttggaattggagaacagcaagggccccagcctggcctctttagagggggaagaagataaggggaagagcagctcatcccaggtggtggggccagtgcaggaggaagagtatgtagcagagaagttgccaagtaggttcatcgagtcggctcacacagagctggcaaaggacgatgcggcgccagcacccccagtcgcagacgccaaagcccaggatagaggtgtcgagggagaactgggcaatgaggagagcttggatagaaatgaggagggcttggatagaaatgaggagggcttggatagaaatgaggagagcttggatagaaatgaggagggcttggatagaaatgaggagattaagcgggctgccttccagataatctcccaagtgatctcagaagcaaccgaacaggtgctggccaccacggttggcaaggttgcaggtcgtgtgtgtcaggccagtcagctccaagggcagaaggaagagagctgtgtcccagttcaccagaaaactgtcttgggcccagacactgcggagctgccacagcagaggcagctgttgccccgccggatgctggcctccccttgccaggcctaccagcagagggctcaccaccaccaaagacctacgtgagctgcctgaagagccttctgtccagccccaccaaggacagtaagccaaatatctctgcacaccacatctccctggcctcctgcctggcactgaccacccccagtgaagagttgccggaccgggcaggcatcctggtggaagatgccacctgtgtcacctgcatgtcagacagcagccaaagtgtccctttggtggcttctccaggacactgctcagattctttcagcacttcagggcttgaagactcttgcacagagaccagctcgagccccagggacaaggccatcaccccgccactgccagaaagtactgtgcccttcagcaatggggtgctgaagggggagttgtcagacttgggggctgaggatggatggaccatggatgcggaagcagatcattcaggaggttctgacaggaacagcatggattccgtggatagctgttgcagtctcaagaagactgagagcttccaaaatgcccaggcaggctccaaccctaagaaggtcgacctcatcatctgggagatcgaggtgccaaagcacttagtcggtcggctaattggcaagcaggggcgctatgtgagttttctgaagcaaacatctggtgccaagatctacatttcaaccctgccttacacccagagcgtccagatctgccacatagaaggctctcaacatcatgtagacaaagcgctgaacttgattgggaagaagttcaaagagctgaacctcaccaatatctacgctcccccattgccttcactggcactgccttctctgccgatgacatcctggctcatgctgcctgatggcatcaccgtggaggtcattgtggtcaaccaggtcaatgccgggcacctgttcgtgcagcagcacacacaccctaccttccacgcgctgcgcagcctcgaccagcagatgtacctctgttactctcagcctggaatccccaccttgcccaccccagtggaaaataacggtcatctgtgccgcccctgggtgcggacggggcctgggtggcgagcccaagtggttgcctcctacggagagaccaacgaagtggagattcgatacgtggactacggcgggatataaagagggttgaanagtagaaccgtgctccgggcaaaatcaaggtctgaactttggtcac

SEQ ID NO: 350539 - DNA, 905 bp, Homo Sapiens
ggccctaggctaaagcccccctcggctgtattaaggtagcgaggcctgggtggcgaattcggcacgaggcaccgtggaggtcattgtggtcaaccaggtcaatgccgggcacctgttcgtgcagcagcacacacaccctaccttccacgcgctgcgcagcctcgaccagcagatgtacctctgttactctcagcctggaatccccaccttgcccaccccagtggaaataacggtcatctgtgccgcccctggtgcggacggggcctggtggcgagcccaagtggttgcctcctacgaggagaccaacgaagtggagattcgatacgtggactacggcggatataagagggtgaaagtagacgtgctccggcaaatcaggtctgactttgtcaccctgccgtttcagggagcagaagtccttctggacagtgtgatgcccctgtcagacgatgaccagttttcaccggaagcagatgccgccatgagcgagatgacggggaatacagcactgcttgctcaggtgacaagttacagtccaactggtcttcctctgattcagctgtggagtgtggttggagatgaagtggtgttgataaaccggtccctggtggagcgaggccttgcccagtgggtagacagctactacacaagcctttgacccccatgctgcttcctgagagtctttttttgcactgttgaaattgggcttggcactcaagtcaaagatgaacatcggaataacaaacattgtcctctccagaaagtcctttctttatccatactgtagtcctattgagaagacatttcgtctctgagaaaaaaggatggaactatgggttctcttcgcaaagccaaaggatagtgtttaacaagccagctggcttatcctggttctcagctgttta

SEQ ID NO: 350540 - DNA, 859 bp, Homo Sapiens
agcacaagccacaaatatcggctatggttgaggcctgggttgttaaattctggcacgaggcttgtgttccacccgcctgggctagcacgtgggggagctgcgtgaatgcgctggctgcttgcgggcctgggcctgctggtggcacatgcctgggggcctgtgcggctggctgcgcggactccgcatcccgcaccccgatggtagccgaggagctggtgtaattacttcaagcctccaggatggcaatccagttccgttcgctcttccccttgtgcattgcctgggatgcttggcgctcctcggctggtggtggtttttctctcgtaaaaaaggccatgtcagtcagccatgatgatgcagcagtgtggatggctggtgctgtgcagctgagggctgaccctgccatcaatggaacctctccccgtggaagacgtctgtcccaaagtagtgtccatcaccccccatgtgtcacagagcctccatgaaaaggaactgtccaccgtgagcaagctgccttgcatgagcccccagcattgctccagacacacccaacttgccgaaagatcagagtcctcgggcattcttcctaacaccacagacatggagattgcgaccaggaacactgcagagatgacagtacaaagctggagctagccctgacagggttggtgaagccaaatcgattcctctagagtgccccctttcatccccaaagggtgtactattctccagacaaatcagctgaggttgtgtaagcaagattcccccttcagcatggtggccaggaggtccagtcaagctacccgtagtccgaaagagcgactctgggagaggaaaaacgttggcaagatgtgacgtt

SEQ ID NO: 350541 - DNA, 492 bp, Homo Sapiens
aaaaggcgcagccactgcctccggagccggggcgaaccaattcctccgttgcggcccccacctgcagtatggagtcgtctcgggggcggcccgggcccgagacggaccttctggctgtagcggaacatcaggccctagtctttggcggcgggccgggccgaacgtcctctgagccgcccgcaggcctccgggtgtccggggaggaagagaccgagaacgttgggggcgcgaaccgccaccccaggacgtccccgaagacgtcaagctgcggcgtcgtccaccggccggaacgggaggctctggagaacgagcccggccctcaagggacgctgtctggggccgggagccgcaggggggcgccgggtgcagagcacgaaccttccctgtcctcccggcacaagaacccggcgccgcccgagggcaagccctcctccgggagggactgccgtcgagggggaccaggcggcgggatggatgttgagcagcaggagg

SEQ ID NO: 350542 - DNA, 2313 bp, Homo Sapiens
gcggagaggcagagagcccgaaggaccagacgcccaggtcgcccgcatcccgctgccgcagaagagagacagcgcgccccggccctgctccccaggcttcgcccgggcgccctcaactctgtccccagagactgagcacctgtcctccgcctcggcctctgctgagagccctctcctctggagcacacaccacccctgcagcccaagaagagtcccagccccacgccggctaccaccatggcggagaccaacaacgaatgtagcatcaaggtgctctgccgattccggcccctgaaccaggctgagattctgcggggagacaagttcatccccattttccaaggggacgacagcgtcgtaattggggggaagccatatgtttttgaccgtgtattccccccaaacacgactcaagagcaagtttatcatgcatgtgccatgcagattgtcaaagatgtccttgctggctacaatggcaccatttttgcttatggacagacatcctcagggaaaacacataccatggagggaaagctgcacgaccctcagctgatgggaatcattcctcgaattgcccgagacatcttcaaccacatctactccatggatgagaaccttgagttccacatcaaggtttcttactttgaaatttacctggacaaaattcgtgaccttctggatgtgaccaagacaaatctgtccgtgcacgaggacaagaaccgggtgccatttgtcaagggttgtactgaacgctttgtgtccagcccggaggagattctggatgtgattgatgaagggaaatcaaatcgtcatgtggctgtcaccaacatgaatgaacacagctctcggagccacagcatcttcctcatcaacatcaagcaggagaacatggaaacggagcagaagctcagtgggaagctgtatctggtggacctggcagggagtgagaaggtcagcaagactggagcagagggagccgtgctggacgaggcaaagaatatcaacaagtcactgtcagctctgggcaatgtgatctccgcactggctgagggcactaaaagctatgttccatatcgtgacagcaaaatgacaaggattctccaggactctctcgggggaaactgccggacgactatgttcatctgttgctcaccatccagttataatgatgcagagaccaagtccaccctgatgtttgggcagcgggcaaagaccattaagaacactgcctcagtaaatttggagttgactgctgagcagtggaagaagaaatatgagaaggagaaggagaagacaaaggcccagaaggagacgattgcgaagctggaggctgagctgagccggtggcgcaatggagagaatgtgcctgagacagagcgcctggctggggaggaggcagccctgggagccgagctctgtgaggagacccctgtgaatgacaactcatccatcgtggtgcgcatcgcgcccgaggagcggcagaaatacgaggaggagatccgccgtctctataagcagcttgacgacaaggatgatgaaatcaaccaacaaagccaactcatagagaagctcaagcagcaaatgctggaccaggaagagctgctggtgtccacccgaggagacaacgagaaggtccagcgggagctgagccacctgcaatcagagaacgatgccgctaaggatgaggtgaaggaagtgctgcaggccctggaggagctggctgtgaactatgaccagaagtcccaggaggtggaggagaagagccagcagaaccagcttctggtggatgagctgtctcagaaggtggccaccatgctgtccctggagtctgagttgcagcggctacaggaggtcagtggacaccagcgaaaacgaattgctgaggtgctgaacgggctgatgaaggatctgagcgagttcagtgtcattgtgggcaacggggagattaagctgccagtggagatcagtggggccatcgaggaggagttcactgtggcccgactctacatcagcaaaatcaaatcagaagtcaagtctgtggtcaagcggtgccggcagctggagaacctccaggtggagtgtcaccgcaagatggaagtgaccgggcgggagctctcatcctgccagctcctcatctctcagcatgaggccaagatccgctcgcttacggaatacatgcagagcgtggagctaaagaagcggcacctggaagagtcctatgactccttgagcgatgagctggccaagctccaggcccaggaaactgtgcatgaagtggccctgaaggacaaggagcctgacactcaggatgca

SEQ ID NO: 350543 - DNA, 2559 bp, Homo Sapiens
  misc_feature (51)..(87): n is a, c, g, or t
  misc_feature (1964)..(2010): n is a, c, g, or t
  misc_feature (2249)..(2259): n is a, c, g, or t
gggagtatagactcactatgggcgacctggaggcttacgcggtggcggcgnnnnnnnnnnnnnnnnnnnnnnnnnnnnnnnnnnnnnatcaggccaaatcggccgagctcgaattcgtcgagagcggaacgtgcgcggtgatggagcgctaaccgggggcgcggcggcggcgagggctcggcgggccattggctaccggccgcggcaaaggcagcttggggacccagcgtgcgcggggcccgcgggccgggccggggtgacctgggctgcagccatggaagaacagagggaggccctgaggaagatcatcaaaacactggctgtgaagaatgaagaaattcagagctttatctactccctgaaacagatgctgctgaacgtggaggcgaactcggcgaaggtgcaggaggacctcgaagcagagttccagtccctcttctccctcctggaggagctgaaagaaggcatgcttatgaagataaaacaggaccgtgccagccgtacctacgagctgcagaaccagctggctgcctgcacgcgggccctggagagctccgaggagcttctggagacagccaaccagactctgcaggccatggacagcgaggactttcctcaggctgccaagcaaatcaaagatggagtgaccatggcccctgccttccggctatcattgaaagcgaaggtcagtgacaacatgagtcacctcatggtggacttcgcgcaagagcggcagatgctacaggcactcaagttcctgcctgtgcccagcgcacccgtgatcgacctggctgagtccctggtggcagataactgtgtgaccctggtgtggcgcatgccggatgaggacagcaagattgaccactacgtgctggagtaccggcggaccaacttcgagggcccgccccgcctcaaggaggaccagccctggatggtcatcgagggcatccggcagacagagtacaccctgacaggtctcaagtttgacatgaaatacatgaacttccgtgtgaaggcctgtaacaaggcagttgcaggagagttctctgagccggtgactctggagacaccagcgttcatgttccgcctggatgcgtccacatcccaccagaacctgcgggtggatgatctctccgtggagtgggacgctatgggcgggaaggtgcaggatatcaaggctcgcgagaaagatggcaaggggcggacggcgtctcccatcaactccccagccagaggtactccatctcccaagaggatgccctcaggtcgtgggggacgggaccgcttcaccgctgagtcctacacagttctgggggacacgctgatcgacggcggggagcattactgggaggtgcgctacgagccgaacagcaaggcgttcggcgtgggcgtggcctaccgcagcctgggccgcttcgagcaactgggcaagacggccgcctcctggtgcctgcacgtcaacaattggctgcaggtcagcttcacggccaagcacgccaacaaggtcaaggtgctggacgcccccgtgcccgactgcctgggtgtgcactgtgacttccaccaaggcctcctgtccttctacaatgcccgcaccaaacaagtgctgcacactttcaagaccaggttcacacagccgctgctgcctgctttcacggtatggtgtggcagcttccaggtgacgacaggcctgcaggtccccagtgctgtgcgctgcctgcaaaagcgaggcagtgctaccagcagctccaacaccagcctcacctaggcccccaggcacccacccagctggggtgtttttgggggagtcgccgccaagcccaggctgctggagccaggcaccctcctctgtcacttgctgcttggagccttaactccagatgggggggtcaccaagagggagtgggcaccctggcgggccctctccccacctcacctcttaataaaggtcagacactggccaggcnnnnnnnnnnnnnnnnnnnnnnnnnnnnnnnnnnnnnnnnnnnnnnngggggggcgcgccccaaagatcttcccccgcgagggggccccagcttccgcgcgcacccccgcgtttcttgcgcaaccaggggcccccttataaggagagggcccttctctatatacacccctagccgcccgcggcgcgccgggcgttaacacacacgcgcaccgcgccacgggaaaaaaccgcgcgcaccgcggggaactctcttgtgtgtagaaagaggacccccctaacacacgcnnnnnnnnnnntgggtgacacacattatggggtgggcccaacaacctctccctcctaagagggagaatatttttaacaggcctcctagggggcatcaccatattataaacccatctcctccaacacgtgcgtgttttatatgtgcggtgggtctcacaccccacccatcgcctccttgcacatatatatgactcctgtgggacggcgtttttgttaaaagaatttcttgtggtgagctctctcaccgctggagaatatatgtgtccttctgtcgagccaaccactattttttatttacccccccggggtgc

SEQ ID NO: 350544 - DNA, 665 bp, Homo Sapiens
  misc_feature (631)..(631): n is a, c, g, or t
gtctccaccctgccaaacatggaacccctttgtggccatgcccccaaaattgtccaacatgtggttgggcagccctgcagcaagccccctgccccctgaaccaggcacagaatcccgaccccctctcctttccgtcttggtcagtgcccagcgcacccgtgatcgacctggctgagtccctggtggcagataactgtgtgaccctggtgtggcgcatgccggactgaggacagcaagattgaccactacgtgctggagtaccggcggaccaacttcgagggcccgccccgcctcaaggaggaccagccctggatggtcatcgagggcatccggcagacagagtacaccctgacaggtctcaagtttgacatgaaatacatgaacttccgtgtgaaggcctgtaacaaggcagttgcaggagagttctctgagccggtgactctggagacaccagcgttcatgttccgcctggatgcgtccacatcccaccagaacctgcgggtggatgatctctccgtggagtgggacgctatgggcgggaaggtgcaggatatcaaggctcgcgagaaagatggcaaggggcggaaggcgtctcccatcaactccccagccagaagtactccctctcccnagaggatgccctccagtcgtggggggacgggacc

SEQ ID NO: 350545 - DNA, 402 bp, Homo Sapiens
gccggacagcaaggcgttcggcgtgggcgtggcctaccgcagcctgggccgcttcgagcaactgggcaagacggccgcctcctggtgcctgcacgtcaacaattggctgcaggtcagcttcacggccaagcacgccaacaaggtcaaggtgctggacgcccccgtgcccgactgcctgggcctcctgtccttctacaatgcccgcaccaaacaagtgctgcacactttcaagaccaggttcacacagccgctgctgcctgctttcacggtatgggtgtggcagcttccaggtgacgacaggcctgcaggtccccagtgctgtgcgctgcctgcaaaagcgaggcagtgctaccagcagctccaacaccagcctcacctaggccctcaggcacccacccagct

SEQ ID NO: 350546 - DNA, 1126 bp, Homo Sapiens
atgttgggggtggaacttttaaatcatttacaaaacaccagtcccgacctcccctgggagactgagctgttacctcttctggcgtccgtgcccgcggaagttcgctcctagggaagtcgctcgcgtcctcaagagcacctgagaggatctcggcgaagcggaaggctttggtgccagctgggagagtctgcgccggatttcctcagctccttggcgcgtttcctcggagccgggggaggcaaagcacggaccccggagtcggcgcccatagcgggacgccctcgcgaggggcgggagtgcgggaggtgggtgtgcgggcggcgcgctcgccctccagctgcagcccgcgccgagcgcgcagggccagcgagcgccggcgcctccagcatggagtgggaactcaacttgctgctctacctggcgctcttcttcttcctgctcttcttacttttcctcctgctcttcgtggtcatcaagcagctgaagaactccgtggccaacacggccggggcgctccagcccgggcgcctctcggtgcaccacgagccttggggcttctcccgagagcaagcggtgtgacccgagtgcgggcactggcgggagggcaccgagctgcgcgggcgctgggctgggtctccgcctcgattctccgtcctcgcggcctcccagcttccagagccgagctgctgcccttgactggtgctcaggggaccacagctgcaatgacagtttgggcctgcaaaaagaaggctggaacaacgggagatggaagctttctgcaaatgcagcaccactggtatccatgaatttaacctgcccatcattcttcctagacaagagactattgaaaagtcagggtgttcaaaatggcttcagatcttatcaggacaatcttggttgttgcactaatttccaaacttgtaagtgcaatggatctgcagttctacttggcaagataaccattgcaagctcgaatgagaaatgacatcacacttcacacctgcaaaaatctaaacatgtctaataaacgtacgattcctatggtctgaaccttccaattatagggcacacgcggtagaatgcagaactgatgccatctggtgcgattctacagaatacgagagaa

SEQ ID NO: 350547 - DNA, 1611 bp, Homo Sapiens
  misc_feature (1467)..(1467): n is a, c, g, or t
  misc_feature (1512)..(1512): n is a, c, g, or t
  misc_feature (1523)..(1523): n is a, c, g, or t
  misc_feature (1555)..(1555): n is a, c, g, or t
  misc_feature (1561)..(1561): n is a, c, g, or t
  misc_feature (1564)..(1564): n is a, c, g, or t
  misc_feature (1586)..(1586): n is a, c, g, or t
ccggggccgagacgatggctgaccacaaccctgacagcgactccacgccgcgcacgctgctgcgacgcgtgctggatacagcggacccgcgcaccccgcggcgaccccggagtgctcgggctggagcccggtagagccctgcttgaaacggcttcccccaggaagttgagtggccaaacaaggacgatagccagagggcgttcccatggagccaggtctgttggcagatcggcccatattcaggccagtgggcacttggaggaacagacacctcggacgctgctgaagaacatcctactaactgccccagaatcttccatcctgatgcctgagtcggtagtgaagccagtgccagcaccgcagcggtccaaccctccagacaagagagcagttgcggcagcctggagctgcaacttcctgagctcgagccccccacaaccctggctccaggtctgctggcccctggcaggaggaaacagaggctgagactgtcagtgtttcagcagggagtggaccaggggctgtctctctcccaagagcctcaagggaatgctgatgcctcttccctcaccagatccctcaacctgacctttgccacacctcttcagccacagtcagtgcagaggcctggcttggcccgcagacctccagcccgccgagctgtagacgtgggtgcctttttgcgggatctgcgagatacttccctggctcctccaagtaaggttgggttttcccctgctggcctttggggaaagctctccccgctatgacagataggaggtgatgctgagtcagggttgcacccctctcggtggggtcaaggacagcgagcaactctggtcagtgggtctacaaggaatttctgcttgctttctacagggggcctctttccttggtccctcggtgtctcccagggccccatatccttagactatagggctggaggttgtaaaggggtgtggtgtggtggccaaaacttgttgagaggggccaggtttcaggatcagctggccaattcaaactgacctgggagcctgattgcagaaaacaagttcaacagagtaaaaaaaagggttctgggaagacggagcagaacaagcagcgaagaggtatattaagtgggcagctggtgggcgggcagctataggggcctgggactgccaggcagaggaacaggaaggtaagcaaggagggctgtaggcgataaggcctcgcgtgctaggtcgtcttctttctctgaaggccactcagggtggacccatgcagcccactgtccaggccctggcaacgctgagtagcagccggtgggcctggaatacgctgagagccagctggcccctgatctccaggtgacagcctcagaacctgttactactctgcccacagacattgtgttggaggacacccagccgttctctcagcccatggttggctcccccaacgtgtatcactccctgccctgcacgnctcacactggggctgaagacgctgagcaggctgccggtcgcaagnacagagcagtnggcctgggctgcagaagaatagtgagtgtgtngcactngtngcctgggagcaaatttagcttnggtgagagttgacaatggtagtttt

SEQ ID NO: 350548 - DNA, 1671 bp, Homo Sapiens
  misc_feature (8)..(8): n is a, c, g, or t
  misc_feature (21)..(21): n is a, c, g, or t
  misc_feature (24)..(24): n is a, c, g, or t
  misc_feature (31)..(31): n is a, c, g, or t
  misc_feature (47)..(47): n is a, c, g, or t
  misc_feature (70)..(70): n is a, c, g, or t
  misc_feature (72)..(72): n is a, c, g, or t
  misc_feature (95)..(95): n is a, c, g, or t
  misc_feature (102)..(102): n is a, c, g, or t
  misc_feature (130)..(130): n is a, c, g, or t
  misc_feature (133)..(133): n is a, c, g, or t
  misc_feature (1541)..(1541): n is a, c, g, or t
  misc_feature (1594)..(1608): n is a, c, g, or t
agtccatntggccagaactcnaancatgtcntgtgctcctctgcttntcttcctcagtggcagactggtntntgtccatcttacccttctctgantatgcanccttgcctgctcgtctccggcctgtatntcnccccttcactcaggcccttggaaaccagccccagtttctggcaggagaggcagaggaggtcaatgcctttgctctgggcttcctgagcaccagcagtggtgtctctggagaagatgaagtagagcccttacacgatggagttgaagaggcagagaaaaagatggaagaagaaggtgtgagtgtgagtgaaatggaggcaacaggagcacaaggacccagcagggtagaagaggctgagggacacacagaggtgacagaagcagagggatcccaggggactgctgaggctgacgggccaggagcatcttcaggggatgaggatgcctctggcagggcagcaagtccagagtcggcctccagcacccctgagtctctccaggccaggcgacatcatcagtttcttgagccagccccagcgcctggtgctgcagtcttatcttcagagcctgcagagcctctgttggtcaggcatccccctaggccccggaccaccggccccaggccccggcaagatccccacaaggctggactgagccactatgtgaaactctttagcttctatgccaagatgcccatggagaggaaggctcttgagatggtggagaagtgcctagataaatatttccagcatctttgtgatgatctggaggtatttgctgctcatgctggccgcaagactgtgaagccagaggacctggagctgctgatgcggcggcagggcctggtcactgaccaagtctcactgcacgtgctagtggagcggcacctgcccctggagtaccggcagctgctcatcccctgtgcatacagtggcaactctgtcttccctgcccagtagtggccaggcttcaacactttccctgtccccacctggggactcttgcccccacatatttctccaggtctcctccccacccccccagcatcaataaagtgtcataaacggaaaacccaaacaccacccccctactacatccctgtcgggccgcctcggcccctcgaagaagcttttctaaaaccattccgttttggcggcccgggggccccagataggttaaggtgcacacctgggcccataagcgtgttttcccccaagggagaacccccgggggcccatggaccctaaggggccttggggcattttctctcccccaaaaataaacaaaaacaccccccgggggcgggcacaaccccggaaagcgggttccctgtgaaacaaaaattcccccgacaagggggagttttcctgggagggcgccctcttacctggggaactccccactcccacccgcgcggggttcccccaagagcgcgaagcccttccgagattattccaaaatttagatccgcccccccggcccccgtgcgcgcatttacaattgggccagaaaaaccaggagcggagaanaaattgccatataagagggcagttttcccgtgccccggaaatctggggaaaannnnnnnnnnnnnnnataaagcggcgtctattggtatgttacaccctgccgtaagttcgcggcccgcggccggtcaca

SEQ ID NO: 350549 - DNA, 1009 bp, Homo Sapiens
  misc_feature (15)..(15): n is a, c, g, or t
  misc_feature (36)..(36): n is a, c, g, or t
  misc_feature (41)..(42): n is a, c, g, or t
  misc_feature (51)..(51): n is a, c, g, or t
  misc_feature (54)..(54): n is a, c, g, or t
  misc_feature (56)..(56): n is a, c, g, or t
  misc_feature (67)..(68): n is a, c, g, or t
  misc_feature (72)..(72): n is a, c, g, or t
  misc_feature (78)..(78): n is a, c, g, or t
  misc_feature (94)..(94): n is a, c, g, or t
  misc_feature (99)..(99): n is a, c, g, or t
  misc_feature (103)..(103): n is a, c, g, or t
  misc_feature (114)..(115): n is a, c, g, or t
accctacgagaggtncaacctgattcacatcacctnctatnngtatagcgnganancttccccaaannccancagggnaaacccaaccttactnggagnagcnagggaaggatnncgcagagcccgcaaaaaggcacccacgtctacagctcgggcgggctggaggtctgcgggccaagccaggcctctgcactgactgtggctgaagaggtgtggcaaaggtcaggttgagggatctggtgagggaagaggcatcagcattcccttgaggctcttgggagagagacagcccctggtccactccctgctgaaacactgacagtctcagcctctgtttcctcctgccaggggccagcagacctggagccagggttgtggggggctcgagctcaggaagttgcagctccaggctgccgcaactgctctcttgtctggagggttggaccgcctgcggtgctggcactggcttcactaccgactcaggcatcaggatggaagattctggggcagttagtaggatgttcttcagcagcgtccgaggtgtctgttcctccaagtgcccactggcctgaatatgggccgatctgccaacagactatcggcaaagcaccaagcaaccagtctgtccgtctgccttgagatttcctcaaggtgggctccagagcagagctagacctcaacccccctccccgaggcagccagggccctttggggtcagtgggctgggtacttaccctggctccatgggaacgccctctggctatcgtccttgtttggccactcaacttcctgggggaagccgtttcaagcagggctctccgggctccagcccgagcactccggggtcgccgcggggtgcgcgggtccgctgtatccagcacgcgtcgcagcagcgtgcgcggcgtggagtcgctgtcagggttgtggtcagccatcgtctcggccccgggccctcctaaccgcccagccagctgcaggctccgccttccatcccgggaattccggaccc

SEQ ID NO: 350550 - DNA, 1260 bp, Homo Sapiens
ggcgggaaggcggagcctgcagctggctgggcggttaggagggcccggggccgagacgatggctgaccacaaccctgacagcgactccacgccgcgcacgctgctgcgacgcgtgctggatacagcggacccgcgcaccccgcggcgaccccggagtgctcgggctggagcccggagagccctgcttgaaacggcttcccccaggaagttgagtggccaaacaaggacgatagccagagggcgttcccatggagccaggtctgttggcagatcggcccatattcaggccagtgggcacttggaggaacagacacctcggacgctgctgaagaacatcctactaactgccccagaatcttccatcctgatgcctgagtcggtagtgaagccagtgccagcaccgcaggcggtccaaccctccagacaagagagcagttgcggcagcctggagctgcaacttcctgagctcgagccccccacaaccctggctccaggtctgctggcccctggcaggaggaaacagaggctgagactgtcagtgtttcagcagggagtggaccaggggctgtctctctcccaagagcctcaagggaatgctgatgcctcttccctcaccagatccctcaacctgacctttgccacacctcttcagccacagtcagtgcagaggcctggcttggcccgcagacctccagcccgccgagctgtagacgtgggtgcctttttgcgggatctgcgagatacttccctggctcctccaaacattgtgttggaggacacccagccgttctctcagcccatggttggctcccccaacgtgtatcactccctgccctgcacgcctcacactggggctgaagacgctgagcaggctgccggtcgcaagacacagagcagtgggcctgggctgcagaagaatagggaatgtgtggcactggtggcctggagccaaatttagcttgggtgagagttgacaatggtagttttccttcctcaagcccctctgtgcccctagagcaccctggctgtggctgcctccttcatccaagagcagagtccatgttgggccacgagacttcagatccatgtcctggtgctgcctctggctttgtctttcctcagtgggcaggactgggtctgctggtccatctttacccttctctgagctatgcagccttggcctgctgcgtctccggcctgtattctctccccttcactcaggccctgggaaaccagcccagtttctggcaggagaggcag

SEQ ID NO: 350551 - DNA, 1374 bp, Homo Sapiens
  misc_feature (480)..(480): n is a, c, g, or t
aaactctttcccacggggccccccccaggaaaacgtcggaaaggccccgcagttagtgtgtgaaatattagccccccggtttcgcctttttaagggggcgccattcaaaagtttccccaatttggcgttccggggttgatttccccttttgcccccttggcaggttaattacttttcccaaaaaggccatgggtttctttgtccaatagatttggggataccaggatactttcagggggaatttttccaggaattattttttcaagcaagcccaggacttttgtaatttgcgaaaggatgtcagggaagaagtaacaagctgaaaagttcttttcttcgtgtaggggttcaaccgcatggaagtccaggttcgcctccgttctgggcccgctccacccatgtgaatgtgatggccccttcccgggagctctcactgaaccgcagcaggaaggtccccggctgctggtccttcaacagggncaagctctcgctccttgctgatgaagcccatgatgcacccatcattccagagagggagcaggtgttttttaatgagttctaggatgctttcaatccaaagccagaagggaaaatttttatcatttatattttccttacaaaacctcgtccacggaatgagaccatcggggctggcgttaggaccaagaagcttctctcccaacatgttcagctggtccacattgagacctcttttggtgacagaagaaaactgccaactcagcacttctgaaagctgagcccatcgtgcacatggtggagtcaggaagaaggacagattcctgggttccgccaccagcatgttgtaccaaaggatggaggcccaaccgctcgggagctggctgacgttggagatcaccacaacgggcagagaggtcgtctcgaggtcaattaccaaaccaggctggcacaattgggtttcaaaactaagggagtgaagctcttcagtaacgatgagaggaccctcattcgttctggtgccagcatttttctgttctttcaattgcaggtgccgaaattcagccgccagactgccattggtggactcctccatgttcatcacttttgtgtgcgtgcccaaaatgttgaacttcctaaatccttttactgtatttctctcattcacatctttatcaaataagactttgactttcaaattataattcagctcttgcaatttcaccaacagtctcaacttcacagtgaactggacccctgtcttcaagaccagcggcctctgagggtgcgttggcatgcagggctgtctttccaccacaaacgagctctgaatgagctgctggaaaagactgaaggtgcggtcccataacacttgtttgttttttgtgatagggtcat

SEQ ID NO: 350552 - DNA, 759 bp, Homo Sapiens
  misc_feature (525)..(525): n is a, c, g, or t
  misc_feature (620)..(620): n is a, c, g, or t
ggtcgcggcggcatgctcagcgcttccgcggagaccctcccggcgggcttccgtgtgtccaccctggggaccctgcagcccccaccggccccgccaaagaagatcatgcctgaagctcactcccactatctctacggacacatgctctccgccttccgggactagccatggcccccagggctggcttcctccttctgggtttcacaggctcctctggccctgacccctcttgctcgttccccttccttccgcagctcctagtctcgtccgtgactttccggttgccctggatctcagaatatattcgtccaccccctcggcaccccattaccccgagtcccaccgtgtgtccgttgtaagtccggtggatgtggctggggtttcctggtattgtggaggcacccaggttgtccatgcttgggattctgggggaaggagagaagggcagctcagggtggatgtgaagccacccttcctcttctggacccagcctggtctgcactgcaacctccaccaggaccaggntcctgggccacaggctgggatgttccttccaagaaagggtcatttcagacgcagccctgcttgggctattcaatcttagggtgtctatccacgtntggctgtgccaaatggtctggcagctggttttggcatccccagcatcaccactctcccaacccatcaccgtggactgcagttcctgcccccattcttttggggtcagggaggggctgggaagggctactgaaggcccca

SEQ ID NO: 350553 - DNA, 661 bp, Homo Sapiens
  misc_feature (149)..(149): n is a, c, g, or t
  misc_feature (634)..(634): n is a, c, g, or t
tccaccaaattaacagtacttccaaatctcaaatacattcctgcctactcagtgctgtcagcagagtcctgaccaatgctagcccttccccacacagctaagagtcctcgggctttgggagcagccggtctcaatgggcttactgactncctcttcgctcaaaatcacatcagagaagggtggcaaaaaggggcacaatgcaatgccactagcctccaggggcttggaagggcaggactcactgatgctagaccaagggccagggtacctccctcccctccagatcccatcaaactgctttgcctctctcccagggcctgtgctggggtgaggagattacctactatcacactcaccttcacctttccgattctggcctatttggccagaatccagggttctactccatgtcagcagacaacccaacactctactgagtgtaagtttaaacaaaactgagaagagggcactcaaaaaaaatgaccagttcttcaaaagaagcacatttttgctaagcggcagtgatggaaaggaaaagctgcctgggaccggtggagaggaaacagcagaatctatgcagaatgggaacctgcaccttttctgtctctctattcacaggatggggatgaggggnagaaacatctggggatctcaggttcta

SEQ ID NO: 350554 - DNA, 947 bp, Homo Sapiens
tgtgagactgggttagagaaatgaaagaaagcaaggctttctgttgacattcagtgcagtctacctgcagcacagcacactccctttgggcaaggacctgagacccttgtgctaagtcaagaggctcaatgggctgcagaagaactagagaaggaccaagcaaagccatgatatttccatggaaatgtcagagcacccagagggacttatggaacatcttcaagttgtgggggtggacaatgctctgttgtgatttcctggcacatcatggaaccgactgctggacttaccattattctgaaaaacccatgaactggcaaagggctagaagattctgccgagacaattacacagatttagttgccatacaaaacaaggcggaaattgagtatctggagaagactctgcctttcagtcgttcttactactggataggaatccggaagataggaggaatatggacgtgggtgggaaccaacaaatctcttactgaagaagcagagaactggggagatggtgagcccaacaacaagaagaacaaggaggactgcgtggagatctatatcaagagaaacaaagatgcaggcaaatggaacgatgacgcctgccaaaaactaaaggcagccctctgttacacagcttcttgccagccctggtcatgcagtggccatggagaatgtgttgcaaatcctccattatttcccctggcactgtgatgtcgggggtaccaatggggcccccgtgtcacgttgttgactccagcggtgtgagccctttgggggccccccaagcgtggttaccccgggccgtgtgctcccccctttgtggaaacatctgcgttccaccgcacacagggggccctccaaccggtgtctgcaggagacacctttctgggcgtgtgaggagcaccccttggtgcccctcggacagggtgcttccgtagagaa

SEQ ID NO: 350555 - DNA, 951 bp, Homo Sapiens
aaaagggccgcgacccctgtcccggctgctagggagggaggtagagaaggagcgcggggccgtcgctgtctgcagttctaggcttgtagcctttgcactaaccctgccgcagtacatatccagccatactcatggaccccagtgatttccccagtccatttgacccattgaccctgccagagaagcccctggctggagacctaccagtagacatggaatttggagaggatctactggaatcccagactgccccaactcgaggatgggccccccctggaccttctccatcctcgggagccctggacctgcttgatacccctgctggcctggaaaaagaccctggagtcctggatggagccactgagttgctggggctgggggggctgctctataaagccccctctcccccggaggtggaccacggtcctgagggaaccctggcatgggatgcaggagatcagaccctagagcctggaccagggggccagacccctgaggtggtaccacctgatccaggggctggggcaaattcctgttcacctgaggggctactagagcctttggctccagattctccaataacactgcagtccccacatattgaagaggaggagaccacctccatagctactgcaagaaggggctcccctgggcaggaggaggagcttccccaagggcagccacagagcccaaatgccccgcctagcccttcagtgggagagactctgggggatggaatcaacagttctcagaccaaacctgggggctctagcccccctgcacatccttccttgccaggagatggcctgactgcgaaggcgagtgagaagccgcctgaacggaagagaagcgagcgcgttaggagagcagaacctcccaaacctgaggttgtagattccactgagagcattccagtgtcagatgaggattctgatgccatggtagatgacc

SEQ ID NO: 350556 - DNA, 1380 bp, Homo Sapiens
  misc_feature (212)..(223): n is a, c, g, or t
  misc_feature (430)..(440): n is a, c, g, or t
  misc_feature (487)..(533): n is a, c, g, or t
  misc_feature (651)..(673): n is a, c, g, or t
tgtcagcatcgagccacaccaacctgacaaggttcggagtgatgggggcggccaaggtgacactgggtccaggagctccctggggccctggcctaccactcactggcctcgctccccctgtccccgaatctcagccaccgtgtcactctgtgacctgtcccatggatcctgaaactgcatcttggccctgttgcctgggctgacaggagcannnnnnnnnnnnccagtaaacaaaacctgaaagcaagcaacaaaacatacactttgtcagagaagaaaaaaatgccttaactataaaaagcggagaaatggaaacatatcactcaagggggatgctgtggaaacctggcttattcttctaaagccaccagcaaattgtgcctaagcgaaatattttttttaaggaaaataaaaacattagttacaagannnnnnnnnnncttaatgtagatgaaaattagcaaggatgctgcctttggtctctggnnnnnnnnnnnnnnnnnnnnnnnnnnnnnnnnnnnnnnnnnnnnnnntgtataaaagtcccgtgtctctcgctatttctgctgctgttcctagactgagcattgcatttcttgatcaaccagatgattaaacgttgtattaaaaagaccccgtgtaaacctgagnnnnnnnnnnnnnnnnnnnnnnnggaagccactgcacacagacagaacggggacaggcggcggggtcttttgtttttttgatgttgggggttctcttggttttgtcatgtggaaagtgatgcgtgggcgttccctgatgaaggcaccttggggcttccctgccgaatcctctcccctcaggaaagggactgaacggggcttgggggaagggacctcaccaaggtgggtctgacccctccccagtgactctgcccaacaactgggggcccccagggctaccctaaacaaagcccctccccaggccccccctaagctgcctcctcccttggggctgggcgtcccaaccccgctgcaaaaaccagccagggggtcccccctccggcccatcttgtggccccagtgtcccagaacccaggccctctcctccagggtccccctttttctggggcctttttgccctgaaggggtaaccaaactttcttccccatcttggctttgggggacctgcctctgggggttttaaaactgtgcaagccccccccaacccttggaaaatcccatcccgtttctcccacaaaacctaaggcccctgggtacccatgtggccaccccacagcgcgcgccctctgactacattcgagggcactttataagggacattcacagagccccctccccttcactttgagggcacctgttgcaccccactcgcccattacctatgtatcaa

SEQ ID NO: 350557 - DNA, 899 bp, Homo Sapiens
  misc_feature (702)..(705): n is a, c, g, or t
  misc_feature (708)..(708): n is a, c, g, or t
gcggccgccagcgagatcaagcgggaggagaaggaggacgaggagaacacgtcagcggctgaccactcggaggaggagaagaaggagctgaaggccccccgggcccggaccagcccagacgaggacgaggacgaccttctccccccagagcagaaggccgagcgggagaaggagcgccgggtggccaataacgcccgggagcggctgcgggtccgtgacatcaacgaggcctttaaggagctggggcgcatgtgccaactgcacctcaacagcgagaagccccagaccaaactgctcatcctgcaccaggctgtctcggtcatcctgaacttggagcagcaagtgcgagagcggaacctgaatcccaaagcagcctgtttgaaacggcgagaagaggaaaaggtgtcaggtgtggttggagacccccagatggtgctttcagctccccacccaggcctgagcgaagcccacaaccccgccgggcacatgtgaaagtaaacaaaacctgaaagcaagcaacaaaacatacactttgtcagagaagaaaaaaatgccttaactataaaaagcggagaaatggaaacatatcactcaagggggatgctgtggaaacctggcttattcttctaaagccaccagcaaattgtgcctaagcgaaatattttttttaaggaaaataaaaacattagttacaagattttnnnnttncttaatgtagatgaaaattagcaaggatgctgcctttggtctcgggtttttttaagcattatttgcatatgttttgtaagcaacaaatttttttgtataaaagtcccgtgtctctcgctatttctcctgctgttcctagactgagcattgcatttcctgatcaaccagatgcctaaacgttgtacaagaaa

SEQ ID NO: 350558 - DNA, 552 bp, Homo Sapiens
tctttcgagggattaagcaccaagtggataaggggccagtggacagtgtgacaggcaaggccaaatacaccttgaacgacaaccgcctgctcagagaggatgtggagtaccgtcccctgaccttgaatgcactattggctgtggggcctggggcaggagaggcccagggcgtgcccgtaaaggtcctagactgtgacaccatctcccaggcaaaggagaagatgctggaccagctttataaaggagtgcctctcacccagcggccagaccctcgcacccttgatgttgagtggcggtctggggtggccgggcacctcattctttctgacgaggatgtcacttctgaggtccagggtctgtggaggcgcctgaacacactgcagcattacaaggtcccagatggagcaactgtggccctcgtcccctgcctcaccaagcatgtgctccgggaaaaccaggattatgtccctggagagcggaccccaatgatggaggatgtagatgagggggcatccgcactgcacctgtgaaccaatgatgaccgagcgccag

SEQ ID NO: 350559 - DNA, 1513 bp, Homo Sapiens
atcaggccaaatcggccgagctcgaattcgtcgagagcggatcttagctgtagatagaggcggcaacctcggaagtgcggagcgggtgggcctatatagatgttgaggtgcggaggccgtgggcttttgttgggcctggctgtagccgcagcagcggtaatggcagcacggcttatgggctggtggggtccccgcgctggctttcgccttttcataccggaggagctgtctcgctaccgcggcggcccaggggacccgggcctgtacttggcgttgctcggccgtgtctacgatgtgtcctccggccggaggcactacgagcctgggtcccactatagcggcttcgcaggccgagacgcatccagagctttcgtgaccggggactgttctgaagcaggcctcgtggatgacgtatccgacctgtcagccgctgagatgctgacacttcacaattggctttcattctatgagaagaattatgtgtgtgttgggagggtgacaggacggttctacggagaggatgggctgcccaccccggcactgacccaggtagaagctgcgatcaccagaggcttggaggccaacaaactacagctgcaagagaagcagacattcccgccgtgcaacgcggagtggagctcagccaggggcagccggctctggtgctcccagaagagtggaggtgtgagcagagactggattggcgtccccaggaagctgtataagccaggtgctaaggagccccgctgcgtgtgtgtgagaaccaccggcccccctagtggccagatgccggacaaccctccacacagaaatcgtggggacctggaccacccaaacttggcagagtacacaggctgcccaccgctagccatcacatgctcctttccactctaagccgtagcctcttctgttaataacacacagagagctctgccaagcacctgagtaggcccttgacacttgtgtgccctgggatgcctcctggcgcgaatcaggaggttctggaaggactctggctatattctgcaaatgtggctcatgccccttaccgtggctcggcgttgtggtgcctgagggacagccggccacctgcccagtactggtcagcttttcaacactattccctttgacctactggccatcttcctcacagccctcagatatcaacgggcacaaataagaccaactcaatttccacttgaatttacaaccaaaagcctgctgagttgattacagctgggccaatacagtacgaggcaataacaaattagtgtgggttgattctggaattggaaaagcttttgcttgtatggatacagcaaatccagatgtctctgaacaaagcaacaatttaaagcaacgacattttctgtcctttaagcacttaaaatcaggtgtggtgtgttttcaaaggcagaagtctgcattttgagcaaaaggtggcttcccagctctaacaaggtaactggttagcatgacattaaagcttgggcaaggcttcaaacttaaaaaa

SEQ ID NO: 350560 - DNA, 794 bp, Homo Sapiens
gacaaatgagactccggcagttctctggtttgcttagagacaaccatgtaggcccagaagtcggtcagagagtaattctcagacctcgctgcttggatggttttctgtaggctcttagccaagtcccactcctgtcgggtaaatcgatgtttcaggtcagcctcgagagcttccatgtcaccatcattggtgtagagagaagatattgcccaagtggatccagagaccccctgcgaggtacgtgacggcatccaacaggccctgttctttcatctcactcaggaccccaaggcaggcaatgtgagcccgcagtcctccgcctgagcccagcacagcaacaactggggcctcatcagcctcaatccttagcttcttcagagctttcagcacatgaagtcttcgtctctccacggccgccttttcttctttctggagcccaggaattatggaaacttcagagcttcccatggtgcactgcggtcagaaaattctcagtcctcctgagcctgggtctggggcgtgtgcgcatgcgcggtggagcttgtgctccggaatccggtgcggaggcttgggctccggaatccggtgcggaggcttgggctccctgcgcttagcggtgtagtcgctggacagctccttcagccggaatctccgcgggtgaagactgcggggatcctcggtgccaaagcttctgtggtcctcctgctttccttttccacctgtgggaggaggtcgcgggctggaggtgtttcctcctggtcctgagcagggccaacctggagggtaaaatggcc

SEQ ID NO: 350561 - DNA, 584 bp, Homo Sapiens
  misc_feature (494)..(494): n is a, c, g, or t
  misc_feature (542)..(542): n is a, c, g, or t
  misc_feature (560)..(560): n is a, c, g, or t
agctgaaaaactggagcaaccaagcagggcctacaagccgaggagggctgtttaaaggcgcaggggccattttacctccaggttggccctgctcaggaccaggaggaaacacctccagcccgcgacctcctcccacagggggaaaaggaaagcaggaggaccacagaagctttggcaccgaggatccccgcagtcttcacccgcggagattccggctgaaggagctgtccagcgactacaccgctaagcgcagggagcccaagcctccgcaccggattccggagcacaagctccaccgcgcatgcgcacacgccccagacccaggctcaggaggactgagaattttctgaccgcagtgcaccatgggaagctctgaagtttccataattcctgggctccagaaagaagaaaaggcggccgtggagagacgaagacttcatgtgctgaaagctctgaagaagctaaggattgaggctgatgaggccccagttgtntgctgtgctgggctcaggcggaggactgcgggctcacattgcctgccnttggggtccctgagtgangatgaaagaacagggcctgttgga

SEQ ID NO: 350562 - DNA, 1010 bp, Homo Sapiens
  misc_feature (408)..(519): n is a, c, g, or t
  misc_feature (567)..(588): n is a, c, g, or t
  misc_feature (603)..(604): n is a, c, g, or t
  misc_feature (606)..(609): n is a, c, g, or t
  misc_feature (611)..(618): n is a, c, g, or t
  misc_feature (620)..(621): n is a, c, g, or t
  misc_feature (623)..(625): n is a, c, g, or t
  misc_feature (627)..(631): n is a, c, g, or t
  misc_feature (633)..(633): n is a, c, g, or t
  misc_feature (636)..(642): n is a, c, g, or t
  misc_feature (644)..(644): n is a, c, g, or t
  misc_feature (646)..(647): n is a, c, g, or t
  misc_feature (652)..(673): n is a, c, g, or t
  misc_feature (700)..(700): n is a, c, g, or t
  misc_feature (704)..(704): n is a, c, g, or t
aagaccacggatgacatcgtgacggttgaagtctgggatgtagtagacaaaggaaaatgcaaaaagcgaggcgacggcttaaagatggagaacgacccccaggaggcggagtctgaaatggccctggatgctgagttcctggacgtgtacaagaactgcaacggggtggtcatgatgttcgacattaccaagcagtggtaagagggagctggcgggggcagctgcctgtgactctcacccccctagccccttgggcgccctctttgtgcagcagataatggttagagcaacatcgttctgcaggaccgagggactcttgctgggcagctgtggcaactcacccacaaggggcactggcctgcatgtcgggctgggcaacgactatgcctgtgcctatggggcggcatnnnnnnnnnnnnnnnnnnnnnnnnnnnnnnnnnnnnnnnnnnnnnnnnnnnnnnnnnnnnnnnnnnnnnnnnnnnnnnnnnnnnnnnnnnnnnnnnnnnnnnnnnnnnnnnntgcctctctgcctgccggcatcccccgcgcacctcccgcccttccttnnnnnnnnnnnnnnnnnnnnnnaattctaatggatgnngnnnngnnnnnnnngnncnnngnnnnncnggnnnnnnntngnngcccnnnnnnnnnnnnnnnnnnnnnncggtctgcgccccgacccccgcacggnctcngcgggcgcgccctcgcgccggccgccgcacgtcagtgcggaggggtcgcccggggctcgcctgttgtgccgcgcgggtgttttgcgtgcttggtgttcctccccggggcgcgcgctatcctctcccttcccgcctgcccgcctcgtgtgcaaccatcgtcaggtgcatggcattctgagcgtgacgtgttgatcccatgtgctactccacctctctccgtgttattgttctgcacgccgtgaccccgttcccgatctatcaacccagcactgtacttacgttcggcgtgtaaagaaaggaatcttg

SEQ ID NO: 350563 - DNA, 1688 bp, Homo Sapiens
  misc_feature (1603)..(1603): n is a, c, g, or t
ggtaccggtccggaattcccgggatcgccgagccggcgccaagatggcggcgctgactcctggagagcggtcgcgccggaggccgcgggggccggagcggagcagccgcggctgaggttcccgagtcgccgctcggggctgcgctccgccgccgggaccccggcctctggccgcgccggctccggcctccgggggggccggggccgccgggacatggtgccagtcgcaccccttccccgccgccgctgagctcgccggccgcgcccgggctgggacgtccgagcgggaagatgttttccgccctgaagaagctggtggggtcggaccaggccccgggccgggacaagaacatccccgccgggctgcagtccatgaaccaggcgttgcagaggcgcttcgccaagggggtgcagtacaacatgaagatagtgatccggggagacaggaacacgggcaagacagcgctgtggcaccgcctgcagggccggccgttcgtggaggagtacatccccacacaggagatccaggtcaccagcatccactggagctacaagaccacggatgacatcgtgaaggttgaagtctgggatgtagtagacaaaggaaaatgcaaaaagcgaggcgacggcttaaagatggagaacgacccccaggaggcggagtctgaaatggccctggatgctgagttcctggacgtgtacaagaactgcaacggggtggtcatgatgttcgacattaccaagcagtggaccttcaattacattctccgggagcttccaaaagtgcccacccacgtgccagtgtgcgtgctggggaactaccgggacatgggcgagcaccgagtcatcctgccggacgacgtgcgtgacttcatcgacaacctggacagacctccaggttcctcctacttccgctatgctgagtcttccatgaagaacagcttcggcctaaagtaccttcataagttcttcaatatcccatttttgcagcttcagagggagacgctgttgcggcagctggagacgaaccagctggacatggacgccacgctggaggagctgtcggtgcagcaggagacggaggaccagaactacggcatcttcctggagatgatggaggctcgcagccgtggccatgcgtccccactggcggccaacgggcagagcccatccccgggctcccagtcaccagtggtgcctgcaggcgctgtgtccacggggagctccagccccggcacaccccagcccgccccacagctgcccctcaatgctgccccacccatcctctgtgccccctgtaccaccctcagaggccctgcccccacctgcgtgcccctcagcccccgccccacggcgcagcatcatctctaggctgtttgggacgtcacctgccaccgaggcagcccctccacctccagagccagtcccggccgcacagggcccagcaacggtccagagtgtggaggactttgttcctgacgaccgcctggaccgcagcttcctggaagacacaacccccgccagggacgagaaagaaggtgggggccaaaagctgccccgcaggacagcgacagtgatggggaagccttgggcgggcaaccccnatggtggcaggggttccagaacgatgtgggacttcgaagaccagcccacctggggagtccccccctgccctgcaaggcccggtcc

SEQ ID NO: 350564 - DNA, 860 bp, Homo Sapiens
caacgtaggctagtacgaggctgggtggcgaattcggcacgagggaggaagccggcggtggccccgtcagcagccggctgctgagaggccggtaggcggcggcggtcccgaggggcggcggccgcgctgctccctgagaacgggtcccgcagctgggcaggcgggcggcctgagggcgcggagccatgaagctgtacagcctcagcgtcctctacaaaggcgaggccaaggtggtgctgctcaaagccgcatacgatgtgtcttccttcagctttttccagagatccagcgttcaggaattcatgaccttcacgagtcaactgattgtggagcgctcatcgaaaggcactagagcttctgtcaaagaacaagactatctgtgccacgtctacgtccggaatgatagtcttgcaggtgtggtcattgctgacaatgaatacccatcccgggtggcctttaccttgctggagaaggtactagatgaattctccaagcaagtcgacaggatagactggccagtaggatcccctgctacaatccattacccagccctggatggtcacctcagtagataccagaacccacgagaagctgatcccatgactaaagtgcaggccgaactagatgagaccaaaatcattctgcacaacaccatggagtctctgttagagcgaggtgagaagctagatgacttggtgtccaaatccgaggtgctgggaacacagtctaaagccttctataaaactgcccggaaacaaaactcatgctgggcccatcatgttgatgcagcctgccagaggcccaatgctggaatggcaccatcattcacatcagaactgcagcccctgtgaaaagaagag

SEQ ID NO: 350565 - DNA, 1024 bp, Homo Sapiens
  misc_feature (882)..(882): n is a, c, g, or t
  misc_feature (983)..(984): n is a, c, g, or t
aaggagcgaggcctgggtggcgaattcggcacgaggtacaaaggcgaggccaaggtggtgctgctcaaagccgcatacgatgtgtcttccttcagctttttccagagatccagcgttcaggaattcatgaccttcacgagtcaactgattgtggagcgctcatcgaaaggcactagagcttctgtcaaagaacaagactatctgtgccacgtctacgtccggaatgatagtcttgcaggtgtggtcattgctgacaatgaatacccatcccgggtggcctttaccttgctggagaaggtactagatgaattctccaagcaagtcgacaggatagactggccagtaggatcccctgctacaatccattacccagccctggatggtcacctcagtagataccagaacccacgagaagctgatcccatgactaaagtgcaggccgaactagatgagaccaaaatcattctgcacaacaccatggagtctctgttagagcgaggtgagaagctagatgacttggtgtccaaatccgaggtgctgggaacacagtctaaagccttctataaaactgcccggaaacaaaactcatgctgtgccatcatgtgatgcagcctgccagaggcccaatgctggaatggcaccatcattcacatcagaactgcagcccctggaaacagaagagacagccatagacgaggagccagagtgggggcagactggccatttttattttgaagttcctgcgagaaatggatggtggaagggtggcgaactgttcaaattcatatgtgtggtagtgattcttggaaaagaatttgaggtcccccaaaggttgtattttttggggcaaatgaaaccataaacctcccgactggccttctngtagatgcccaaaggggctcctttttcagctaaaccctgggaaaggctccttttgggaaagggaaggtccgaaacccagctggtttcttcgatcttttggnnatatcctttgggatccttattttggacctttaatgatata

SEQ ID NO: 350566 - DNA, 1609 bp, Homo Sapiens
aaggagcgaggcctgggtggcgaattcggcacgagggtttgaagactcttgggaaagcctctcctggggccactgttgggggtgggagtgagcccaccacagaggccacaggcaggcccccacttcaggcccaaggcctggggcggggggaacagtcactgggtctcagattctgagactgttgtttagcttacctttctgctaggattggcttcccgcagagggcagggcccatcctaagcagcttccaagtcccacaaaggtggcttgtgggaggatttggaaggagctgcattgtgggcggggagtgtgtgggttgggttcgtaccagcaagtagactaggaactgagcccaggaaagggggatgttttcctggtgtttggatggtcagctgggagtgtccatcatcaggggaagatcaaacacaggtgcactcagctgcccagggcctctgggacacttgccttgacttgcaacttgccttgaacatcacgatcaaagcagcaggtgctgtggtctctcaaaattgatttttatttgactctgtggctctaagactgccttgaaccgcctgaggcctatgcatctgaacaagtgggtctctcccttgagcaccaggagtgggtgccagccggccccgaggattcccagcaccccacctatggtcttgccagcataggcttgctagttccttcttggtcagaggtagctgcagaggggggaggccaagggtttggtctaagctgtgccctgccacctggcaggaggcccactcactgcccaagtcatggcaacaggctggagcagcccaggagatgggcctaaaatgttctggatcccttgggtcctagtgttatgttccagtctgcccacctgtgctcaggatgcagccctgggatccagcacccatggaagcttctgctgggatggtgtcacctatgggttttgaaccagtgtggtatggtccttgggagctctgctctgagcttgccacactgctgagagcacccactgtcctgaccagagtctcagtggtcctgacccccaatgtgggcaggggctgggcaggagggtggggtctgctgtgggttcagaggactccacctcctggctggtttacctgctgctgcccattttctctgggtactgctggccagaggactttagcctacccctgaagagcctgtccatgtcattttcctactgccatagataccctaagcccagggccccttgaggcccagactcagcctgcccactggtgccggagacggagtggagtgggcctggatccgagggatgctacctctccctttcccacttgaggaccctggggagagatgggggcggggaaaatggaggtatgaatttggggtaagaggaagtgagatctccgcttgcaggtcagcccctgccttgcagggcgggctggcttgactcaggccctgtgagatagagggcccagcccagccccacccacagatcccctgctcctgttgtgttctgttgtaaatcatttggcgagactgtattttagtaactgctgcctaacttccctgtgttctatttgagaggcgcctgtctggataaagttgtcttgaaatttca

SEQ ID NO: 350567 - DNA, 2251 bp, Homo Sapiens
  misc_feature (2115)..(2115): n is a, c, g, or t
  misc_feature (2217)..(2217): n is a, c, g, or t
aggaagcgaggcctgggtggcgaattcggcacgaggcagccggctgctgagaggccggtaggcggcggcggtcccgagggtcggcggccgcgctgctccctgagaacgggtcccgcagctgggcaggcgggcggcctgagggcgcggagccatgaagctgtacagcctcagcgtcctctacaaaggcgaggccaaggtggtgctgctcaaagccgcatacgatgtgtcttccttcagctttttccagagatccagcgttcaggaattcatgaccttcacgagtcaactgattgtggagcgctcatcgaaaggcactagagcttctgtcaaagaacaagactatctgtgccacgtctacgtccggaatgatagtcttgcaggtgtggtcattgctgacaatgaatacccatcccgggtggcctttaccttgctggagaaggtactagatgaattctccaagcaagtcgacaggatagactggccagtaggatcccctgctacaatccattacccagccctggatggtcacctcagtagataccagaacccacgagaagctgatcccatgactaaagtgcaggccgaactagatgagaccaaaatcattctgcacaacaccatggagtctctgttagagcgaggtgagaagctagatgacttggtgtccaaatccgaggtgctgggaacacagtctaaagccttctataaaactgcccggaaacaaaactcatgctgtgccatcatgtgatgcagcctgccagaggcccaatgctggaatggcaccatcattcacatcagaactgcagcccctggaaaagaagagacagccatagacgaggagccagagtgggggcagactggccatttttattttgaagttcctgcgagaaatggatggtggaagggtggcgaatgttcaaattcatatgtgtggtagtgattcttggaaagaatttgaggtccccaaaggtgtatttttgggcaaatgaaaccataaactccgactggcttctgtagatgccaaagggctctttttcagctaaccctgggaaggctctgtgggagggaggtcggagccagctgtttctcgatctttggtatatctttggatcttatttgtacattaatgatattaacactccagtggggggtgggggagtccctgatgctagggctggggtgggtggagtttgaagactcttgggaaagcctctcctggggccactgttgggggtgggagtgagcccaccacagagtgccacagtgcaggcccccacttcaggcccaaggcctggggctggggggaacagtcactgggtctcagattctgagactgttgtttagcttacctttctgctaggattggcttcccgcagagggcagggcccatcctaagcagcttccaagtcccacaaaggtggcttgtgggaggatttggaaggagctgcattgtgggcggggagtgtgtgggttgggttcgtaccagcaagtagactaggaactgagcccaggaaagggggatgttttcctggtgtttggatggtcagctgggagtgtccatcatcaggggaagatcaaacacaggtgcactcagctgcccagggcctctgggacacttgccttgacttgcaacttgccttgaacatcacgatcaaagcagcaggtgctgtggtctctcaaaattgatttttatttgactctgtggctctaagactgccttgaaccgcctgaggcctatgcatctgaacaagtgggtctctcccttgagcaccaggagtgggtgccagccggccccgaggattcccagcaccccacctatggtcttgccagcataggcttgctagttccttcttggtcagaggtagctgcagaggggggaggccaagggtttggtctaagctgtgccctgccacctggcaggaggcccactcactgcccaagtcatggcaacaggctggagcagcccaggagatgggcctaaaatgttctggatccctttgggtcctagtgttatgttccagtctgcccacctgtgctcaggatgcagccctgggatccagcacccatggaagcttctgcttgggatggtgtcaccctatggggttttgaaccagntggtgggatgggtcccttgggaaccttctggctctgagccttgccacactggctgagaagcaccccactggcccttgaccaggaggtcttcagttggtcccntgacccccccaattgtgggggcaaggggggcttt

SEQ ID NO: 350568 - DNA, 3224 bp, Homo Sapiens
  misc_feature (1169)..(1169): n is a, c, g, or t
  misc_feature (2126)..(2139): n is a, c, g, or t
gagcctgccccgatttcagaggctagtggtatatttatgtaaaaaatgactgtaaatctcaagaaaaatctcagcagctaatagcaactcatttatttcattttggtcttaatgctttgtaaacaggtcaaaaaatactgtcatactctaagcttctattttccacactggacatacttctagttgtattctccatactattagactgtgtagtgatgtgacttccaagtagaatttaatctccccattgagtgtgtcatggtacaaatcactattcgtttttggtgttttttagggatgtgcaatgtgcattacataatgacagaaatactgagaaggttctgtgtgcccatttgaaaggagtgggaggaatacagcagtttgtttttcaacatgaatctgatattgatttaaactgtgtttcacttacaagttttaaaaaaatgacagggtttaatggagcgtgcataaaaatgtactgttttcaccttttgtttatatgtaaatgtttgtaagtatatgggcctatctgtaagtgggtaagtctgtatgtgtgtatcatacacatcaacctccatgtccttagtcctgggtttttgaaaaagtgctaaaacggacaagtagaataaatgttgctgtggaatgccatgctttagaacaaaccctttttgatcttaatgcttctgaaaactaggtctgactctggggatttttttccagccgaaggaaaatcacttccgttatgtccccctctaatttagccgctcgacattttacacaacccggatatgttgtatattttgacccaaagttacaggtaggtttaagagaatttttagccatgacttttggagcactattccattgtcagttattaataaagaattccattgcttagctaaccaacaggttttttttgtttccaagagagttatttgaaaagttaacagaacaatgagataacagtgacagtttaacaaagataaaattctgaactgcgttttattcatttgtgtactatgtgattttttaaatgtcccctttagtatttaatggaaaattggttccctgcaaaagacaaagggtgagagttagcgtcctgtagatacacacagagactaggccgtatattaactagaagcagctttatgtctagcttgtgtcttttngtttgtttgcttgtttgtttttagattcctgagagatgtctctggaagggaaagttttgagaactaatggctatttttgaggacaaaaattacatcttaagctaattccttaaatacatacagtaggtgaattttcaggacaatattgcctcacaaccctgcttacattgaaaagtctttttcccttagctcttctgactggatttttctacaaaaactatggaaaatatctttgttcttgtttgctgctattttctgtcctattttgagaaatataaatacatagaaatggtgcatcttaacatttgtttgtacatgtataaatgtcttgtattttaattcatttttagcatgaattgtttaagggtaagccacaacatctagaaatcactcatagatattgaacaataaaggagaatggtaccgatgcaggaggaagcaagcgtgtcttcccctgcagcacacagcgacttgcgttgacaaaggaggaggaaacgattactctgtaaacaaagttatccttacttgggagattgccacagcctgctgctgagttgagttaccagacatcctccatgtgagaagcagcgaacattgaatctcagggatggcccacaactgggtccacatgtaatgagccctgtttaataacgaaggggtgggggagagcagtccgtctacaacctggaatcagatttgcaaaatttcctgcactgctgtctgacactgtcctgttgatgccctttctgactgtgttctctgttttctctgtctgctgtctaaccctgtgccttgcctgggataaggacaatgatgaggttactggtttggattgtaagtagaggacttttattaattggtttagaggttcactgctgctttgtcactttctcaatcaaattggccacttaagaaataaagagctggtagaattgcatcctcagatgattattgacnnnnnnnnnnnnnnaaaacagacattccagtgccacccaaatatatatctgtaacgtgcccaagaaatcctagctgcgctcttgagagtgcatgccatggagactggtttagacaccgcgtggagcctagttgcctgttgtcacggcatcttgcactttaggagactaagaccgtcctggttcgtctgtgtgtggtgtgaccaatggtgtgcccagagcactactctcaaaatcactagtgttagcaagtcgtcccgggctggggagcgttcgccgtagtctttggaagctttggctttagatttaccaagccccgcctccccgctgccagtgccctgctctcccgttcgcctctttctgtttctgtgtgaactttcccggtaatatcactcgttaaataggttttctttaaacttaattaaagaaaaactatttaaaggtaaaggatattttgttgacatcggtggctcgatcatccttaagcaactgaagttaaaattgttgaaggaaaaggcacttaaattggttactttcatgtccagctgtatataagtccagtgtgttcatctagatgacgcaaagaatctcctggtagagaagcgacatgtaaaaaactggtggaaaaaggttttggattttttttccagtggggtggggggagggcaagctggatttacaggtcacggctggactgaatgggcctttttatcttcccactgtatcatggaagtagctgcttgcttgtactgtccatccttcaggcatccctaaagctcactctgaagatgttagagacaaacacaaactcttcgagttaaagttgatcctgacactgacatgaaggcaagccttgatttcgtatgaacgttgctgaagtggtaattgaggaaaacagttccccagattgttaagagttcactgaagatattgacacaattttaaaaaatcagtaaaggaatgtatataatattgctctcgtgttttacagtaagatttgttgctctcagactgtgtaaaacaaaatttattcatgttttctgcatattaaaaaatcttattgtaccaactggtaaactattaaatgcctataaaactaaaa

SEQ ID NO: 350569 - DNA, 845 bp, Homo Sapiens
  misc_feature (11)..(11): n is a, c, g, or t
  misc_feature (37)..(37): n is a, c, g, or t
  misc_feature (509)..(522): n is a, c, g, or t
aaggggggggnaaaagaataactctgtaaaaacaaanttaacccttactgggaaaaaatgccccaaaacctgctgcctgaagttgaagttaccccagaacatcccccccatgtgagaaaccagcgaaacattgaaaaccccagggatggccccacaactgggtcccacatgtaatgagcccctgtttaaataacgaaggggtgggggagagcagtcccgtcctacaaccctggaatccagatttgcaaaatttccctgcactgcctgtcctgacactgtccctgttgatgcccctttcctgactgtgttcctctgttttctctgtctgctgtctaaccctgtgccttgcctgggataaggacaatgatgaggttactggtttggattgtaagtagaggacttttattaattggtttagaggttcactgctgctttgtcactttctcaatcaaattggccacttaagaaataaagagctggtagaattgcatcctcagatattattgacnnnnnnnnnnnnnnaaaacagacattccagtgccacccaaatatattctgtacgtgcccagaaatcctagccgcgctcttgagggtgcatgccatggagactggtttagacaccgcgtggagcctagttgcccgttgtcacggcatcttgcactttaggagactaagaccgtcctggttcgtctgtgtgtggtgtgaccaatggtgtgcccagagcactactctcaaaatcactagtgttagcaagtcgtcccgggctggggagcgttcgccgtagtctttggaagctttggctttagatttaccaagccccgcctccccgctgccagtgcccactt

SEQ ID NO: 350570 - DNA, 471 bp, Homo Sapiens
ccacagctgctgctgagttgagttaccagacatcctccatgtgagaagcagcgaacattgaatctcagggatggcccacaactgggtccacatgtaatgagccctgtttaataacgaaggggtgggggagagcagtccgtctacaacctggaatcagatttgcaaaatttcctgcactgctgtctgacactgtcctgttgatgccctttctgactgtgttctctgttttctctgtctgctgtctaaccctgtgccttgcctgggataaggacaatgatgaggttactggtttggattgtaagtagaggacttttattaattggtttagaggttcactgctgctttgtcactttctcaatcaaattggccactttaaggaaataaaagagctggtagaattgcatcctcagatgattattgactgtgtgtgtgtgttggaaaacaggacattcccgtggccacccaaatata

SEQ ID NO: 350571 - DNA, 788 bp, Homo Sapiens
  misc_feature (150)..(193): n is a, c, g, or t
atggctattgcctgcctgatcagtaaagcaagtatgaaggaagtacataggaaaagaaaagggagggaagaggcttttggacagtaacatttccaaaaaaatgaaagggaaataaaggagtacgagaagaaaggcaaattcaatgatccnnnnnnnnnnnnnnnnnnnnnnnnnnnnnnnnnnnnnnnnnnnngagaggttctgcttgtaataggcgaagtagctcctatcagatcaaccttcataccggtaacaattatgagctctgaacaaaaacaaacaaaaaacctcctgaagactctggaaagagagcaaaaacagggagaacctaaagggaaaccgacagttacaagaaaataaatagctaccgggtgcaaaggatatttaaaatctcacaaacatgataattgaaccaaagaagtcagaagaaaggagtctgtgttttataattccatttatatgaagtatgaaaacaggcaaaccatattaaaagtcaggatagctgttcccctgacgaggaggaggatagcgattggaagtaggacatgaggaggatttctggggtcctggtaatgctctattactggatctgggtgctggtttcatgggtgtgatcacttggtgaaaattcataaaaatagacatgacatatgcaattttttgcttcagtacaaacttaaaatcaaaagggagcagagacaagatgacagcagcagggcagactgtgaagggcctcaatgccagactaaggagcttacgtgaccctggcacgcattgaagactcctgt

SEQ ID NO: 350572 - DNA, 2804 bp, Homo Sapiens
  misc_feature (509)..(517): n is a, c, g, or t
  misc_feature (1066)..(1074): n is a, c, g, or t
gatttcacagtatcaacctccccgtcaccttttgaactttgagactccgtacggtcaacttcaccagaggcaggttgctcgaagcagcactgcttgtctgttcctgactctggttctcactgtattaaaaaagagagtcagaggagtctggcatttcgtgagtttgttagaggatgctggctgataattccagaaaacttactgatgctaaatcacagtacatgcatgattctttttcagctttactatagttcatgacctggactttctgtactcttggaagctgggctccttaaaggaggcctctagtgaacacctttatctccatgtccctcttagagcccagagagctgcccataggcattttccagaattcctcatgtcacctagttcaatttccattaactcagatcagccattgtgattcaccatttgtcaggctctcaggtttaacaaaacctactatcaccatcatccttcaacagccacagtctgaattgagccaacannnnnnnnnctttgagaaagaagtggactggggcacaacttttagtctgaggggagctagtggaaatctagacaatagaagtcatcgatagcagcttttcctcaaatgtgtgactcctcaggggctaaactgctcttagcttagaattatgctttactagagatctagcagataagtgggttaatcactaccatcctgtaactagttatatagcttccagacatgagggagacatcaaacagggatggaagcaaccccaaggatatgcaagaagggcatgatgaacccccttccctctggcaggagaacaaggccaaccaagggacagactggaaagcacttagatgtttaaggaggagaaaggggaagctttgaccagtccttgccttttgccaagttcagccagttctccgctgcttgcaacctctagcgcagtaacatttgcagaattgcagattttcccccagatactaggaggaaagggactttggggggtggggaaggggtcgtggtgttttaaaagcataagttacctgtttgcactgttttaagataggnnnnnnnnntagtgggcaaggtgaacatcagacgtaaatttgtgtgtttttattttgtcatgctcttgaaaatgtttgaccatttgtagtatacacagtgaaacttgattctctgttgcataaaacactatatttttttggaaatgttactgtccaaaagcctcttccctccctttccttttcctatgtacttccttcatacttgctttactgatcagccaggcaatagccatccaagagctagagcatgaaacagggccctttccaagtaggctctgggtgtcctaagccagcgtgtgccctctggtttagtgagtgtaatagagtccctggcacctttctttgcaaatgaggctaacagaccagactgcagcaagttatcagattcctcaatcagatgcactaggagtgaggagcccagggatggagggggttcctgaagtattgcagttggctgtagtagctgagttcttttccatgttaccgaaactgtagccagttacagtttactcaggaaaacggtagatcaattcagccatggtagtgctggttggcagggattggtaacggagagaactgctcatcagccaaaactcaagccttgccttttaggaggccaccagcagagggacttggtcctccttgtctggtacttgtgtacatgccggtgacctgaggactccactcacactggcgagcaaaaagggagcagtgattctcttttctctccccaccccctgccctttgttaccaacaccagtttcccagggggtacatgagtttctgaatttttaaaaaatgtttttggtttggtttttctggggactgataagtgctttaagcaatgtccataccccgtcaagactcccagcttagtcattttcttgtatttttctgttcacagtatttgtgtgtgtgcttgttttggcagctcattttggctgtattatatattgagtgatgaattgatcctcttttttccctaagggatatgaattgtttttcttgtgttatattctgcttgtgaatagctggagcaaacctggggctgacacgcgtaagctagggctgcaaagcgagaagagagccggtggagtgtacttgtccctgacaggctgacctacctgagtctctgagcttttcagtccaaatctttgcaaggctcaaaatgccacagaacctctcctcttctccccactccccatggcagggaccggaccatccctacatgcaacatgctgttcctccagcccctcccattgccatggcaaaacaggtacctttggggcatgggggcattacatgggatgcttgtgtaatcgaccacctagccttctctctcccctcccgtcctcccccagaatcacttcctaggacacccgagctgcttgcccagggtcctgtttccctgctaactccagagaagcatcccagggctttgtgacagtctctaattcccttcccttctcgttaagaatcatattgtatagtagctttcagaccatacagtattcattgggttactcctattattatcaagtagctggaattgtgaaggtcggagtagttagatctttagcttttattccttatttttttgtattactctccatgtgtataaattattgatcatgttgctggcttttataaactctaagcgaaggaggagcactgcctcagcctttgcacatggtaatgaagcactgtttttaaataaaagagagaaacaccaaaaaaaa

SEQ ID NO: 350573 - DNA, 629 bp, Homo Sapiens
  misc_feature (56)..(64): n is a, c, g, or t
  misc_feature (103)..(155): n is a, c, g, or t
  misc_feature (567)..(576): n is a, c, g, or t
ttgtagattaccaagcagtttgctaaaaattcaatctttgacccaagctgtagcannnnnnnnncatgtgtggcatctttttcatgccaccaacaaacttgtnnnnnnnnnnnnnnnnnnnnnnnnnnnnnnnnnnnnnnnnnnnnnnnnnnnnntctgtacccactaagatttgtttaggtgcccattgcatctttttgtgctatggagttgtttacattaagcatgaccgaacgagagacaatactatttcccacaggagtccattgggttcagctttgaaagaggaatagaatcgaggctcctttgaccatcaaaatgatgaactttacttatgtggtacccaatgccagaatgtaagagttgcaagtgattttgtgctgctattcattaaaacttgtattccagtcttgccagcttaaggagatcaagatattaagaggtatccttgatttattttccagtattcagtagtaaaattttcctgtccactgtgaatcaaagcctgagtcactctatttaaccttggacacactaataaggttttattttgattgtgttcgtttnnnnnnnnnnaatagtaaaatttctcctcctttaactcctcctaccccccaaggtaaggaaac

SEQ ID NO: 350574 - DNA, 737 bp, Homo Sapiens
cacagtgaaaccatggaagcaggaaggggagaaagtagaacatactgtagaattttcaaataatattctggaagggtaacacagatgtactgatccaccccatctgcttcccctgagagcatagagagggcttctgagctgggaagaagcttgtgaactgcccaagttgagagagcgctaacgatatgcttgacttctctatcactgcacaaaatgcttaactccccagtccccgtagcccacctgctactcagcacgatcagaccagcagaggcatcatccttccccagacaggttcctggggaggctttcagtatctgctggtggtgatgccaaggctggttttcttaaaacctgcctttataaagtcttagtgacctcctgggtatacagctgctcatgtgggtccacccacgcagaatcaagcagaagcaaataggtcccagctctgagactgcccacaggagtctacccttctccagtggggctttgctggtgggcagaacatgggcctgcgaatcacccttctacactgtcaccaacgcacctacaccccggcaggaggcaagttagttgctctaagtgcatgtggccaaagctgttgatggtgctgttccagaaatatcacctaagaatcctaaatgattcattaaagaaaacatggcattatgaacaagagtccatcaaaggaaagctgcaaatggcatcccattcaaaaagtccacatgccactgcat

SEQ ID NO: 350575 - DNA, 1636 bp, Homo Sapiens
agcgggggagtggtgacgtttcctcattgggcggaaggttcgctggcactccgttggtcttccagctggtgggagttgacgacgtggtgctgggcgttgggaccctactttatctagttcgggaagttgggttgtggggtcatacctgtctgtctgctcccagctttcttgggtttcttccgacggcgtggggcctcgctaaggaattcccggcccctcagggccacggctttagcggtgtcttttgcgagttcttcgtaagtacatcttaaagctgtcaagatggttctagcagaccttggaagaaaaataacatcagcattacgctcgttgagcaatgccaccattatcaatgaagaggtattgaatgctatgctaaaagaagtctgtaccgctttgttggaagcagatgttaatattaaactagtgaagcaactaagagaaaatgttaagtctgctattgatcttgaagagatggcatctggtcttaacaaaagaaaaatgattcagcatgctgtatttaaagaacttgtgaagcttgtagaccctggagttaaggcatggacacccactaaaggaaaacaaaatgtgattatgtttgttggattgcaagggagtggtaaaacaacaacatgttcaaagctagcatattattaccagaggaaaggttggaagacctgtttaatatgtgcagacacattcagagcaggggcttttgaccaactaaaacagaatgctaccaaagcaagaattccattttatggaagctatacagaaatggatcctgtcatcattgcttctgaaggagtagagaaatttaaaaatgaaaattttgaaattattattgttgatacaagtggccgccacaaacaagaagactctttgtttgaagaaatgcttcaagttgctaatgctatacaacctgataacattgtttatgtgatggatgcctccattgggcaggcttgtgaagcccaggctaaggcttttaaagataaagtagatgtagcctcagtaatagtgacaaaacttgatggccatgcaaaaggaggtggtgcactcagtgcagtcgctgccacaaaaagtccgattattttcattggtacaggggaacatatagatgactttgaacctttcaaaacacagccttttattagcaaacttcttggtatgggcgacattgaaggactgatagataaagtcaacgagttgaagttggatgacaatgaagcacttatagagaagttgaaacatggtcagtttacgttgcgagacatgtatgagcaatttcaaaatatcatgaaaatgggccccttcagtcagatcttggggatgatccctggttttgggacagattttatgagcaaaggaaatgaacaggagtcaatgggtaggcctaagaaaattatggacataatggattagtctgaatgatcaaacaacttgacaggtccgggtgtgtcccaaagttttttaggtaaacaaccctggaagaatccccaagagtttcaagagggttccgggtgtttttaacaacgaagatgtttcaagaaatttttggtcaactaaaataccaaaatgtttgcacaaagaagtgttaaaaatagaagtgggaggtgttttatagggacctttc

SEQ ID NO: 350576 - DNA, 1360 bp, Homo Sapiens
atggggaggaaacaggcagctgtcctcccggtagagctaagagcacactcagttccaccccagttcagctccaggaggtagaggggctgcccactctcagagtcccagatgctgggaggccttccctagaacagactccaaggatagtgagggccaacagggggtgggcggaccacaagattcaggacccacatccagtaatgacgcaagctcaagaagttgaaaagagaaaatcatctcaagggttgaggggagaagggaggccagcagggcgggggcaggaatccccactggggcagactcgctccaaggtcttcagtccagcttgaacttgtcctctgattccttcagcaggtacaggctgtcatcttccagaaagctgaaaaagaggacgtggacagggatggtgctgatgtgccagatggcatgggcatccaggacccagaagagcggtgggaagtcaagcagctcgagcagggacagcccctgcagcagcaagaccaccaccacgcacttgcgcacgtgaggcagccgccgctggttccacaggcaccaggccagccaccacaccacgttgaccaggccaatagccacgttggccaccaggttgtagccatagtcgaagcggatgaggctcaggtaggagacgtgcacggtcagcatgagcagcaggagagcccggaaggcactgaccacagctgggtgctgcagccccacggtcctgccccaccgtccagtgcttgctcagagggcaggtgtgcccatccccagagcagcattccctgaagcatctcctccccccaacattggtgcatggccactgaagtcactacccctctccccaccaaacaggccacagctgggcagcaagtgctacagctccttgtcaggagccagggcccccagtcctaccccagagtcctcacccaggacagctgatgtgttgggggttggggggcgtaggtgttgggagactagtgaagaaggcccccaggggaaggctgggtgacccctttctgcccccagggttcgattttgcccctgcagccacccaggcaggctcacctgacgcagcacaggtagattgagtgtaggatgacagtggaggcacagaagtagtccattttctctgtgaggtcagtgtccctggtgtggaaaactgtggaccagaaccatgcattgagggacacccaggcgaaggccacacaggtgtggtacatgggggaggaggctggcacgaaggtgcggtagcggcagagcatcaccaggctggccaggccattgagaaacgaggccacggccgatgccggctcttgaaagaacaggaaccgggagaagggccactgctagactcatgtag

SEQ ID NO: 350577 - DNA, 1088 bp, Homo Sapiens
  misc_feature (883)..(883): n is a, c, g, or t
  misc_feature (890)..(890): n is a, c, g, or t
  misc_feature (893)..(893): n is a, c, g, or t
  misc_feature (896)..(896): n is a, c, g, or t
  misc_feature (929)..(929): n is a, c, g, or t
  misc_feature (936)..(936): n is a, c, g, or t
  misc_feature (949)..(949): n is a, c, g, or t
  misc_feature (964)..(964): n is a, c, g, or t
  misc_feature (966)..(966): n is a, c, g, or t
  misc_feature (991)..(991): n is a, c, g, or t
  misc_feature (993)..(993): n is a, c, g, or t
  misc_feature (1006)..(1006): n is a, c, g, or t
  misc_feature (1020)..(1021): n is a, c, g, or t
  misc_feature (1031)..(1032): n is a, c, g, or t
  misc_feature (1034)..(1034): n is a, c, g, or t
  misc_feature (1040)..(1040): n is a, c, g, or t
  misc_feature (1045)..(1046): n is a, c, g, or t
  misc_feature (1050)..(1051): n is a, c, g, or t
  misc_feature (1053)..(1053): n is a, c, g, or t
  misc_feature (1056)..(1056): n is a, c, g, or t
  misc_feature (1058)..(1058): n is a, c, g, or t
  misc_feature (1062)..(1063): n is a, c, g, or t
  misc_feature (1071)..(1071): n is a, c, g, or t
  misc_feature (1075)..(1075): n is a, c, g, or t
  misc_feature (1080)..(1080): n is a, c, g, or t
cggcgagccagggagaaaggatggccggcctggcggcgcggttggtcctgctagctggggcagcggcgctggcgagcggctcccagggcgaccgtgagccggtgtaccgcgactgcgtactgcagtgcgaagagcagaactgctctgggggcgctctgaatcacttccgctcccgccagccaatctacatgagtctagcaggctggacctgtcgggacgactgtaagtatgagtgtatgtgggtcaccgttgggctctacctccaggaaggtcacaaagtgcctcagttccatggcaagtggcccttctcccggttcctgttctttcaagagccggcatcggccgtggcctcgtttctcaatggcctggccagcctggtgatgctctgccgctaccgcaccttcgtgccagcctcctcccccatgtaccacacctgtgtggccttcgcctgggtgtccctcaatgcatggttctggtccacagttttccacaccagggacactgacctcacagagaaaatggactacttctgtgcctccactgtcatcctacactcaatctacctgtgctgcgtcaggaccgtggggctgcagcacccagctgtggtcagtgccttccgggctctcctgctgctcatgctgaccgtgcacgtctcctacctgagcctcatccgcttcgactatggctacaacctggtggccaacgtggctattggcctggtcaacgtggtgtggtggctggcctggtgcctgtggaaccagcggcggctgcctcacgtgcgcaagtgcgtggtggtggtcttgctgctgcaggggctgtccctgctcgagctgcttgacttcccaccgctcttctggggtcctggatgcccatgccatctggnacatcancancanccctgtccacgtcctctttttcagctttctggnagatganagcctgtacctgnctgaaggaatcagangncaagttcaagctggactgaagaccntnggagcgagtctgncccagtggggatcnncccccgcccnncngggccnccctnncccnnanccntnagannattttttntttnaattnttaaattg

SEQ ID NO: 350578 - DNA, 1054 bp, Homo Sapiens
  misc_feature (12)..(12): n is a, c, g, or t
  misc_feature (25)..(25): n is a, c, g, or t
  misc_feature (48)..(48): n is a, c, g, or t
  misc_feature (67)..(67): n is a, c, g, or t
  misc_feature (72)..(72): n is a, c, g, or t
  misc_feature (91)..(91): n is a, c, g, or t
  misc_feature (154)..(154): n is a, c, g, or t
  misc_feature (178)..(178): n is a, c, g, or t
acgccccataanccccagcaatttnggaaggccaaagcaggcaagatnactttgaggccaagagttnaaganccagcctaagcccctctgnaggctgaggcatgagaatagcttgaaccttctgtgtgtacggctgatacataggtccagttgnacctcttcactatgtccaccatgnaccttgcctgctgagcatctgaaggcacaaccctcatgaaatatttgaacagagtcttgtcactcagatccatgatggttgctgagtaagcaatctgaggtatgttgaaaagctggagcaaattctggacctgaatggctacagaactggaaccaggcccaatgacccctactatgggcttcttggagcgggaggaagaggaggagccatccacagagcataccaagccctcttcctcttccgaagaaatgagggaatctcttatgaactcaatgctctgctctagggccacagccgaatgccagcaggaatcccttatctcacagcccagtgtgatgttgggcaagagtgtggggtctgaattgatcctttccagggtatgcagcatggcctccactctctgaatgccatactgttcacggaccgccccacacttcctctcatgaacttcgtccacagcaggctggtgatgaacagaaaagagagctccaataatgatgtcacccggcatgtgagccaccaccctcctctcactggactgtgcactcccacggacatcttctttcaaaagtaagactgacaggatcaacagaaggaccattttaggaaaggagttcaagccaataaagatagcatggtggggaaaattcaggagggttctgatagctacgaacaagcgatgtcctacgttgagtcgcaaatcaagaaattagccagcaattcagatgtattttctaaaggaccattttgtccccatgtaccatttagttagatgatccatgtggtcatgatcttctaaaccaggtgcgcgccctgagccttgcgcccccaggcagccgctcctcgagggcttcctgcgctctcgtagcggccttg

SEQ ID NO: 350579 - DNA, 1080 bp, Homo Sapiens
  misc_feature (855)..(855): n is a, c, g, or t
  misc_feature (861)..(861): n is a, c, g, or t
  misc_feature (866)..(869): n is a, c, g, or t
  misc_feature (922)..(922): n is a, c, g, or t
gctggtaccggtccggaattcccgggatcggaaatctagttcgggaaaagtgtgaggggctcttcacgtggggaaggaacagcaggcgcggaggagggggcaagcgtgtgtgagattcagtggtccatgcgtgcgtttgtcgtgtaagggtcattcctggggtttggagtgggggaacaaatcaatgtggctgtttttccgtggaaagaattcccactgcagtgtcccggagcctgcgtgtggtgggcaagctcctcaaatggtatctcacagggaataggggagtcttgaaaacgcagcttcggcagtaggaacatgaacctcttacctaaaagttccagggagtttggctccgttgactattgggagaagttcttccagcagcgaggaaagaaagctttcgagtggtatggaacctacctggaactgtgcggggtgctacataaatatatcaagcccagggaaaaggtgctggtgattgggtgtggcaactcagaactgagtgagcaactgtatgatgtgggctatcgggatatagtgaacatcgacatcagtgaggttgtcatcaagcaaatgaaggaatgtaatgccacccgacggccccagatgagcttcttgaagatggacatgacgcagatggagtttcctgatgcctcgttccaggtggtgttggacaagggcaccctggatgctgtcctgacagatgaggaagagaagaccttacaacaggtggacaggatgctggctgaggttggccgtgtcctgcaaggtgggcggtcgctatctctgcatctccctggctcaggctcacatcctgaagaaagcagtgggccacttctcccgggaggggggggnatggtnaaggnnnnaccaaggggggccaccacccaggacccaggggtgggaaaacaaaacccccagntcttccctgccctgtcctttggccctccttcatgacccaagttccaggccaggtccctggggtctttccctctcaaaatcttttggactcggggggcctccgggaccagccacaaatcctgttccggtttgggtaaattgcccaaccgcttgtggcat

SEQ ID NO: 350580 - DNA, 1068 bp, Homo Sapiens
gggaattctatactaagttcagctctaccaagaatttcagggttgagcccagaccttaccttgccatgggcaaaggcccctaccacaaaaacaataggatcactgctgggcaccagctcacgcacatcactgacaaccgggatggaaaaagaagtgccaactttcatacatccaactggaaagtgatctgatactggattcttaattaccttcaaaagcttctgggggccatcagctgctcggaacactgagcttgtggtaaaagttgaactagaagggggaaaaaagagttcagagctagatggagaccacagtccttctgtcccagtcatcgaacaaggaaaaccccatggataagataagttccctgtgtgcttaatatctagactggactcctgaaatgttaggaacaaacagttgccaagcatatggctagctgtacagtgatgggttcagactccctctttcactcagccaggaagctactgcaagaacaggagtggagtttccacaaacatagaaaaataataacagtccttgtcctggtattaatcatgttgttctcccattttctcgcttaaaaatccacatttagttctcccttttcctcttcctcccttcttccctactgacaagttcattctaactttgttctaaggcttcttacccatgaggccacaaaagcggtcaaaggttctgggaattcgggtctggggattcacttcaatcagaacattcttctgtgtatggatataaacctgtagcaagccagctcggttcaggggactatccatcagcatcagcaaactctggtgggtgatatctggccgcgcttccccagggtcccgtccattcttcaacaatatagacttgtgcttgtcacagttgagtagctcatatgtcttccctaccttgactgtctccagactggccccttccagcaccacaataagcctacggcctccgatcttgtttcctgcccctagtcggggccgcttgggtggcagagcatcccagtcctgtgcctgctccccaccgcttcgttcacgaggcttgaatccatcactg

SEQ ID NO: 350581 - DNA, 1076 bp, Homo Sapiens
  misc_feature (279)..(347): n is a, c, g, or t
ctcccaattcctccgccttcttctcatgtgtttgctagtgtgcaatacctcacctgtttggaactcaacaacgtcccctcctgcaaaacgcacctcagaacgtcataaagccatcatgactttactctggaatagatacgatccagacacctcatcaacaaagaatcctcagtttctctgtgctgtggatgtaactgaatgaccgagccaagcagtccccacttagattcattcttcacttcagacattcaaaaatacagtaacaagctgggtgtggtnnnnnnnnnnnnnnnnnnnnnnnnnnnnnnnnnnnnnnnnnnnnnnnnnnnnnnnnnnnnnnnnnnnnntcgcatctcttgccatgggcaaaggcccctaccacaaaaacaataggatcactgctgggcaccagctcacgcacatcactgacaaccgggatggaaaaagaagtgccaacttttcatacatccaactggaaaagtgatctgatactggattcttaattaccttcaaaagcttctggggggccatcagctgctcgaacactgagcctgtgtaaaagttgaaccatgaggccacaaaagcgggtcaaaggttctgggaattcgggtctggggattcacttcaatcagaacattcttctgtgtatggatataaacctgtagcaagccagctcggttcaggggactatccatcagcatcagcaaactctggtgggtgatatctggccgcgcttccccagggtcccgtccattcttcaacaatatagacttgtgcttgtcacagttgagtagctcatatgtcttccctaccttgactgtctccagactggccccttccagcaccacaataagcctacggcctccgatcttgtttcctgcccctagtcggggccgcttgggtggcagagcatcccagtcctgtgcctgctccccaccgcttcgttcacgaggcttgaatccatcgctgggcgcggccatcttgcaacaataccggaagttgcgctaacgctcttaaataagaacagcgcggcttctaatcacaaatttccttccggctgccattttgaaagtccc

SEQ ID NO: 350582 - DNA, 1047 bp, Homo Sapiens
  misc_feature (952)..(954): n is a, c, g, or t
  misc_feature (957)..(958): n is a, c, g, or t
  misc_feature (960)..(969): n is a, c, g, or t
  misc_feature (971)..(973): n is a, c, g, or t
  misc_feature (975)..(975): n is a, c, g, or t
gggagggacacaacttcggctaggtacgaggctgggtggtgaattcggcacgaggcccagtgatggattcaagcctcgtgaacgaagcggtggggagcaggcacaggactgggatgctctgccacccaagcggccccgactaggggcaggaaacaagatcggaggccgtaggcttattgtggtgctggaaggggccagtctggagacagtcaaggtagggaagacatatgagctactcaactgtgacaagcacaagtctatattgttgaagaatggacgggaccctggggaagcgcggccagatatcacccaccagagtttgctgatgctgatggatagtcccctgaaccgagctggcttgctacaggtttatatccatacacagaagaatgttctgattgaagtgaatccccagacccgaattcccagaacctttgaccgcttttgtggcctcatggttcaacttttacacaagctcagtgttcgagcagctgatggcccccagaagcttttgaaggtaattaagaatccagtatcagatcactttccagttggatgtatgaaagttggcacttctttttccatcccggttgtcagtgatgtgcgtgagctggtgcccagcagtgatcctattgtttttgtggtaggggcctttgcccatggcaaggtcagtgtggagtatacagagaagatggtgtccatcagtaactaccccctttctgctgccctcacctgtgcaaaacttaccacagcctttgaggaagtatggggggtcatttgacagtagtagaacctgttctgaaaccagaaactgttgatgtcacatcctttgaccctggtctgagctgactgctggaagatgatctttctgcactgagactgtggagtttggggaagccaaggctgtacatttgctatttgtttatcctatgaatactgttcttgcaaaaannnttnntnnnnnnnnnnannntntcctggtcggccccttcggccctcgagaactttctaaaacccttctttggccccccggccccataaggtaag

SEQ ID NO: 350583 - DNA, 781 bp, Homo Sapiens
actgatagagaactcgatccactgcagataatgttcaaaatatcctattattgttctcccatacttcttagtttcctcaataataacagaggaagtattgtttgtgatgaagttctgagcaaaatccagagaagctagaatcctagttactctccaacaatccattccctgtgcgttgaagtatcttgacgctttggtatagagtgctcagtgattgttctataggaaggactcgttgctggtgaattgttttaatagtttgtgcatctcttttcagggagttcctcaaatttcctgggggcaaactgtttgcttttgcttctagatcatatgcaaatgataaaagattcactcctgcgggggatttaccagtctgagccaagtagctgtcataattcattctgtctattccacaagcagcaaaatcctgaaggttttttcttcctgctgcacccaagcagaaagatattaagatttaccttcagactttccaattcactgcttatgcttccagtatgctcattaatgttgagatgttcactgatattgaagctgttctgcaggtgaagagtgccgtaagtgcctctattttttttgcagtcactgtaaacttgttcaaaagtgagcttcatttttgatttattaaatagcttcccagagagatagtattcccagtcttcatttagtaagtagggtgtatccaaaacccggaataattccttgctcgtgtaaggttcacagatcagtttttccacatttgcaccaaagacaaagggaaaca

SEQ ID NO: 350584 - DNA, 774 bp, Homo Sapiens
  misc_feature (101)..(255): n is a, c, g, or t
  misc_feature (259)..(259): n is a, c, g, or t
  misc_feature (263)..(263): n is a, c, g, or t
  misc_feature (701)..(701): n is a, c, g, or t
  misc_feature (706)..(706): n is a, c, g, or t
  misc_feature (746)..(746): n is a, c, g, or t
atgacttggtagatccttgtcctcagcacctcacgtgagagaagggagtcagccagccggccccctgcttggtgctcgtgaccagctcgcaccccttctgnnnnnnnnnnnnnnnnnnnnnnnnnnnnnnnnnnnnnnnnnnnnnnnnnnnnnnnnnnnnnnnnnnnnnnnnnnnnnnnnnnnnnnnnnnnnnnnnnnnnnnnnnnnnnnnnnnnnnnnnnnnnnnnnnnnnnnnnnnnnnnnnnnnnnnnnnnntcangcanggaggaggccatcccaagccgagattaacaggacttgacataagccattagtttgtagctttgacaagtaattatgaatttttgttgcttattttgcaaaggatgcttttaagatcaaaataataaccctacctaaagtctagctccactgctatgggtcatactcttcagcctcccaacagggcagagagagagagctactgaggcttgtctaggttgccaggctaactgggcggcttgtccatattcaccccatggattgcaccatggcactctttgatttttccactgcaatggcaagtaatctcatcagtcataatagagcagtcccgaatgcgtgcagattctaaaagcagggctttaggagagaaacactgccagggggggaattagttttgggggagggttttcccaaaataacggtcatcctacttgggnttatnccaccctttaaatatggaagcctgtttacctccaggaagntttctgaggaggatgatgtgaaaagaca

SEQ ID NO: 350585 - DNA, 1431 bp, Homo Sapiens
  misc_feature (999)..(1050): n is a, c, g, or t
  misc_feature (1135)..(1388): n is a, c, g, or t
ttttggatttctattcatttttattcattcctccaaagagcaccacaggccaaccacacccttgatgtgtccttcatggttccccactgcagtggacacaaatccctccctcattatccaggcatggatggaactctgctgtggtgaggaggttgtctcgcccactcacccaagttttccatgcctgttctgcttttgatggcaatgccaaaattcatcatacatttccttgaattcctgccttcaagggtcttccagccctgtggtgccatgcagacacacttcagtggcggccagtgatctgtctacaagggagtcttagtcttttctgcttggatgctcccagggacagatgcctgccaacaaccttatgtcttcacaaagactaaaatggaatcccattaaaagttatgatttaaaaggcgaccacccccaaaagaagtcataacactcaagggtgtcaatatatacaactgtgtaaacacaaccaatctacaactatatcaacacaaccagcactcctctatgggcacagacacacacacaaaattgtcttgctttctcagatatgatctctggcatgactcctgctggcatgagggcagaggaaattgagaggagcaaagcatatagcagtgatgtcagacaggaccaaatcagagacagggtcaaagtggcagaaaaatgaggagcacactccgagcaaaggcatgggggtgagacaaaggcacccagactagagccatcttggtgctgcccaggggtgggtggcactcatgtttgagctccatgtgtcaggcttttcaggaaagggtgtactatgttatgtgtctgtgtgcatattgtgtgcctgcatgtacatacatacgctgaattctcaccataaccatgtgaggtagatgccatttgtagagtgacttgcccaagtcagtggaaggactatctgcccctagagctagactgatagaattttctatgttgatggaagtattctgtacnnnnnnnnnnnnnnnnnnnnnnnnnnnnnnnnnnnnnnnnnnnnnnnnnnnntgttgcactactgccaatgaaacatagaattttaagttgtatttacttttaattgaacagctgaggccaggtgtggtggcccatnnnnnnnnnnnnnnnnnnnnnnnnnnnnnnnnnnnnnnnnnnnnnnnnnnnnnnnnnnnnnnnnnnnnnnnnnnnnnnnnnnnnnnnnnnnnnnnnnnnnnnnnnnnnnnnnnnnnnnnnnnnnnnnnnnnnnnnnnnnnnnnnnnnnnnnnnnnnnnnnnnnnnnnnnnnnnnnnnnnnnnnnnnnnnnnnnnnnnnnnnnnnnnnnnnnnnnnnnnnnnnnnnnnnnnnnnnnnnnnnnnnnnnnnnnnnnntctgtctcaaaacaaaacaaaacaacccagcaacttggtcaac

SEQ ID NO: 350586 - DNA, 1367 bp, Homo Sapiens
  misc_feature (1237)..(1252): n is a, c, g, or t
gaaaaaatattcaaaatggcggacggaggagcagcgagtcaagatgagagttcagccgcggcggcagcagcagcagactcaagaatgaacaatccgtcagaaaccagtaaaccatctatggagagtggagatggcaacacaggcacacaaaccaatggtctggactttcagaagcagcctgtgcctgtaggaggagcaatctcaacagcccaggcgcaggctttccttggacatctccatcaggtccaactcgctggaacaagtttacaggctgctgctcagtctttaaatgtacagtctaaatctaatgaagaatcgggggattcgcagcagccaagccagccttcccagcagccttcagtgcaggcagccattccccagacccagcttatgctagctggaggacagataactgggcttactttgacgcctgcccagcaacagttactactccagcaggcacaggcacaggcacagctgctggctgctgcagtgcagcagcactccgccagccagcagcacagtgctgctggagccaccatctccgcctctgctgccacgcccatgacgcagatccccctgtctcagcccatacagatcgcacaggatcttcaacaactgcaacagcttcaacagcagaatctcaacctgcaacagtttgtgttggtgcatccaaccaccaatttgcagccagcgcagtttatcatctcacagacgccccagggccagcagggtctcctgcaagcgcaaaatcttctaacgcaactacctcagcaaagccaagccaacctcctacagtcgcagccaagcatcaccctcacctcccagccagcaaccccaacacgcacaatagcagcaaccccaattcagacacttccacagagccagtcaacaccaaagcgaatggatactcccagcttggaggagcccagtgaccttgaggagcttgagcagttagccaagaccttcaaacaaagacgaatcaaacttggattcacttcacgccacctccacctctgctgagtccatccagaactctctcttcacagtggcctctgccagcggggctgcgtccaccaccaccaccgcctccaaggcacagtgagctgggcagagctgggctgccagaagcctttttcactctgcagtgtgattggactgccagccaggttaataaactgaaaaatgtgattggcttcctctcgccgtgttgtgagggcaaaggagagaagggagnnnnnnnnnnnnnnnnccacacacacccatacacacataccagaaaaagaaagaaaggatggagacggaacatttgcctaattttgtaataaaacactgtcttttcaggattgcttcatggattggagaac

SEQ ID NO: 350587 - DNA, 1160 bp, Homo Sapiens
aaaatgctgtcaaaaaggaggagagctggtttctctggccctcacctaccagaagcatctctgtctcccggcgttcttgcccactccacaatacccgggtatggtacttcctgaaactgtgccagaacagtacctgaggtttaactgttgaatgaacactaaagcgttccccagtcctgcaaaaccttctgaaaacaacaataaatttgcatattctttttattgtgtcataattgctgaaaattaagtatacatatatgtgaaaatttaagtcccattctccaactaaagtttatggtgcctaattccgaagcaaatttaagcaagttctgactacacaaactccttatgtttcctttcataaagcctgctagcattcgacagtttgcctccagcttttctaaaaggttacttagcatgctcggagacctcagcttctgagggttcagctcagtagcctggagtgacaggtaggaccctgaaaatttgctgatgcgagtacagtgatgaacaaagaaccttccagaatagacacagatgacatgtatcacaattctgctccaaatatggtgtggtctgaggacagtgctgtgcctggcctttccccttcaacacgccagctgctccctcagagtgaacagggctttgctactctgctcaggtcaaaaggtaagatttttgtaggagaggtaaacaatctcaaagttagagatgtacatggggatgaagaagtaagtgcacttggagggaagggtccggcgagaccttgccaggtgggcttgagaaacgcagcaactgccaagtgaacactctcaggaaaccacttcaagtggcggattctcacagatggaggatctggccactgccatctgagaagctcgtgtctaccagctctagttcaataatcatgcaaaatcaacccagctgacaagtcttttcctctctgagactcatgaaacccatctttgaaggcacaaatctgcaagggtggcctctcagcagtttctgccattccaagtcagctttgaatcatgacctgccacaggcctccttacctgggaagaagtatgggatcttcttatcttgatcccacagggtgaagccttccctaatttcctgtcctttggatctaggatattgagtcagaaatgaaggtatcc

SEQ ID NO: 350588 - DNA, 1677 bp, Homo Sapiens
  misc_feature (133)..(133): n is a, c, g, or t
  misc_feature (1408)..(1408): n is a, c, g, or t
  misc_feature (1534)..(1534): n is a, c, g, or t
gggaaacagaggccgaggggaggccggcctacaagacccagaagccttagcgccggcaaggcggccagaagtagctctgctctctccgcgaagaccctcgggggattccgcctccacccatttcccggatagnagcgctatgcatgcagggacttgtagtctcaggctccccagccggctgggctgggcagcactccgggcggagtcgacgagcgcaggatgtgagctcacagcttgggactgctgaggggcaggcggctgcaggctaggggcggctcggagtccgctggccacccagctgagaggagaggcgcccccggggacgcactgagattatgaggctctggcctccactggccactcactcgtgaccctttccaccacggcggagccttccaagcctacctcctgccgtgtggtgatctacctgcagcgggagatgtcgggggacacctgcctgtgcccagcctcaggggccaagcccaagctcagtggcttcaagggaggagggttgggcaacaagtatgtccagctcaacgtgggcggctctctgtactacaccactgtgcgggccctgacccgccacgacaccatgctcaaggccatgttcagtgggcgcatggaggtgctgaccgacaaagaaggctggatcctcatagaccgttgtggaaagcactttggcaccattttgaattacctccgagatgacaccatcaccctccctcagaaccggcaagaaatcaaggaattgatggctgaagcaaagtattacctcatccaggggctggtgaatatgtgccagagtgccctgcaggacaagaaggactcctaccagcctgtgtgcaacatccccatcatcacatccctaaaggaggaggagcggctcatcgaatcctccaccaagcccgtggtgaagctgctgtacaacagaagcaacaacaagtattcctacaccagcaactctgacgaccacctgctgaaaaacatcgagctgtttgacaagctctccctgcgcttcaacggccgcgtgctcttcatcaaggatgtcattggtgacgagatctgctgctggtccttttatggccagggccgtaagctggcagaggtgtgctgtacctccatcgtgtatgccacggagaagaagcagaccaaggtggaatttcccagaggcccgaatctatgaggagacactcaacgtcctactctatgagactcaccgcgtccccgacaactccttgttggaggccacaaagccgtaggccgcagccagggcttcccccagtgaagatgaggagacctttgaactgcgggaccgtgtccgccgcatccacgtcaagcgctacagcacttacgatgaccggcagctcggccaccagtctacccatcgcgactgaccagaccctcaggnagtcagggcacgggaggccctatctcccatcctgtggaacccgccccattggccaccccatgctgctgctgcctgggtctctgctctagcacccagaggcatgacaggccctgcctcaaaggtcanaagggtctggggcagaggaagggcaccacatttcccctggccttggccccctgaaaaaccttctgggaaaaactggggccctgggccccaattttgggcttaaccaattaaacccctttccctggcccccaaacggaaaacct

SEQ ID NO: 350589 - DNA, 613 bp, Homo Sapiens
atgctgctgctgccctgggtctctgctctagcacccagaggcatgaaaggccctgctcagaggtcagagggtctgggcagaggagggacccacattcccctgccttgcccctgagcacttctggaaactgcgtcctgtcctatctgctcaccatcacccttcctgcccgacggagctgcttctgctccctggggcatatggactgacccacctcctgctgagaaccttcccctaggccctgtgcagaagggctactgccccttaggcctcagctgggggaaaggcagttctggtgctgtagaggccctggtgcagaaagtgggacgtcttttttcctaaggtgtttaagcacaggcttgataagtttggtttttaaaaaataatctaggaaatgaataattctaaatctagtaatgaggaaactgagcatttcttttgccctccagggtgccaagaccctacatatgacagaacccttggcccttctccatgcctgtgggatctgtttctttaaagcactttgtactgttattcaggaggttgataatctccttgacccatgtctttctaccctaatccccacttccctgcagaatcaatactgagggagggg

SEQ ID NO: 350590 - DNA, 511 bp, Homo Sapiens
  misc_feature (55)..(55): n is a, c, g, or t
  misc_feature (65)..(65): n is a, c, g, or t
  misc_feature (182)..(182): n is a, c, g, or t
cccttcctgcccccgaaggaaactgccttcctgcctcccctggggccaaaaaggnactgaacccnaccctccctgcctgaaaaaccttcccccctaaggcccctgtgccaagaaaggcctaactgcccccttaaggccctcagctgggggaaaggcagttctggtgcctgtaagaggccccnggtgcagaaagtgggacgtcttttttccctaaggtgtttaagcacaggcttgataagtttggtttttaaaaaataatctaggaaatgaataattctaaatctagtaatgaggaaactgagcatttcttttgccctccagggtgccaagaccctacatatgacagaacccttggcccttctccatgcctgtgggatctgtttctttaaagcactttgtactgttattcaggaggttgataatctccttgacccatgtctttctaccctaatccccacttccctgcagaatcaatctgagggaggggataaagaggaagcaataaaaaaaa

SEQ ID NO: 350591 - DNA, 767 bp, Homo Sapiens
agagatgaaggagaaatagtacagagtttggttccagagatcttggttcacggtggttctgaattgaatacttccctcccccacgtcaccaccctggaaatccaggtatgaaaaatataagcaagcctcagagcagtgcaatataatgtggaggaaaaatcctaggacaagatgtcttaagtcctggattgcaataatggttctgccactaacttgtcatgtgaacttggataagtcgttcagtttctttccacatgttttcccctctctgaatcaaggatttagcctactttaccctactaccatcacagactgtcataagaaccacaaggagtataaaaggtatgcttcaaaatgtcactgtcctagtcttctcttcattgagaagagaaaatatttgactaaaaaaaattgactcttcacttgttcactgatttctgacaaaattgatagtccatagatgtttctacccagagaatggtggtttccaaagtatggtttgtattggtacagtcaggtgatttccaagggctgtgtccaagtagtattgacatatacgtattgacatataagactatgtctccaattacagtatggattctttgatggatcttctccaaagcatcactgctctcagaggcagtgggtgtggtagaaaatgcattagactaatagccaaaagactcgtgttctggtctcagatctgtcattaaataactgcatgaccttgaacaagtcatttaatttctctgggtctcagttttcta

SEQ ID NO: 350592 - DNA, 1065 bp, Homo Sapiens
  misc_feature (4)..(4): n is a, c, g, or t
  misc_feature (11)..(12): n is a, c, g, or t
  misc_feature (16)..(16): n is a, c, g, or t
  misc_feature (27)..(27): n is a, c, g, or t
  misc_feature (35)..(36): n is a, c, g, or t
  misc_feature (39)..(39): n is a, c, g, or t
  misc_feature (41)..(41): n is a, c, g, or t
  misc_feature (49)..(49): n is a, c, g, or t
  misc_feature (59)..(59): n is a, c, g, or t
  misc_feature (66)..(66): n is a, c, g, or t
  misc_feature (75)..(76): n is a, c, g, or t
  misc_feature (81)..(82): n is a, c, g, or t
  misc_feature (88)..(88): n is a, c, g, or t
  misc_feature (91)..(91): n is a, c, g, or t
  misc_feature (96)..(96): n is a, c, g, or t
  misc_feature (105)..(105): n is a, c, g, or t
  misc_feature (108)..(108): n is a, c, g, or t
  misc_feature (115)..(115): n is a, c, g, or t
  misc_feature (119)..(119): n is a, c, g, or t
  misc_feature (129)..(129): n is a, c, g, or t
  misc_feature (136)..(136): n is a, c, g, or t
  misc_feature (148)..(148): n is a, c, g, or t
  misc_feature (151)..(151): n is a, c, g, or t
  misc_feature (165)..(165): n is a, c, g, or t
  misc_feature (168)..(168): n is a, c, g, or t
  misc_feature (176)..(176): n is a, c, g, or t
  misc_feature (196)..(196): n is a, c, g, or t
  misc_feature (492)..(492): n is a, c, g, or t
accnggagagnntccnacaggccccancccccccnnaangnggactccnccacgtcctncccactntagtctttnnaagcnnccactntgngcagncccatgggncgntggggtnggcngtgacatacncctctangaagtcccggcnggngatgtcttctatgnccncccaagtntttttcagtgcccggcaaangggatacagttccgactgtgtgacataggaagcatagccatcatcaaagaaaatgagaaaccaactgtctggatggcaataagggtgcctttgtgccaagtcttagttctcttcttgcccagaattcgcatgctgactatcaggtcaccatctttgcttagttctccagacatctgactcaaggttcctttatgcagatcctgggaactgctcttcttgttgacagcatccatgaacttctgaacatcttgagctgactttcttaaggcagccatagcttcacggagcttctggtnttttggagttctgctcccagcatcacctgaatcaatactgaggacatcatcatcttcatcaggaatctcaattatttctgtaggccgggaagattcgtcctcagagctactgtcccggtattgtagtcccagcttggagtagaagtccttcaccaaagactcacaattagtcactgccctggatgcatcatcaaagagttggtcaacgtgagccacctcagattctttctgtattacccatgtctctaactctgctagctgcttcttgcgttgctgtacacaatccatcttctccagttcctcatcgatgaaatgccgaagttcctccatagagatacccagttcctcaaccactgcctgttgcagctctgcaatctcttcagactccactgtagctgttgctgcatccaaaccaatgcacccaggaagggaagacatgcttttgtcctctcccgtcttccagcttcaagggctctttttcaccaaccagaccccagactcacaactcaggggtcggcctcgacggaaaagagcgaaagcgaagggataagggaggagggggaggggaggaaa

SEQ ID NO: 350593 - DNA, 2100 bp, Homo Sapiens
  misc_feature (1899)..(1899): n is a, c, g, or t
  misc_feature (2046)..(2055): n is a, c, g, or t
aagatgggaatcaggtctggctctatgctggcattgtagctgagacaccaaacgtcaaaaacaagctcaggtttctcattttctttgatgatggctatgcttcctatgtcacacagtcggaactgtatcccatttgccggccactgaaaaagacttgggaggacatagaagacatctcctgccgtgacttcatagaggagtatgtcactgcctaccccaaccgccccatggtactgctcaagagtggccagcttatcaagactgagtgggaaggcacgtggtggaagtcccgagttgaggaggtggatggcagcctagtcaggatcctcttcctggatgacaaaagatgtgagtggatctatcgaggctctacacggctggagcccatgttcagcatgaaaacatcctcagcctctgcactggagaagaagcaaggacagctcaggacacgtccaaatatgggtgctgtgaggagcaaaggccctgttgtccagtacacacaggatctgaccggtactggaacccagttcaagccagtggaacccccacagcctacagctccacctgccccacctttcccacctgctccacctctatccccccaagcaggtgacagtgaaagcttggaaagccagcttgcccagtcacggaagcaggtagccaaaaagagcacgtcctttcgaccaggatctgtgggctctggtcattcctcccctacatctcctgcactcagtggaaaatgtctctggctgggaaaacccgggatcaaccagacatatagatcacctttaggctccacagcctctgccccagcaccctcagcactcccggcccctccagcacccccagtcttccatggcatgctggagcgggccccagcagagccctcctaccgtgctcccatggagaagcttttctacttacctcatgtctgcagctatacctgtctgtctcgagtcagacctatgaggaatgagcagtaccggggcaagaaccctctgctggtcccgttactatatgacttccggcggatgacagcccggcgtcgagttaaccgcaagatgggctttcatgttatctataagacaccttgtggtctctgccttcggacaatgcaggagatagaacgctaccttttcgagactggctgtgacttcctcttcctggagatgttctgtttggatccatatgttcttgtggaccgaaagtttcagccctataagcctttttactatattttggacatcacttatgggaaggaagatgttcccctatcctgtgtcaatgagattgacacaacccctccaccccaggtggcctacagcaaggaacgtatcccgggcaagggtgttttcattaacacaggccctgaatttctggttggctgtgactgcaaggatgggtgtcgggacaagtccaagtgtgcctgccatcaactaactatccaggctacagcctgtaccccaggaggccaaatcaaccctaactctggctaccagtacaagagactagaagagtgtctacccacaggggtatatgagtgtaacaaacgctgcaaatgtgacccaaacatgtgcacaaaccggttggtgcaacatggactacaagttcggctacagctattcaagacacagaacaagggctggggtatccgctgcttggatgacattgccaaaggctcttttgtttgtatttatgcaggcaaaatcctgacagatgactttgcagacaaggaaggtctggaaatggggtgatgagaactttgcaaatctggaccatatcgagagcggagaaaacttcaaagaagggatatgaaagtgatgccccctgttcctctgacagcagtggtgtagacttgaaggaccaggaagatggcaacagcggtacagaggaccctgnaagagtccaatgatgatagctcagatgataacttctggaaggatgaggacttcagcaccagttcagtgtggggggagctatgctacccggagggagacccggggccagaaagaaaacggactctctgaaaacaccttccagggactnnnnnnnnnnaaatactgggacccccacatatttcctggtcctccctccaacccc

SEQ ID NO: 350594 - DNA, 671 bp, Homo Sapiens
ggaaggtgaaatttgacaacaaaggaaagagtctactgtcggggaaccatattgcctatgattaccaccctcctgctgacaagctgtatgtgggcagtcgggtggtcgccaaatacaaagatgggaatcaggtctggctctatgctggcattgtagctgagacaccaaacgtcaaaaacaagctcaggtttctcattttctttgatgatggctatgcttcctatgtcacacagtcggaactgtatcccatttgccggccactgaaaaagacttgggaggacatagaagacatctcctgccgtgacttcatagaggagtatgtcactgcctaccccaaccgccccatggtactgctcaagagtggccagcttatcaagactgagtgggaaggcacgtggtggaagtcccgagttgaggaggtggatggcagcctagtcaggatcctcttcctggtactgttcttctctacaattttggaggcagaggttggtggggggggaacttaagaagcagtaatgaggatggttttatagctattccatagccttcctctttcttatcctcgtatgtgttctcactgtttttggtcaaattttactttgccctttttgttgttcctctgcaggtcattgttgaaaataaattatctgaattataacttccccacactt

SEQ ID NO: 350595 - DNA, 449 bp, Homo Sapiens
  misc_feature (405)..(405): n is a, c, g, or t
  misc_feature (414)..(414): n is a, c, g, or t
ctcctaactctcaagttgagaagaaagaaaaacaggaagaaagtagtggactggattgtcttccctggagtgcatcgtgttgtgatccagagaagtagaagctatgataaaataatttctgtggatcatgttaaatatcataacccccagatctttctgctgtcactcttcttttataggtttctcattttctttgatgatggctatgcttcctatgtcacacagtcggaactgtatcccatttgccggccacgtgagtgttttctcccttattccttagctcagttttctcctctaccttgtatttcttcttaggacatccagttgaaaagccctagtgtttttggtatttcagtcttcaaagaggcattaagtttggttgatgtcttttggctcccagaggtncagtttggntcccaaaaggaggttacagtttttatttgtttcat

SEQ ID NO: 350596 - DNA, 1209 bp, Homo Sapiens
  misc_feature (30)..(30): n is a, c, g, or t
  misc_feature (111)..(111): n is a, c, g, or t
tagcctccaaatgatggtccatccacctcnaaaatatccttgaaagggttatagacccccgaaaaagaacctggcaaaatcctttggactcccctgtttttccaaaaatantccttgaaagccgaagaaataagcctccattggttaatgaagcccaaagatccttcaaattgttccactcctggaatgcgaatatccgttgaagaagttttggaagcaagaacagtaattccgagcacctccctaagaagtgaaaacccattacattcacctgatcatcatctgactgactggcaaaacctgggaagagactaagaagactgactggagatttgttggtatcaatagtaattttgtggcttgcagtttttgaaggctgacctggtaggcaaattaactttaggggaagtctaaatttacattggataactcgcggaatgccatcaggatttcgattcataaattcaaaggtgaactgatcacaagtcaattctaatggtggttgcacgtagactgataatttggctttttgcaatagcactctgttctgcagtgtgaccttcaccgtgacagaagggacaaggtcagttcccacctcaacatcggtcgcttgagaaactgaatcaaagttaggagaaaccacgacagaaacgttcaagtcatcttcgtctctcagtcatgggccaaacaccttgtgatttggttaacatctttgatgattgttctgaaggttctttcatgttcgtacatcaaggttcatcatagtttagttctcgagattgaacgtttggagcttggaacagagaaggatctgtccccaggtatgaacactgcaagtgaccatcatcactcagagtgactatcactcccttgtaaatcatgcaaacagcccactcttactgctacaggaatgtggggaagttgggtggcccacttcagtgtcacatcttgataaatatgcagcatgttattatgatttccaatcaaagtatttattgttccttcagaaactgagcaatatggcagaaaacaacttgggctccaatcaagcttcttcatgaatcgaatttgtccattatccttaaggcaaaaaaagtttctctcaccaagaacaaaaacagaggatgccgactgattgaaagagacaataccgaacgcgtggctgacgcgtggtcgacgatatcccgaaaagtccggaccgtaccagcc

SEQ ID NO: 350597 - DNA, 2101 bp, Homo Sapiens
  misc_feature (1726)..(1748): n is a, c, g, or t
ggggctccggagtgcagctaaaggccaccaaggcagaacaggcagaagggatggaatttggcttcaagatgcccaagatgaccatgcccaagctagggagggcagagtccccatcacgtggcaagccaggcgaggcgggtgctgaggtctcagggaagctggtaacacttccctgtctgcagccagaggtggatggtgaggctcatgtgggtgtccctctctcactctgccttcagtggagctagacctgccaggagcacttggcctgcaggggcaggtcccagccgctaaaatgggcaagggagagcgggctgagggcccgcaggtggcagcaggggtcagggaagtgggcttccgagtgccctctgttgaaattgtcaccccacagctgcccgccgtggaaattgaggaagggcggctggagatgatggagacaaaagtcaagccctcttccaagttctccttacctaagtttggactctcggggccaaaggtggctaaggcagaggctgagggggctgggcgagctaccaagctgaaggtatccaaatttgccatctcactccccaaggctcgggtgggggctgaggctgaggccaaaggggctggggaggcaggcctgctgcctgccctcgatctgtccatcccacagctcagcctggatgcccacctgccctcaggcaaggtagaggtggcaggggccgacctcaagttcaaggggcccaggtttgctctccccaagtttggggtcagaggccgggacactgaggcagcagaactagtgccaggggtggctgagttggagggcaagggctggggctgggatgggagggtgaagatgcccaagctgaagatgccttcctttgggctggctcgagggaaggaagcagaagttcaaggtgatcgtgccagccggggggaaaaggctgagtccaccgctgtgcagcttaagatccccgaggtggagctggtcacgctgggcgcccaggaggaagggagggcagagggggctgtggccgtcagtggaatgcagctgtcaggcctgaaggtgtccacagccaggcaggtggtcactgagggccatgacgcggggctgaggatgcctccgctgggcatctccctgccacaggtggagctgaccggctttggggaggcaggtaccccagggcagcaggctcagagtacagtcccttcagcagagggcacagcaggctacagggttcaggtgccccaggtgaccctgtctctgcctggagcccaggttgcaggtggtgagctgctggtgggtgagggtgtctttaagatgcccaccgtgacagtgccccagcttgagctggacgtggggctaagccgagaggcacaggcgggcgaggcggccacaggcgagggtgggctgaggctgaagttgcccacactgggggccagagctagggtggggggcgagggtgctgaggagcagcccccaggggccgagcgtaccttctgcctctcactgcccgacgtggagctctcgccatccgggggcaaccatgccgagtaccaggtggcaaagggggagggagaggccggacacaagctcaaggtacggctgcccccggtttggcctggtgcgggccaaggagggggccgaggagggtgagaaggccaagagccccaaactcaggctgccccgagtgggcttcagccaaagtgagatggtcactgggggaaaggtcccccagccccnnnnnnnnnnnnnnnnnnnnnnnagagggcagtggggaaggggcctcgggtcgccggggccgggtccgggtccgcttgccacgtgtaggcctggcggccccttctaaagcctctcgggggcaggagggcgatgcagcccccaagtcccctcgtcagagagaagtcacccaagtttcgcttccccagggtgtcccctaggcccccagggccgggaatgggaattggggaccaagaaagaaggttggaattgccgggtggccggctgcccccaacgttgggggttttttcagaaggaaaaggggggccttcccaggcccccgggcccaaaggaatggggaaggggggggctttccaaggccttgcccgggccttggtc

SEQ ID NO: 350598 - DNA, 714 bp, Homo Sapiens
  misc_feature (17)..(17): n is a, c, g, or t
  misc_feature (23)..(23): n is a, c, g, or t
  misc_feature (81)..(81): n is a, c, g, or t
caaaagcctggtgcgcnggcagnaaacgcatcctggagcaccagcttccctgccctgcccgcctcacggggtgcctggggncgtgcctcagcctgctgctcctgtagtctgttctccacgccgggcctgtctccctgagcaggctgaacatgggcatacgagtgaccagcgtgatcgtgtccaggccagtgccgcattctgtgtggtccaagggaaaaccttctccaagtccacggcccgccctttcctctgctgggttacggccaagggcgccaggccttcactggaggacatggatcctggacccggccctcgaggctgctgccttccagtttccccatgtcctggacactcttggtctcaccatttgggaggccgacaggggatgcagagtggcctgttggaaaggccttatgtgaccccaggctgagtccctgagcagcctgctgaggccggaggggagaagagctgagcttctcccttgctgggccaggctcgggctgtggaatggctgccagctcccttcctgggagaggctgggtggggtccacagcaccttcctcccgtcccacaggaagctgtcttctgctgttggctgctgggggcgactgatgtttggatccctgagcaccctgccaatcccagactcaccttcccactctttccagagtccccagggagacacttaagggaaattaaactgcagagtgcaag

SEQ ID NO: 350599 - DNA, 450 bp, Homo Sapiens
ccctgcactgaggctgggatccttcctctgaggaggcccagagggaggatcacagaatgaggccccagcaaacattcacagtcacgatgatttgagacccagcccaaatcacccatggaaatcaggacagtgtggggcactgggatctgttataccaccccttttgaatttatttgaacttgtctgagcttgaggaagctggaaggacttaccctgagtatgctggctcagcgtgggttcacttagaggagcttgtagcttgtagttgagatagctggcccggtccttccaccactatggatgggtttcccgagcacacactctggctcttgtcccagttccttctgccggtctgccaccatcccgagctttccagtgcttcctcccggctgcggaagcggcctgcttctggttttgttgggaggagttgccaccttctttgctgcgtcg

SEQ ID NO: 350600 - DNA, 1542 bp, Homo Sapiens
ggggaagtggccgaggagggagggctgcgagccatggcgaccaagacggcgggcgtggggcggtgggaggtagtgaagaagggtcggcggcctggggtcggcgccggcgccggcggccgaggaggcggcaggaaccgcagggcgctcggggaagcaaacggagtgtggaaatacgacctgacccctgcaatccagaccacaagcaccctttatgagcggggctttgagaatatcatgaagcggcagaataaggagcaggtcccaccccctgctgtggaacctaagaaaccagggaacaagaagcagccaaagaaggtggcaactcctcccaaccaaaaccagaagcagggccgcttccgcagcctggaggaagcactgaaagctctggatgtggcagacctgcagaaggaactggacaagagccagagtgtgttctctggaaacccatccatatggttgaaggacctggccagctatctcaactacaagctacaagctcctctaagtgaacccacgctgagccagcatactcatgattatccctacagcctggtgagccgggagctacgtgggatcatccgagggctgctggcgaaggcagcagggtctctggagctcttttttgaccactgtctgttcaccatgttgcaagagctggataagacaccaggggagtcactacatggttaccgcatctgtatccaggccatcctgcaagacaagcccaagattgccacggcaaacctaggcaagttcctggaactgctgaggtcccaccagagccgaccagcaaagtgtctcaccatcatgtgggccctgggtcaagcaggttttgccaacctcaccgagggactgaaagtgtggctggggatcatgctgcctgtgctgggcatcaagtctctgtctccctttgccatcacatacctggatcggctgctcctgatgcatcccaaccttaccaagggcttcggcatgattggccccaaggacttcttcccacttctggactttgcctatatgccgaacaactccctgacacccagcctgcaggagcagctgtgtcagctctacccccgactgaaaatgctggcatttggagcaaagccggattccaccctgcatacctacttcccttctttcctgtccagagccacccctagctgtccccctgagatgaagaaagagagcccattctgaggcttttccttagctccctgttgacagctgcctgccccgctcactcgagcttcaccctcagaagatggatcccaagagacagcacattcagctcctgagcagcctgactgagtgcctgacggtggaccccctcagtgccagcgtctggaggcagctgtaccctaagcacctgtcacagtccagccttctgctggagcacttgctcagctcctgggagcagattcccaagaaaggtacagaagtctttgcaagaaaccattcagtccctcaagcttaccaaccaggagcctgctgaggaaagggtagcagtaaacaaaccaggaatgtcgttcacctgtgacatgg

SEQ ID NO: 350601 - DNA, 2200 bp, Homo Sapiens
  misc_feature (1928)..(2023): n is a, c, g, or t
ggcctgggtggcgaattcggcacgaggaagagacagcacattcagggtggatgtgcggcctggatggccttgcttacgggaaggggatcacctcttagcactccccgcctctgccagccccatgcccccagcagcctctccctctgtcgtgctgtgcagctcctgagcagcctgactgagtgcctgacggtggaccccctcagtgccagcgtctggaggcagctgtaccctaagcacctgtcacagtccagccttctgctggagcacttgctcagctcctgggagcagattcccaagaaggtacagaagtctttgcaagaaaccattcagtccctcaagcttatcaaccaggagctgctgaggaagggtagcagtaacaaccaggatgtcgtcacctgtgacatggcctgcaagggcctgttgcagcaggttcagggtcctcggctgccctggacgcggctcctcctgttgctgctggtcttcgctgtaggcttcctgtgccatgacctccggtcacacagctccttccaggcctcccttactggccggttgcttcgatcatctggcttcttacctgctagccaacaagcgtgtgccaagctctactcctacagtctgcaaggctacagctggctgggggagacactgccgctctggggctcccacctgctcaccgtggtgcggcccagcttgcagctggcctgggctcacaccaatgccacagtcagcttcctttctgcccactgtgcctctcaccttgcgtggtttggtgacagtctcaccagtctctctcagaggctacagatccagctccccgattccgtgaatcagctactccgctatctgagagagctgcccctgcttttccaccagaatgtgctgctgccactgtggcacctcttgctttgaggccctggcctgggcccagggagcactgccatgaggcatgcagaggtgaggtgacctgggactgcatgaagacacagctcagtgaggctgtccactggacctggctttgcctacaggacattacagtggctttcttggactgggcacttgccctgatatcccagcagtaggccctgccttcctggccactgatttctgcatgggtagaccatccaagactgcagcgggtagaaggtggcagttcttcatgggagtctttttaacttggtgcctgagttctctcctaggcaagtggccagttgcctccacctcagttcttccatctttggtggggacagggcccagcagcatctcagcctcctacccacaattccactgaacacttttctggccctactgcacatggcccccagcctccatccttgtgctggtagcctctcacaactccgcccttgccctctgccttccacttccttccatctcatttctaaaccccaaacagctcatctctaaaaagatagaactcccagcaggtggcttctgtgttcttctgacaaatgattcctgcttctccagactttagcagcctcctgttcccattcttggtcacagctctagccacagcagaaggaaaggggcttccagaagaatatagcaccgcattgggaaacagcagcctcacctccacctgaagcctgggtgtggctgtcagtggacatggggagctggatggaaatgcctctcacttcaaaatgcccagcctgccccaaatgcctctaagcccctccctgtcccctcccttgtagtcctacttcttccaactttccattccccatcatgctgggggtcttggtcacaaggctcagcttctctccactgtccatccctcctatcatctgtagagcagagcacaggcagttgtgtgccttgggcccagggaaccctccatcaacctgagacaggactcagtatatggttcttgggtatgccctaccaggtggaataaaggacacagattnnnnnnnnnnnnnnnnnnnnnnnnnnnnnnnnnnnnnnnnnnnnnnnnnnnnnnnnnnnnnnnnnnnnnnnnnnnnnnnnnnnnnnnnnnnnnnnngccttggtcgggccgccttgggccccttcaaaaaaactttttctaaaacccttttcgtttgtggccccgggcggcccccctgaagggaaaacgggaaacagtgggtccaataccctgtggttctccaaaagaaagaatccccgtggaccaatgaaatatatgggctctggggatatt

SEQ ID NO: 350602 - DNA, 1211 bp, Homo Sapiens
gggggcccagaggctgtgttgaggctaatggcggtgcccacggaactggatggagggagtgttaaggagaccgcagcggaagaggaatcgcgagttctggcacctggcgccgccccgttcggaaattttcctcattattctcgcttccaccctccggagcaacggctccgcctcctgcccccggagctgcttcgacagctctttcctgagagtcccgagaacgggccgattctggggctcgacgtggggtgtaactccggggatctgagtgtggctctatacaaacacttcctctccctacctgacggggaaacctgctcagatgcctcaagagaattccgtctcctctgctgcgacatagatccagtcctggtgaagcgagccgaaaaagaatgtccttttcctgatgccttgacttttatcaccctggacttcatgaatcaaaggacccggaaggttctcttgagctctttcttaagccaatttggacgttcagtttttgacattgggcttctgcatgtcaataaccatgtggattcatctgaatcatggagaccatggcctatgggagttcctggcccatctttcctccctctgccactacctccttgtggagccccaaccctggaagtgttaccgggcagctgcaaggcgtctccgaaagctgggactccatgattttgaccacttccactcccttgccatccgaggtgacatgcccaatcagattgtgcagatctttgacccaggatcatggcatggaattaatatgttgcttttggcaacaaccagttgggacacgaagccttctgctcttcagggcaaaacaaaccatagagactcatccaatccctgaatcacgagatagcaagtggttgagaacaaggttgcatcctttttctgcccagccttccccgcaaaccagtgaggaaacgaccagcactgccgtctgatgagaggagcctgttgctgtaactgttttccagattactggggggacgaccccatcttagttttctctgttctagacgccctcattccacccccgctcggcccagcccggcgtcctctacccaggcacggctgaggtttaccaagcccggcccggcctggagaaagtgtttctataagggggaagggaggtccttcccaccaaagcggaagcggcgcgcgccggccgggcagacttagctcgcgtcctgggaacatct

SEQ ID NO: 350603 - DNA, 503 bp, Homo Sapiens
gagtttaggagtaagaacatatctcagaccaccttagtcagctttgctgatgggatttagggccaggtcagagtttcttttcataactgcctgaaaagagagatggtgtgaaacaagattctgataatggtttgtgtgagatttgatcatagtctaaaactatcacgtctgagttgccttaggatgacagtgctgacacccagtaggaagtatcccatttttatcaggaaagtcagtcacgcgtagggatggtgaggagacgcgtagggatggtgaggaggggagaggagggagacctgctggtgcccttgcaccagggtgaggcctgactcacgctgcttccccccacaggccctgctttgcttgcctgctttttccagaatcgattttgcaagcttcaagattctgttcccctcttcgcagaagtgaggaaggcaaatactcagggtttgaagggagacctggccggcctgagggctggcagatgtgagggcaggacacct

SEQ ID NO: 350604 - DNA, 2987 bp, Homo Sapiens
agcggtgtgcctcctggcggctcctgaactccagccccctctctatcagccgctcactccgtctcaatatgtctcaagatggcggccaatgtgggatcgatgtttcaatattggaagcgctttgatttacagcagctgcagagagaactcgatgccaccgcaacggtattggcgaaccggcaggatgaaagtgagcagtccagaaagcggcttatcgaacagagccgggagttcaagaagaacactccagaggatttgcgcaagcaggtagcgccgctgctgaagagtttccaaggagagattgatgcactgagtaaaagaagcaaggaagctgaagcagctttcttgaatgtctacaaaagattgattgacgtcccagatcccgtaccagctttggatctcggacagcaactccagctcaaagtgcagcgcctgcacgatattgaaacagagaaccagaaacttagggaaactctggaagaatacaacaaggaatttgctgaagtgaaaaatcaagaggttacgataaaagcacttaaagagaaaatccgagaatatgaacagacactgaagaaccaagccgaaaccatagctcttgagaaggaacagaagttacagaatgactttgcagaaaaggagagaaagctgcaggagacacagatgtccaccacctcaaagctggaggaagctgagcataaggttcagagcctacaaacagccctggaaacaaactcgaacagaattatttgacctgaaaaccaaatacgatgaagaaactactgcaaaggccgacgagattgaaatgatcatgacggaccttgaaagggcaaaccagagggcagaggtggctcagagagaggcggagaccttaagggaacagctctcatcggccaatcactccctccagctggcctcacagatccagaaggcaccagacgtggagcaggccatagaggtgctgacccgctccagcctagaagttgagttggccgccaaggagcgggagatcgcacagctggtggaggacgtgcagagactccaggccagcctcaccaagctgcgggagaattcggccagccagatctcacagcttgagcagcagctgagcgccaaaaacagcacactcaaacaactggaagaaaaactcaaaggccaggctgactatgaagaggtgaagaaagagctgaacattctgaagtccatggagttggcaccgtccgagggcgctgggacacaggatgcggccaagcccctggaggtgctgtgtgctggagaagaaccgctcgctgcagtccgagaacgccgcggctgccgcaatctccaacagcgacctgagcggacgctgtgcggagctgcaagtccgtatcactgaggctgtggccacagccactgagcagagagagctgatcgcccgcctggagcaggacctgagcatcattcagtccatccagcggcccgatgccgagggtgccactgagcaccgcctggagaagatcccagagcccatcaaagaggccactgccctattctacggacctgcagcaccagccagcggtgccctcccagagggccaggtggattcactgctttccatcatctccagccagagggagcgcttccgtgcccggaaccaggagcttgaggccgagaaccgcctggcccagcacaccctccaggccctgcagagtgagctggacagcctgcgcgccgacaacatcaagctctttgagaagatcaagttcctgcagagctaccctggccggggcagcggcagtgatgacacggagctgcggtactcgtcccagtacgaggagcgcctggaccccttctcctccttcagcaagcgggagcggcagaggaagtacctgagcttgagtccctgggacaaggccaccctcagcatggggcgtctggttctctccaacaagatggcgcgcaccatcggcttcttctacacactgttcctgcactgcctggtcttcctggtgctctacaagctggcatggagcgagagcatggagagggactgtgccaccttctgcgccaagaagttcgctgaccacctgcacaagttccacgagaatgacaacggggctgcggctggtgacttgtggcagtgataccccggggcctcccccgtgacagtgacggctgcgcctccaccccgactgctcagtgcatctaatcacttagactcccctgaagaatcccccatggaaactgcccttatccgctgtccagcagctgccagaggccccaggtcacctcgggtccccttgaaagaatgtctcggtcacatcaggcccgctaggtccagagagcgagcccccaatgcccggccaggctaagccgcagagaccctctcagcccccacctcaggttagggctctgcccgcagcctgacctctagccctggtggcagaggtccctcagctgcgaggctaattgggtgaccaccgattccagctgcggttaatccagcttgggcctgtctgcactgcgatcctcttgggctctcctaggatccccccatgccccgtaagaggtggaagacgcttccttccaggacagcaggctttgagtccagcacccccagcctgcctttgccaccagccccaccctgcagagtatatgaggcttgacagagtctgccccctcccccactgcaccccaagagagagagccccagccagcggaacagtttctattaccccctccctgcccccagacccatgtgatttctgctttcttctttagcaagatattctggtttctagataaggaagagtctctaatgagcccccgagccccagtctcttcagactcatggattggtctgaggggtctgaacgtctcctagccaatcagaactggctgtggaccaccctagcacggccacctctcagggccactggcaggccttcctgagttagatttgtagttgcatatttagctttgcacatttgaaataaaccacggttgcagcc

SEQ ID NO: 350605 - DNA, 1149 bp, Homo Sapiens
taaacaaattcaaggagagtggcgccaatgtgacaggtttccagctggtgaactacacagacactattccggccaagatcatgcagcagtggaagaatagtgatgctcgagaccacacacgggtggactggaagagacccaagtacacctctgcgctcacctacggtggggtgaaggtgatggctgaggctttccagagcctgcggaggcagagaattgatatatctcgccgggggaatgctggggattgtctggctaacccagctgttccctggggccaagggatcgacatccagagagctctgcagcaggtgcgatttgaaggtttaacaggaaacgtgcagtttaatgagaaaggacgccggaccaactacacgctccacgtgattgaaatgaaacatgacggcatccgaaagattggttactggaatgaagatgataagtttgtccctgcagccaccgatgcccaagctgggggcgataattcaagtgttcagaacagaacatacatcgtcacaacaatcctagaagatccttatgtgatgctcaagaagaacgccaatcagtttgagggcaatgaccgttacgaggggctactgtgtagagctggcggcagagattgccaagcacgtgggctactcctaccgtctggagattgtcagtgatggaaaatacggagcccgagaccctgacacgaaggcctggaatggcatggtgggagagctggtctatggaagagcagatgtggctgtggctcccttaactatcactttggtccgggaagaagttatagatttctccaaaccatttatgagtttggggatctccatcatgattaaaaaaaccacagaaatccaagccgggtgtcttctccttccttgatcctttggcttatgagatttggatgtgcattgtttttgcctacattggagtgagtgttgtcctcttcctggtcagccgcttcagtccctatgaatggcacagtgaagagtttgaggaaggacgggaccagacaaccagtgaccagtccaatgagtttgggatattcaacagtattgtgattctacctgggagccttcaagcagccaaggatgtgacatcttctcccaggtcagtcagctcttctcaatccctttgcctaatgctatg

SEQ ID NO: 350606 - DNA, 840 bp, Homo Sapiens
gggccacttcgccattttcctccggaagtgcggatcccagcggcggtcgtgtagctgagcagccctggggcttggttctatgtccctgtggctatgtttccagtgtcctctgggtgtttccaagagcaacaagaaacgaataaatctctgccccgcagcgcctccaccccagagacccggaccaagttcacacaggacaatctgtgccacgcccagcgcgagcgcctggactcggccaacctgtgggtgcttgtggactgcatccttcgcgacacctccgaggacctgggactccagtgtgacgccatgaacctggccttcgggcgccgctgtgaggaactggaggatgtgcggcacaagctgcagcaccacctgcacaagatgctgcgggaaatcacagatcaggaacacaacgtggtggcactgaaggaggccatcaaggacaaggaggaacctctgcacatagcccagacccggctgtacctgccctcacaccggcccaacatgcagctgtgccgcgaagcagcccagttcagccccagctcacaccccccaacacccccaagctggtgagtgaggtggaggagctgtacaagtccatcacagtgccgcgggagaagcttctacaagcagagcagtccctgtgcaacctcgaggacatccacatgagcctggagaaggacgtcaccgccatgaccaacagtctattcatcgaccgccagaagtacatggcccatcgtacttgctaccccaccatcctgcagctggctggctaccagtgagcagcggcacggtgcttccccccaatcccccaaataaacagtgcgttagctttccaaa

SEQ ID NO: 350607 - DNA, 1039 bp, Homo Sapiens
  misc_feature (642)..(642): n is a, c, g, or t
  misc_feature (907)..(932): n is a, c, g, or t
aagcttggcacgagggcggatcccagcggcggtcgtgtagctgagcaggcctggggcttggttctatgtccctgtggctatgtttcctgtgtcctctgggtgtttccaagagcaacaagaaacgaataaatctctgagaggtgcccagtaaatgcaggttccagacaaaaggtggagcctggcatcctgccctgcatgggctccagcctgctgccatctggggaaactgagtcatggcgaggctcaaggatgtttctcagaccacaccagtccctgaaggtccgctggcctcccaatcttgacggacagagagaagaggttcccaggccaactgcaataggttctggctcggcctgggttgggccccgcagcgcctccaccccagagacccggaccaagttcacacaggacaatctgtgccacgcccagcgcgagcgcctggactcggccaacctgtgggtgcttgtggactgcatccttcgcgacacctccgaggacctgggactccagtgtgacgccgtgaacctggccttcgggcgccgctgtgaggaactggaggacgtgcggcacaagctgcagcaccacctgcacaagatgctgcgggaaatcacagatcaggaacacaacgtggtggcactgaangaggccatcaaggacaaggaggaaacctctgcacatagcccagaccccggctgtacctgctctcacaccggccccaaaatgcaagctgtgcccgcgaaagcagccccagttcagggtactggcctggggcctcctgaaggcagttccccaggtgtgccccccggtccaaaccttccttcggcttgtgggaccctcctcccaaataaaaacacttcccaattccttccacaacaacaccattctccccccaacaaggtttgccttnnnnnnnnnnnnnnnnnnnnnnnnnntttttgtccgggcccaccaacaacaaaacaccgcccaagaggaccgcgccctctttataaaccacccaccgcataattatgagaaacctatggcaccccctttgtgg

SEQ ID NO: 350608 - DNA, 1851 bp, Homo Sapiens
  misc_feature (558)..(558): n is a, c, g, or t
  misc_feature (561)..(561): n is a, c, g, or t
  misc_feature (564)..(564): n is a, c, g, or t
cggatcccagcggcggtcgtgtagctgagcagccctggggcttggttctatgtccctgtggctatgtttccagtgtcctctgggtgtttccaagagcaacaagaaacgaataaatctctgccccgcagcgcctccaccccagagacccggaccaagttcacacaggacaatctgtgccacgcccagcgcgagcgcctggactcggccaacctgtgggtgctggtggactgcatccttcgcgacacctccgaggacctgggactccagtgtgacgccgtgaacctggccttcgggcgccgctgtgaggaactggaggacgcgcggcacaagctgcagcaccacctgcacaaggtggggcaccctgaaccccgaagacggctccggcgcctgcccaccactctgccccctctcatcacctggcctgggccctcaacacctttctcctctgtcccacttatcccgagggaccccagaagcaagtgtcacctctccgtaaacctatgtaaaaccaggtgacactgggtatgatcgcagtgtgttgcaacccccatgactganaangangagctgtggggaaggatggaggcaggagctggtctggggagcattgactgcctgggaggtccccaagagtcctggcctggcaggcagggctctgactctagggcctcagcatggcctttaccacctctgagtccccagtccttgagcaggatttgggtcctggtgaccaccaaggatggggggttcttggaccagagctaagagacaacaggctgcctgactctccagagcccgctgggggccccgtgcacattgttcccctcacccacgcctccccagggccactggtcaggaccaccctctggacacagccccaggagctgggtaggaccagactggtctctacattccatatgcccgggcatgggggcacaggcccaaggggcactgtcctgtctgcagatgctgcgggaaatcacagatcaggaacacaacgtggtggcactgaaggaggccatcaaggacaaggaggaacctctgcacatagcccagacccggctgtagctgctctcacaccggcccaacatgcagctgtgccgcgatgcagcccagttcaggtactgcctgggcctctgaggcagtcccaggtgcccccatccacctcctcgctgcgaccctctccaataaacactccaatctccacacacacatcccccacaggtgctgagaggggagggagactctgcggccacacacaacatgcaagcacgccttaaacacacagatatagacatgacactgggcaggtcatgggtcgggggcctccccgtgccagggacctgtgcccacgtggtctcaccccaccctgtgctacctcatcttcccgggaggaagctccttcagacaagatgagctcctggaggccacggggccagagaagccagagagggccattccctgctgccctgagggtgcagtccccacctctggtggaaagtatgacctacgccctgggctacaaggcatagattggccgtcccttttgtgtcccttgttaacggatgccttggtggccccttctgagcctaagtacctttcttccttcctgtcctcaggttcccttcaagaactgggtgcctcctttccgtcaaatattccgggattgacacgaacttgagccctggtcgggctgagggcccgtcctgtccctgtcacgggtcgcgattcgccgcccggtactcattcccctcagggcccgcctcctgggagagagcctcctatttgtctgccctaaagccgttcctgggggagccctcctgggggttcccgagccctgcagtccctggg

SEQ ID NO: 350609 - DNA, 1154 bp, Homo Sapiens
  misc_feature (749)..(752): n is a, c, g, or t
cctggggcttggttctatgtccctgcgggtcggtgcgagggcgaagaggaacccgtgggcccgggggatcccggggggccggaccagtgttccccagttgtgggagcagacgcgtgggcgcatcgcgggcgggcagggcctgaagtgcagctatgtttccagtgttctctggctgtttccaagagctacaagaaaagaataaatctctggagttggtgtcctttgaggaggtagctgtgcacttcacctgggaggagtggcaggacctggatgacgctcagaggaccctgtacagggacgtgatgctggagacctacagcagcctggtatcattggggcattgcattaccaaacctgagatgatcttcaagctagagcaaggagcagagccatggatagtagaagaaaccctaaacctgagactttcaggtggaagcaagaagcaagttttctcaggtatttgccacaggagcctggtggagctccaggaggtttgatctctcttgtgaactctggaactgtattcccaattgtcaattggacatccctacgtatgggacctcagatatttcaaacatgatgtgtccaagtctgtatcacttctggccatcatattgttcttttatttttccaaatttcacatcaccagtaacaaactagctgtgatcatggcagatagcctggaaataaaactcccctttttaccctttgcacagcaaattgacatcaaatcctgttttctacttttnnnntttaactattgcttccctattctgtattctcactgctccatcttctgatgtaggaggtcatctgttttcctcttttcctctcctctgactcttaagccctttcccattctctttctcaggaatggctgttaaaatgccaatatggtcttgtaactttcctgtacttagtgaacctccttatttacaccctgtttgtgaagtggctgtgttcaccctgggtggacacggaatgtttttggcatgtacaaagagaattttatgctgcctgtgtacagttattaatttgtaagtacactcagctttttgtatctgtaggtttaatatctgtgtatgtaagcaaacttggatgcaaaatatttgaaataaaatcagatgcttgcatctgtagtgaacataaaaaaa

SEQ ID NO: 350610 - DNA, 458 bp, Homo Sapiens
gtgggaccctgcgaagtgcacctcccttgctcaaatcggaggtgtctggtcctcactgcacagcccactgcacatctcggtgtcctctcacatacacacccgcggggggtttccagagcatcgcacctcttccagcccagggagccgcctgctctgctaaactctatgggaactgagacatccacctgctgcgtgacccacccgtgcgcaacttcagagctttcagggggtgatgcgggctgtggctccttcgtgaaaatgtcaccgtctgcagcgcctttcttgtgatatagaacttgacgggttcctgcgaatgaagttgcaaatattgatgaagataatactactgccttgctgtcaaacagtaacagtcacctttttttgtatctccaattataaatgcaatgcgtactgtaaaaagaaaagaaaacatcataaatatctttataaagtaaaaa

SEQ ID NO: 350611 - DNA, 473 bp, Homo Sapiens
  misc_feature (358)..(408): n is a, c, g, or t
cgaggaccagtgttccctagttgtgggagcagatgcgtgggcgcatcgcgggcgggcagggcctgaagtgcaggtgcgggccgtggaccctggcgggggctgggatgacagctatgtttccagtgtcctctgggtgtttccaagagcaacaggaaacgaataaatctctggttcctgcgaatgaagttgcaaatattgatgaagataatactactgccttgctgtcaaacagtaacagtcacctttttttgtatctccaattataaatgcaatgcgtactgtaaaaagaaaagaaaacatcataaatatctttataaagtaaaagtcttggctggtctctgggagcagtgactcatgnnnnnnnnnnnnnnnnnnnnnnnnnnnnnnnnnnnnnnnnnnnnnnnnnnnagcttacccaggctttttactttgtgtaagaataacatcagtgtattaaaaatacagtgggaatt

SEQ ID NO: 350612 - DNA, 701 bp, Homo Sapiens
  misc_feature (227)..(227): n is a, c, g, or t
  misc_feature (261)..(261): n is a, c, g, or t
ttggtaccgcccgaaggtatcgggatatcgtcgacccacgcgtcgattgcacgcgggtcactcattcccactcaggcccgcgctccctgggaggaccctcgtaatttatgctctgccctagagccgctttcctggtaggatcctttcatggcgtcttcccaggacctcctgccagctcccattgggagttttgggtcccctccaccccagtaggtgcatacttctgnccctccccagccccagctcacaccccccaacacnccccaagctggtgagtgaggtggaggagctgtacaagtccatcacagcgctgcgggagaagcttctacaagcggagcagtccctgcgcaacctcaaggacatccacatgagcctggagaaggacgtcactgccatgaccaacagtctcttcatcgaccgccagaagtgcatggcccatcgtacttgctaccccaccattctgcagctggctggctaccagtgagcagcggcacggtgcttgccccccaatccccccaaataaacagtgcgtagctttacacaaaaacacaacaaacaaagggccgcgacgctaccagcagacataccatggaaggaggacccagcttacggcgtacccagacatccatggtaccaaaggggcaccaaagagagcaaagactactaaggtaggcacgacaggcgcacaaggcgagcgggaa

SEQ ID NO: 350613 - DNA, 1016 bp, Homo Sapiens
  misc_feature (880)..(881): n is a, c, g, or t
  misc_feature (964)..(972): n is a, c, g, or t
ggcctgggtggcgatttcggcacgagggctgagcaggcctggggcttggttctatgtccctgtggctatgtttccagtgtcctctgggtgtttccaagagcaacaagaaacgaataaatctctgccataggagttttagccaattcctgggagaggcaagcagactagggagtgctgatatcagaccagccccatctcatgtgcaggactgcccagcagagatcaggtctcagaggagaactgtctcaaaagtgaacccccggcacagcatagctgctttacacaaacatggccaggcttcttttttgagcaagtcccctttttgaagaggggaactctgggaactgatctctgctgggcagtcttgaacatgagatggggctgatctgaacttagcattcctaaagtgctgggataaagtatctcacaaaggcacgtggagcctagagagatagctgtccctgccctctgggctccacatcacctgacttgctgctccaccactctgcttgtctcctgggtactccatcccatagagatgtgagttagcaatcacttagcgtaatcagcccaggatggagggtctgtgttctgaggccaagccagtgttccctctctggtgatgagcagtgtgggggtgtgtggtacccgtgggagatggactggcttgttcattgggtcaaccgcagcttattggaggtgtcaatatggcacttagggtctttgctcccttgatattctgagggtagcaagggcagtttcactgcagaggcaatggcagagaaaatttcgtttgctcctgggaagctctgtccaagggaattgcttgagttgctactggctggatagctcttgatgggtggactggctggagacccanngtcagtaggaactgccccatcaagtaaactgtctggggcaccttttctggccagctgcctgtggggaaaatgcttggggggtnnnnnnnnnaggtcccctaaattggcttggcctttttttccagggggaaggac

SEQ ID NO: 350614 - DNA, 1591 bp, Homo Sapiens
  misc_feature (28)..(28): n is a, c, g, or t
  misc_feature (74)..(75): n is a, c, g, or t
  misc_feature (84)..(120): n is a, c, g, or t
ggaaattctaactagccacctccaatanattgagagcggccccccttgcgggggattttttttccaggcagtgnnggcgggcgnnnnnnnnnnnnnnnnnnnnnnnnnnnnnnnnnnnnnatcaggccaaatcggccgagctcgaattcgtcgagagcggacttcgccattttcctccggaagtgcggatcccagcggcggtcgtgtagctgagcagccctggggcttggttctatgtccctgtggctatgtttccagtgtcctctgggtgtttccaagagcaacaagaaacgaataaatctctgacccttctcaggtgcagccagagagacactagcccactgatggatggacagacgtgggcagggtccgtgtcactaaaccacccaccactgccacagctgcctacaacagacacatcagatgacactccgggcaaataaatgattttcactgaggacttactggttttaataataggtcctggtgtagagaagtccctcaacctattgtgcaatgagttttgagaagcgggtaagctgtatgttttgtggttctgtttcataaatgcatctacaggaagaccaatattgactgaatgaagctttcatttaaagagctaaaatatgctttgtgtttttatatgtggatactactttaaacctaatgactattcattgtatcatagcttgtgatgtattctgctcacggcttttaaggtaaattgtgccatgatccactgccattctaattgctttaacaagtcattaccacactactgttacatcttaattatgcatacagacaggtagacttattttacatatgtgaactaactagttgtcaaagcaaatgcagattgtattctacaagtaaagtctttttctctctgaaatttctagggatgttctttaagtgaaattcatattccaaactgaagattttagttacaagaactgagtgcagattaaagtcttttgtgattcaaacatagtcaagagtacaactgtgatatttcatggaagttatgcaataaaatgtctctaacctgcgaacaaatctatcaagcagacggcacagtactgaatttgaaaccagaaatactgggtttttatataaatgcttcatagatttgttttatgataaagggcacataactctcctaaacctcacaccacctcttgaataggtatagtaagtccacatcaatgctgatgccttagctattattaaactcttacagtatgatgtaaagtgaaagtacaatgtaagatcattcctaggccaactttgaccagttttatacagaaacatgtgccaacttttctgtttgcaaggataatatcaaagcaaacaccagaaagttatatctttgatgcattttttcaaaatcatacacataatacacaaaccaaagacaaatgatgaatattatgtcagaaaatataaagtcttcccctttcttcttttgccaagaaagtccaatattttcaccatttttatgcacacaatcaactttatttaagctggaagttaatgtctcattgttttcattgttctaaataaacaccttttcccttgagtattgctc

SEQ ID NO: 350615 - DNA, 1092 bp, Homo Sapiens
catacagaaatcagtatgtccaagaggcctgctaaaacggggtaagtgtgtcgggtggcgtactgcgagtgtacatttttcgaggtgtggccatttggtccggcggtgtgccgaaggggcttttcccatcaggaaatgagggaggggaaaggcctggaagttttggcaaattattattgtttccccgggagtgcatcccttggggccataagcccagggattgcaatttaatgtgaggggaaagatcaaagtgcttaatggttaccgccaggtggaacccggaaccttttctttatggtatcctttttctacccccaggtctttattccctcatcccctgggttcacaccaggggggagtccttcccggtgcctcccggtctgtggccccagcattcgacgcatctcgtgcgtaaccccgtcccagtgccccaggccagccgacagtgtccggtgcattctggatgcaggcaggctgctctcccagcctccctccagggctgcaggtgctgtggcagtggccatggacccaaaggggccccccaggctctggacaggttgaatagggggtccgacgatggataccctgctgaggctgagctctggggctggccttggagacttcggcagggcgggcgaggtcgtcttcaaaggatggcggggacaactcatggagcccacggcgggcagcccgggcagcccggaggagagtgtgggtcagcacagccaccagaaccagggtgcccgagccgaggatggaagcagctgctgcgcctgtctcgatctcgaaaagtagcaaggcatagatggacagtgctgctaaatagacggagatcccacagcagaaaaggccaagggccacatgtctgaggaggcggcagtcgtagagaaaccagtcagacctcctggggccaggcccccgcgccagctcggcgcccaggtggccacagagcgcggcgagcagcaagcaggtgaaccccagcacgagcaccagcgcggccagcgcggcggccagcggcagcagcgtcccggccgcgtcctctggcagcccggggccggcgcccagctcctggcatcccgggaattccggacc

SEQ ID NO: 350616 - DNA, 1181 bp, Homo Sapiens
cggtccggaattcccgggatggcagatgcgcgtggtgcggctgctgcggctccgggcggctctgacgctgctcggggaggtcccccgccgcccggcctcccggggtgtcccgggctcgcgcaggacgcagaagggcagtggagccaggtgggagaaggagaagcacgaagacggggtgaagtggagacagctggagcacaagggcccgtacttcgcacccccatacgagccccttcccgacggagtgcgtttcttctatgaaggaaggcctgtgagattgagcgtggcagcggaggaggtcgccactttttatgggaggatgttagatcatgaatacacaacaaaggaggttttccggaagaacttcttcaatgactggcgaaaggaaatggcggtggaagagagggaagtcatcaagagcctggacaagtgtgacttcacggagatccacagatactttgtggacaaggccgcagcccggaaagtcctgagcagggaggagaagcagaagctaaaagaagaggcagaaaaacttcagcaagagttcggctactgtattttagatggtcaccaagaaaaaataggcaacttcaagattgagccgcctggcttgttccgtggccgtggcgaccatcccaagatggggatgctgaagagaaggatcacgccagaggatgtggttatcaactgcagcagggactcgaagatccccgagccgccggcggggcaccagtggaaggaggtgcgctccgataacaccgtcacgtggctggcagcttggaccgagagcgttcagaacttcatcaagtacatcatgctgaacccttgctcgaagctgaaagggggagacagccttggcagaagtttgaaacagctcgacgcctgtcgggggatttgtgaacgagatccgcttccagtaacggggctgactggaaatctccgggaaatgaagaaacaaacccggggcgggtgggccctgtattttcctcggataagcctgggcctgtgaaccggggaatttgaaaagggaggggcgggtaaggccgccccgaccccgtgggggcggcttgtttcccttcccggtgggagcaacgtcccagtttcccccccggagggccccattgggttggccacacccctgggggggaaatattgtacttttcccggggggaagacacgtg

SEQ ID NO: 350617 - DNA, 1241 bp, Homo Sapiens
  misc_feature (1024)..(1024): n is a, c, g, or t
ggcctgggtggcgaattcgggacgaggcactggctgcactgctggacccccttcccccagctcctcggaggcagggctctctcataagcagccaggtgggagaaggagaagcacgaagacggggtgaagtggagacagctggagcacaagggcccgtacttcgcacccccatacgagccccttcccgacggagtgcgtttcttctatgaaggaaggcctgtgagattgagcgtggcagcggaggaggtcgccactttttatgggaggatgttagatcatgaatacacaacaaaggaggttttccggaagaacttcttcaatgactggcgaaaggaaatggcggtggaagagagggaagtcatcaagagcctggacaagtgtgacttcacggagatccacagatactttgtggacaaggccgcagcccggaaagtcctgagcagggaggagaagcagaagctaaaagaagaggcagaaaaacttcagcaagagttcggctactgtattttagatggtcaccaagaaaaaaataggcaacttcaagattgagccgcctggcttgttccgtggccgtggcgaccatcccaagatggggatgctgaagagaaggatcacgccagaggatgtggttatcaactgcagcagggactcgaagatccccgagccgccggcggggcaccagtggaaggaggtgcgctccgataacaccgtcacgtggctggcagcttggaccgagagcgttcagaactccatcaagtacatcatgctgaacccttgctcgaagctgaagggggagacagcttggcagaagtttgaaacagctcgacgcctgcggggatttgtggacgagatccgctcccagtaccggggctgactggaagtctcggggaaatgaagacgagacagcgggcggtggccctgtatttcatcgataagctggcactgagagccaggaaatgagaaaggaggacggtgaagcggcccgacaccgtggggctgctgttccctcccgcgtgaagcacgntccagctgcacccggaggcccgatgcctgcccaacccggtgtgggaaatttgacttcttggggaaaggattgcatccgctacttacaccaaagtggcggtgggaaaaaaccgggggtacaaaaacattccggctccttatgggaaaacaaggcacccccggggacgaacctctttccaaagggttggaacccaaacccgcccttgaaaagccccctc

SEQ ID NO: 350618 - DNA, 1026 bp, Homo Sapiens
ggcctgggtggcgaactcggcacgaggggcagatgcgcgtggtgcggctgctgcggctccgggcggctctgacgctgctcggggaggtcccccgccgcccggcctcccggggtgtcccgggctcgcgcaggacgcagaagggcagtggagccaggtgggagaaggagaagcacgaagacggggtgaagtggagacagctggagcacaagggcccgtacttcgcacccccatacgagccccttcccgacggagtgcgtttcttctatgaaggaaggcctgtgagattgagcgtggcagcggaggaggtcgccactttttatgggaggatgttagatcatgaatacacaacaaaggaggttttccggaagaacttcttcaatgactggcgaaaggaaatggcggtggaagagagggaagtcatcaagagcctggacaagtgtgacttcacggagatccacagatactttgtggacaaggccgcagcccggaaagtcctgagcagggaggagaagcagaagctaaaagaagaggcagaaaaacttcagcaagagttcggctactgtattttagatggtcaccaagaaaaaataggcaacttcaagattgagccgcctggcttgttccgtggccgtggcgaccatcccaagatggggatgctgaagagaaggatcacgccagaggatgtggttatcaactgcagcagggactcgaagatccccgagccgccggcggggcaccagtggaaggaggtgcgctccgataacaccgtcacgtggctggcagcttggaccgagagcattcaaaactccatcaagtacatcatgcctgaacccctttgctccaaactgaacgggggagacagctttggcaaaagttttgaaacagctcgacggcctgcgggggatttgtgggcacgagatccggctcccaggtacccggggcctgactgggaaagtctccggggaaaatgaaagaccaagaaccgcggggcccgggtggccccctggtaatttcattccaataaga

SEQ ID NO: 350619 - DNA, 1084 bp, Homo Sapiens
  misc_feature (705)..(705): n is a, c, g, or t
  misc_feature (831)..(831): n is a, c, g, or t
  misc_feature (841)..(841): n is a, c, g, or t
  misc_feature (849)..(849): n is a, c, g, or t
  misc_feature (960)..(960): n is a, c, g, or t
  misc_feature (1021)..(1021): n is a, c, g, or t
  misc_feature (1029)..(1029): n is a, c, g, or t
  misc_feature (1055)..(1055): n is a, c, g, or t
gtagcgaggcctgggtggcgaattcggcacgagggcggctgctgcggctccgggcggctctgacgctgctcggggaggtcccccgccgcccggcctcccggggtgtcccgggctcgcgcaggacgcagaagggcagtggagccaggtgggagaaggagaagcacgaagacggggtgaagtggagacagctggagcacaagggcccgtacttcgcacccccatacgagccccttcccgacggagtgcgtttcttctatgaaggaaggcctgtgagattgagcgtggcagcggaggaggtcgccactttttatgggaggatgttagatcatgaatacacaaacaaagggaaggtttcccggaagaacttcttcaatgactgggcgaaaggaaatgccggtggaagagagggacagtcatcaaaaccctggaccaagttgtgacttcacggagaatccacagatatcttggtggacaaggccgcagcccggaaagtcctgagcagggaggagaagcagaagctaaaagaagaggcagaaaaacttcagcaagagttcggctactgtattttagatggtcaccaagaaaaaataggcaacttcaagattgagccgcctggcttgttccgtggccgtggcgaccatcccaagatggggatgctgaagagaaggatcacgccagaggatgtggttatcaactgcagcaggnactcgaagatccccgagccgccggcggggcaccagtggaaggaggtgcgctccgataacaccgtcacgtggctggcagcttggaccgagagcgttcagaacttccatcagtacatcatggctgaanccttgctcgnagctgaangggggagacagctttggcagaagtttgaaacagctcgacgcctgcgggggattttgtggacgagatcccgctcccagtaacggggctgactgggaaagtctcgggaaatgnaagacgaggacagcggggccggtgggccctggtattttcatcggataagcctgggccctgnaaaagcanggaaattggaaaaaggagggaccggntgaaaggcgggcccgaacacccggtgggg

SEQ ID NO: 350620 - DNA, 1364 bp, Homo Sapiens
  misc_feature (1034)..(1042): n is a, c, g, or t
atggttcactacactcctccgtagcgaggcctgggtggcgaattctccacgaggggcagatgcgcgtggtgcggctgctgcggctccgggcggcttctgacgctgctcggggaggtcccccgccgcccggcctcccggggtgtcccgggctcgcgcaggacgcagaagggcagtggagccaggtgggagaaggagaagcacgaagacggggtgaagttggagacagctggagcacaaagggcccgtacttcgcacccccatacgagccccttcccgacggagtgcgtttcttctatgaaggaaggcctgtgagattgagcgtggcagcggaggaggtctgccactttttatgggaggatgttagatcatgaatacacaacaaaggaggttttccggaagaacttcttcaatgactggcgaaaggaaatgggcggtggaacgagagggaagtcatcaagagcctggacaagtgtgacttcacggagatccacagatactttgtggacaaggccgcagcccggaaagtcctgagcagggaggagaagcagctaaaagaagaggcagaaaaacttcagcaagagttcggctactgtattttaaatggtcaccaagaaaaaataggcaacttccagattgagccgcctggcttggttcgtggccgtggcggaccatccccaaagatggggaatgcttgaacagacgggatcacgcccaagagggatgttgggttaatcaacctgccagccagggcatcttctaaagaatccccccgaagaccccccggaggcgggggcccacccacatgggacaacagggaggggtgaccgctttcccgcaaatataacgaacccgttctcacccgctggggacttcttgggcgaagacctttttgtgggcaacccccgctaacgaaggccaaatttttcacaggaaaaaactctctcacacttccccaaggggttacccatttccatttgccccctttgacaaacccccccttttgggtcttcctgaaaaagtacctgtgaaaaaannnnnnnnncaacaaaaccaaatcttttttggtgggccaatataaaatgtttttgcgcaaaaactccaatccttttcgaaacagtgccccctggggcccggggggagaattttttgcgcgggggccacccaaaaaaatttccccggcgcccttccccccaggtttataccccgcggcgatcttgtggaactctggtgaaaaaagtctccccttctcgcgggatacatattgtggaaccccaccccccagacaacccacttcccgcgaggacccgcaaagttggccccaccactgggcaaaaatttttcccaatcccgcgaacaacaaaaga

SEQ ID NO: 350621 - DNA, 1112 bp, Homo Sapiens
  misc_feature (971)..(971): n is a, c, g, or t
  misc_feature (983)..(983): n is a, c, g, or t
  misc_feature (994)..(994): n is a, c, g, or t
  misc_feature (1003)..(1003): n is a, c, g, or t
  misc_feature (1019)..(1019): n is a, c, g, or t
  misc_feature (1024)..(1024): n is a, c, g, or t
  misc_feature (1041)..(1041): n is a, c, g, or t
  misc_feature (1044)..(1044): n is a, c, g, or t
  misc_feature (1056)..(1056): n is a, c, g, or t
  misc_feature (1060)..(1060): n is a, c, g, or t
  misc_feature (1069)..(1069): n is a, c, g, or t
  misc_feature (1071)..(1071): n is a, c, g, or t
  misc_feature (1075)..(1075): n is a, c, g, or t
  misc_feature (1088)..(1088): n is a, c, g, or t
  misc_feature (1091)..(1091): n is a, c, g, or t
  misc_feature (1097)..(1097): n is a, c, g, or t
  misc_feature (1100)..(1100): n is a, c, g, or t
  misc_feature (1103)..(1103): n is a, c, g, or t
  misc_feature (1109)..(1109): n is a, c, g, or t
atcaggccaaatcggccgagctcgaattcgtcgagagcggagttctcgagctccagccctcagcgcatgcgcaggacgagtcgcctgagggaactgatctcagctcgggcccgcgttacatcctcctcctcttcttccttcggcccagctttccttaggggctgcaacccggacgccgaggccggtttcggagtggggagtgcccattttctctccttcccacgttcctggcccccagacgccatttgcaggcgggtggcttgggtcagcctccccgcccccacccgactcccgtcacgggagagcgcacaccgcgccccgagaaccaatcagcagccgcgttaggtaaccatgtctgagtctggacacagtcagcctggactctatgggatagagcggcggcgacggtggaaggagcctggctctggtggcccccagaatctctctgggcctggtggtcgggagagggactacattgcaccatgggaaagagagagaagggatgccagcgaagagacaagcacttccgtcatgcagaaaacccccatcatcctctcaaaacctccagcagagcggtcaaaacagccaccacctccaacagcccctgctgccccgcctgctccagcccctctggagaagcccatcgttctcatgaagccacgggaggaggggaaggggcctgtggccgtgacaggtgcctctacccctgagggcaccgccccaccaccccctgcagcccctgcgccacccaagggggagaaggaggggcagagacccacacagcctgtgtaccaaatccagaaccggggcatgggcactgccgcaccagcagccatggaccctgtcgtgggtcaggccaaactactgcccccagagcgcatgaagcacagcatcaagttggtggatgaccagatgaattggtgtgacagtgccatcgagtacctgttggatcagactgatgtgttggtggntggtgtctgggnctccagggganaggcaagtncatggtcatgtcattnttgtnagccacactccagaggnggncagaggcttatntttncggggccanancgcngaaatgaaaggangangggggnaancanaaccantgg

SEQ ID NO: 350622 - DNA, 1589 bp, Homo Sapiens
  misc_feature (921)..(921): n is a, c, g, or t
  misc_feature (932)..(932): n is a, c, g, or t
  misc_feature (959)..(959): n is a, c, g, or t
  misc_feature (1199)..(1199): n is a, c, g, or t
  misc_feature (1227)..(1227): n is a, c, g, or t
  misc_feature (1366)..(1366): n is a, c, g, or t
  misc_feature (1439)..(1439): n is a, c, g, or t
  misc_feature (1487)..(1487): n is a, c, g, or t
  misc_feature (1489)..(1489): n is a, c, g, or t
gaattcccgggatgttacatcctcctcctcttcttccttcgggccagctttccttaggggctgcaacccggacgccgaggccggtttcggagtggggagtgcccattttctctccttcccacgttcctggcccccagacgccatttgcaggcgggtggtaccactggctttactacagaaaggtgccattcagtttaatccaccgttgtcagagaagaagatgaaggctatcaacagcttaggcgcaggcatcattgaaaagattgccttgcaatttccgtatagattttgggacagtaaagtacaaggggctgacttttttggtcacgttcctcccaatgaccagctaagccaggctttttgacgagttaaatgacttcaatacccaagaagacacgcacacccacaacccccgcaccaccacttacacccctgcacacgcacgtctactcatacagaacatatcccccaagcctagatagacactctcacgtgaacagccagttaccaaaaatttaccttaaccaaatcattaaaaacccaatgacaatcacactcaccaacccacttaaccgacaaaacacatcaccctcataaattaaaaaccaatcacaacaactacacaaaaaaaatccgtccgtcaaaattaggcacgtttattctcggccaatcaccccacatcaccagaagctcaacgcaataatacatacagagttaccataacagaatagacacgaacctaaagcacatgatatattagaaacgatcccgagccgcgtaattgccctcataacaccagaacaagacacagcggaaataaataagacagacagaacgtaacgaaacaaaacaaccaccgcgaacgcgacgtacctgcatccataatcaatcacatagtacacacatccaacgcacgagccncacgctacatnaaaccctcatttcatacagccccggtntgatcgcacacgtgccagatgcgatacaaatacagtaacactatacgataaactgaaacgatatataaatcagtggtccagatgacaggccacgcatgtaagatgtctaactcaatacataatccgccactagttaaatacacatacaccctcgacatatcgcacaccaacgtaaatgcacataaaaatcaagctagaagacgcgtgacgaaaggaaaataaaacacctactgcacgacntatacctacttacccaccaccgtaattntttctatttaatatcttttacgcgaaggtggatgatttgtatgtgtatgccaatctataatctcacagcttacaagtgcacatactcctacaagataagcccaagtctagtgcacaagcgtagacacacaccgcgcccncaacccacggtcctacagaatactatcttcatctcttcgacaggcctagacgtaggtctcgacgagcaaccgnaaatacaaaggcgcggagagcgacagaaaacagcaattattcgagaantnccgtgtccgcgcgacaaacgtgtcgacgatcctcaaccgactatgctccatacactctcgctgaggctctattccctccgagacggcggacacacgaagg

SEQ ID NO: 350623 - DNA, 1017 bp, Homo Sapiens
caacagccccttagcatggtaaattgtaggatgtaaatccggacttggactttgccactgcctattcaaatcctctccacttaaagaacagcgatgatttccattgatgacaccatctggatttaacatagggacaattttaaaaatataagattctcgtaagctctgagcagtggggttattgctcatgagatattccaacgttcctttcataaccccaacttgcattagtttctccaggatgtacccgagcagacaagaaaacgtaagggcgatttctgaaatggcagatatgttcataataattagactctggcattgctgttatagtcaccaaggggcagctgtttccagacagggtttcacataacacatctttccgaaaatagatttgctgaggattgtgtgctgattccaatttttgaagatgcatctgtaaagttgaatacgtatatggatagtgataagcaaagtagcaaacatcatctttatgtggaaaattgacagtaaatgtaattgtatagtaggattttcccttttgcccacctgcagcaactgaacttcttgagaaatgatttttatagtaacaaatgtcagtccccatacgaatccaccatggtctggcatttaatgcttcctgaaccgaatacatgagtggttgcataccataattaaactgactgttggacttttcacagttaatgatgttaaacctgtaagcaacacctggtcgcattccactgacttcaaagtaaaaccactgatgataatgatggctgtttatgtctgagttcagaataagatcatattcattttttctaatttgaattactttgcgcagattcccagactcaaatttggagttaaatttcaaaatatctccctcttctggaatggtgtaatttgggttatccaagtcatataccacacgatctatgatatcactctgatgtattagcctttcaatatcttgagcaatttttgtcctttgtacaccataaggcctttctaaaatag

SEQ ID NO: 350624 - DNA, 932 bp, Homo Sapiens
gactgccaaagcgcaggattataggcgtgagccaccactcccagtctctgggtgggttctcttgaactggacaccttcctgttagggaagcaaggaggaggcaggcccactgcaggcctgcgcggacggttcaggaggaccttctgagattctgcccactcagcaccccactgggtgccccccctcagagttacaggcacacgggctaaaggaaatgagatgggggtagccctaaaagaagccaagcatcaggtaaaccagaagtttaataaaaatgagcaaaattacaacatggcgggccagcaatgggctgcttcagaaggtctgaggtgttggtcagcctgacgtcctggcttccatggttctgggaggtcacaggattggtccctcacacccaaggttcactttcctcaatcaccctgttcccaatggggaggactctgtctctctggtgtaatttttggccaggctggttctgaaccccctcagcctgtgaagaaggctgccttagtctgaccttcaccccgtgatgatgaggatgtcctttatattgttttcctaagtccacactcccaccccagactctgaggatggcagacagaggaaagcccattttatggagaattaagagctttgggaatgctggagcctcctccacagaagacagccacagctcccagggtctcctggcttgcctgcaagctcttctgaattccttgggcccatctctcttgcaaagtgctcaggacgcccgggtgctggtgctgagctgggtccaaaagtctgcacagaagggagccccgctgggcccagacctccctggcggccactgcaggtcaggccagttaggaggtgctgctcctcctccgtgggtggagggctttcctcctggcgatgtcctcctcagtgtcactctcacagttcctctggag

SEQ ID NO: 350625 - DNA, 754 bp, Homo Sapiens
  misc_feature (18)..(18): n is a, c, g, or t
  misc_feature (52)..(52): n is a, c, g, or t
ttcccagagtcaactccnacttcccagaaaagtagggttcaagaaacacgtncatgggctaaatcccctgacaaatgcccactcacaccctccctaggttcccccctactgcccaccgtgaccccaaaaaattagcttatttcagtttcagccccagggaacagaatcctaagcagggagtggaaagtggtaactcgggttgtgaatgcccgttagattccaaggctggatgtgagcttacacagcaaatcacagcctcccattgttctagcacataccaaacctcggggagtcctacagccaagctgacattaggggtccaaaaaccacagataacacaggatggggctccagacagaggcggggggaaggtgaatttcaccaaggaattatcccaaggcaggcgccttgctgtaaaacttcccggccagccgggtgggttcctcgaaggacactggcttgctctacactagggagaggaggctgacctgcaaaccacttcagaccacagcagatgtgcacgctgctgatctcctgtccaatccaagaaagagcacttcagaaacgcctgaggcccacagcacgtgtgtttcaacagaagagcaggatagaaagagccatctgggagtggcgtcttcagcccctattctttctcactctttgcttcctcattctctctcaaacaagagagaaatgggagagcagggataagtacggaggcaagcctggcctaaagataaatcctcaaaaatcg

SEQ ID NO: 350626 - DNA, 787 bp, Homo Sapiens
actggcagtaactctacgggttaaggtagcgaggcctgggtggcgaattcggcacgaggccccgaggtttggtatgtgctagaacaatgggaggctgtgatttgctgtgtaagctcacatccagccttggaatctaacgggcattcacaacccgagttaccactttccactccctgcttaggattctgttccctgggctgaaactgaaataagctaatttttctgggtcatggtggcagtaggggaacctaggagggtgtgagtggcatttgtcagggattcagccccatacgtgctcctctgacctgcctgtaccactgtggcgtcctacttcaagtcactgtctcgaaggctgtggcatctttggtgtagctcccagccaccatgtagggctagctctggctttaaggtgaactctccccattggcaaaccggacccggacgccgacaggactgtgtataccaaaggttccaccgaccacgcaagcccagcatcagacctgtaggtccacgtgctgaggcagaggaggacagtgtcccagaagagggaggtcacgaacgcaccatgcctcagaaacgtggacgagggaggaccactctgaagctggacatcctggacgtgaaatacaccgtaaagacaaggtacggccattcctatccccatcgaggggaaaacggagcatgaaggtggagagtggattgatgggcagaataataataggtgggccatggctagctttgccaatactggggtatgacaatagagtagaatagatgacagagaacc

SEQ ID NO: 350627 - DNA, 1467 bp, Homo Sapiens
  misc_feature (22)..(22): n is a, c, g, or t
  misc_feature (50)..(50): n is a, c, g, or t
ccactccctgcttaggattctnttccctgggctgaaactgaaataagctntttttttgggtcacggtggcagtaggggaacctaggagggtgtgagtggcatttgtcagggatttagcccatgacgtgtttcttgaaccctactttctggaagtggagttgactctggaagttttctagcaactgaacaaaagctcaggtttgtcctggtcatgcacatgccttaagccagttccgtcttccctagaccttggcatcctgtgcttctatttcttggaatacgttctcctctgacctgcctgtaccacgtgggtcctcttcaagtactgttttgaagctgggctcttttgtgtagctcccacccacctgtgagggctagctcggcttaaagggaactctccccattggcaaaccggacccggccgccgccaggactgtgtttccaaaggttccccgcccccaaccccagcatcagcctgtagctcccctgctgaggcagtgtggttatgttcccagcagtgggggtcagacgcccttcctcagaactttctagttgccctctacctgactcctgacttgtattccttttagcagtagccttcttccctcggggagccaaagagtgtggtgtgtggcgctatattgtggctgctatttcatctggtttcttttaatgtgaggaactcacatactgacttcagtgggactcggtgagccggggccgtctgtgtggtgggaccccctttagcgggactcagtgagctggggccgtctgtgtggtggagccagggcctctccctttagtggagccaggttgtcgggccccgaatgtcactggtggatctaagaagggctgagtggtctgacaccaaaacatgccgcagggagggctgtggtgccggtgcttccaacaaggacagccctccttgaccctgaaaggaacactggcttgaaggactgcagacaggctctgaggggcacgccctcctcagcgagaggcagcaaggtggccacagtgtcactggtcaggtgcttctcaccacgggaaagccgccgacctgtgactcgcttgagatgggaaagcggcgccacagaccccgggtctccttggctgtctgtgggccgcccctggccaccttgtcctggctcgcagggtgcaggagcgcctcgttctctgggtggccggcttgctgctccggtttgggctgtcttaccataacaccgtcccagggctctgcaggccactgtgagcgctggctccctgggcagtgctcctccgtgtggactgtgcctcaggccagggctcaccagctggggtcctgtccggaaggatgggatctttctgggagctgcgccggacagagtggggagctcctagtttgtggggggaagctttgatatccatgccacgtccatccaccccaccccttttcgtcacgagcacaatggtcttacattggatttttgt

SEQ ID NO: 350628 - DNA, 1140 bp, Homo Sapiens
  misc_feature (19)..(19): n is a, c, g, or t
  misc_feature (921)..(921): n is a, c, g, or t
  misc_feature (989)..(989): n is a, c, g, or t
  misc_feature (1031)..(1031): n is a, c, g, or t
  misc_feature (1041)..(1041): n is a, c, g, or t
  misc_feature (1048)..(1048): n is a, c, g, or t
  misc_feature (1057)..(1057): n is a, c, g, or t
  misc_feature (1070)..(1070): n is a, c, g, or t
  misc_feature (1072)..(1072): n is a, c, g, or t
  misc_feature (1077)..(1077): n is a, c, g, or t
  misc_feature (1080)..(1080): n is a, c, g, or t
  misc_feature (1093)..(1093): n is a, c, g, or t
  misc_feature (1099)..(1100): n is a, c, g, or t
  misc_feature (1103)..(1103): n is a, c, g, or t
  misc_feature (1116)..(1116): n is a, c, g, or t
  misc_feature (1123)..(1123): n is a, c, g, or t
  misc_feature (1131)..(1131): n is a, c, g, or t
tgggagaaaatatattganatgtagtagtgcataactttaattgttatactttttgcatcttacaaactttctacaataagtacacatgacttatataaacagagaaaagcaatcattatcttaaaaataactatccagtaactgccacaatctcctgagtccagacaatctagagcagaagggtagactgaggaaaatatacacagtataaaaaagtaacgaaaatcaaaacctgaaacaaagatcaacatccaataaatgcttctgaataaagggagagtagataagaactggattttaatcccaacactgccatttaccagctggccaatactgagctagttactctaaagagttcagttttctcatttgtacaaataggatttgactttccatctcactgagttgtgatgagagtcatatgcaacagcatatgaagaggctagcaaaagatatttaacaagcgttcaacattctcatgatgacatgaataacactgtacatacaacataccatcttgataaatacacagcacagttaatagctgagggcagagttatggttgggaagagagagagtgcaacataggcagagtgaggggggattcccacaattttctaagacagaaaagtgggggaatcagtagttactggaaagaataggcaatgcctgactggatagaaaaagattctatgccaatgtcaaatttcacaaaagtgacttaagcctatactgcgggatgttcacactacgtccctttagtgcagttacggtacttcaggctgcaagtaaccaaatacaactaaaattgtcttatacaataagggcgtaattatctcatataacaagaagcttggcatgaaggaaatttcaacaatttcacaacggcaacaaaaactctgtttcttctacctttccancattcctgtgttctcagttccaatatggctgctaacatccatatgtcttccccgcacatctctttaanagctacaaaaagatttcccaaaagcgtcttggaaaatttctngtccatctcnattggcnagaccactnccatgggatgctntngtganganacaagggcagatncaacgnncgntaggagaccaganatggccnccggatgngactgaggg

SEQ ID NO: 350629 - DNA, 1512 bp, Homo Sapiens
  misc_feature (15)..(15): n is a, c, g, or t
caagcttggcacgcngggagaagagccaggctcccaccctggagctgcttcagaatccaaaagaagtgttgaccaggagtgagatccaggatgtgaactattctcttgaagctgtaaaggtgaagacagtgtgccagataccattgatgaaggaaatgctaaagcgattccaagtggctgtaaacctagctgaagacacagctcatcccaaactcgtcttctcccaggaagggagatacgtgaaaaatacagcatcagccagttcttggccagtgttttcttcagcatggaactactttgctggatggaggaatcctcagaagactgcttttgtagagagatttcagcacttaccctgtgttctgggaaaaaacgttttcacctcagggaaacattactgggaagttgagagtagagatagtctggaggttgctgttggggtgtgtcgggaggacgtcatgggaattactgatcgttcaaaaatgtccccagatgtgggcatctgggcgatttattggagtgctgctggctattggcccttgataggcttccctggaactcccacccagcaagagccagctctccaccgagtgggggtttacctggatcgtgggactgggaatgtctccttctacagcgctgtggacggagtgcacctgcacaccttttcttgttcttctgtctcacgcctccggccatttttttggttgagtccattagcatctttagtcattccaccagtgactgataggaaatgaggcttttcttcccctgaccaaaactccttccctgtagtccagctgagggacacacatccctgggccctcttctgcccttcatgtctctatcctggatggtccatcttctgggtctccctaacggtaccgtttggtatctgccctttgtgtgcttcacaagaggcagtcccatgggaggtgggtctggccaatggagatgggacaggaaattttccaagacgcttttgggaaatctttttgtagcttttaaagagatgtgcggggaagacatatggatgttagcagccatattggaactgagaacacaggaatggtggaaaggtagaagaaacagagtttttgttgccgttgtgaaattgttgaaatttccttcatgccaagcttcttgttatatgagataattacgcccttattgtataagacaattttagttgtatttggttacttgcagcctgaagtaccgtaactgcactaaagggacgtagtgtgaacatcccgcagtataggcttaagtcacttttgtgaaatttgacaaaggcatagaatctttttctatccagtcaggcattgcctattctttccagtaactactgattccccccacttttctgtcttaaaaaaattgtgggaatcccccccctcattctggcctaaggttggacttctcttttcttttcacaacaaaaaatcttggccctccacctatttaacatggggcggggggattttatccaaaattgggaaatattgtgat

SEQ ID NO: 350630 - DNA, 569 bp, Homo Sapiens
tgaaaatatccttctttgtaaccccaaacgcagtgcaatcaagatagttgactttggcagttcttgtcagttggggcagaggatataccagtatattcagagtcgcttttatcggtctccagaggtgctactgggaatgccttatgaccttgccattgatatgtggtccctcgcgtgtattctggttgaaatgcacactggagaacctctgttcagtgctgccaatgaggtagatcagatgaataaaatagtggaagttctgggtattccacctgctcatattcttgaccaagcaccaaaagcaagaaagttctttgagaagttgccagatggcacttggaacttaaagaagaccaaagatggaaaacgggagtacaaaccaccaggaacccgtaaacttcataacattcttggagtggaaacaggaggacctggtgggcgacgtgctggggagtcaggtcatacggtcgctgactacttgaagttcaaagacctcattttaaggatgcttgattatgaccccaaaactcgaattcaaccttattatgctctgcagcacagtttcttca

SEQ ID NO: 350631 - DNA, 925 bp, Homo Sapiens; identical to SEQ ID NO: 15808

SEQ ID NO: 350632 - DNA, 759 bp, Homo Sapiens
agcgggtcaaagggcgcggggcggtgcctgcgaagagccacacggcgcgacaagatggcggataaggagaagaagaaaaaggagagcatcttggacttgtccaagtacatcgacaagacgatccgggtaaagttccagggaggccgcgaagccagtggaatcctgaagggcttcgacccactcctcaaccttgtgctggacggcaccattgagtacatgcgagaccctgacgaccagtacaagctcacggaggacacccggcagctgggcctcgtggtgtgccggggcacgtccgtggtgctaatctgcccgcaggacggcatggaggccatccccaaccccttcatccagcagcaggacgcctagcctggccgggggcgcggggggtgcagggcaggcccgagcagctcggtttcccgcggacttggctgctgctcccaccgcagtaccgcctcctggaacggaagcattttcctttttgtataggttgaatttttgttttcttaataaaattgcaaacctcaaaaaaatcccccaccccgtatcccccttccccaccgcaatctctccgtaataatacatctcagctctttttttgtggggggccccctctgcccctctgaaaaaactttttaaaaacccttttcctttggggccgccgggccccccttaagggaaattggaaaccgggccttatacctgcttctccaaggaaaaacttgggcccagaataaagggctttggattccccccccaaac

SEQ ID NO: 350633 - DNA, 1075 bp, Homo Sapiens
  misc_feature (1033)..(1033): n is a, c, g, or t
cggtccggaattcccgggaagagcctgctacggtggactgtgagactcagtgcactgtcctcctcccagcgaccccacgctggaccccctgccggaccctccacccttcggcccccaagcttcccaggggcttcctttggactggactgtccctgctcatccattctcctgccacccccagacctcctcagctccaggttgccacctcctctcgccagagtgatgaggtcccggcttctgctctccgtggcccatctgcccacaattcgggagaccacggaggagatgctgcttgggggtcctggacaggagcccccaccctctcctagcctggatgactacgtgaggtctatatctcgactggcacagcccacctctgtgctggacaaggccacggcccagggccaacccaggccaccccacaggccagcccaggcctgccggaagggccgccctgctgtgtccctgcgagacatcaccgcacgtttcagtggccagcagcccacactgcccatggctgatactgtggaccccctggactggctttttggggagtcccaggaaaagcagccaagccagagggacctgccaaggaggactggcccctctgctggcctctggggtccacatagacagatggacagcagcaagcccatgggggcccccagagggaggctctgtgaagccaggatgcctgggcattccctggcaagaccaccgcaggatgggcagcagagctctgacctaagaagctggacttttgggcagtctgcccaagccatggcctccccgccaccgaccccggccccagcagtgtccttcagaaacactcctacttgcaccctcccggtgaatccatgaaactctgaaccccttcccccaagaaaagggctttttggttgaggaggaacaaacatatatttcttccaaccaaccaaactatcagacacctgataatctcgagagacaagagccctatcccaacaagatccaccccacccaggtacccatttcgacacaccatacacgattnaagatcaacccgctaccccagagcccgataaacggagggggc

SEQ ID NO: 350634 - DNA, 889 bp, Homo Sapiens
atcaggccaaatcggccgagctcgaattcgtcgagagcggggcaggccgggcatggcgtccatggcggcggcgatcgcggcttcgcgctcggcggtcatgagcgggaaccggcctctggacgaccgggagcgaaagcgcttcacttacttctcgtcgctgagccccatggccaggaagatcatgcaggacaaggagaagatccgcgagaagtacgggcccgagtgggcgcggctgccgcccgcgcagcaggacgagatcatcgaccggtgcctggtggggccgcgcgccccggcgccccgagaccccggggactcggaggagctcacgcgcttccccggcttgcgcgggcccacgggccagaaggtggtgcgcttcggggacgaggatctaacttggcaagatgagcactctgcccctttctcctgggaaacaaagagtcagatggagttcagtatctccgccctatccatccaggagccgagcaacggcaccgccgccagcgagcccagaccactgtccaaagcttcccagggctcccaggccctcaagtcctcccaaggcagcaggtcctccagcctggacgccctgggccccaccaggaaggaggaggaagcgtcattctggaagatcaatgctgagcggtcccgaggggaggggcctgaggccgagttccagtcgctgaccctagccagatcaagtccatggagaacggggacaaggtcttgcctccctgctaccggcaggaacctgccccgaaggccaggcaggccaagtgggaaaggccagaacctccgtcaggagcacgcgtctcttcccaaacgtgagcaccgaacgtgagagacccagctggtccaggctcagcagtgcactgccagaggtgcccctaca

SEQ ID NO: 350635 - DNA, 1661 bp, Homo Sapiens
  misc_feature (647)..(647): n is a, c, g, or t
  misc_feature (750)..(750): n is a, c, g, or t
  misc_feature (1164)..(1176): n is a, c, g, or t
  misc_feature (1503)..(1503): n is a, c, g, or t
gggagcgctcgcgggacatccaggaagccttggaatcctgccagactcgcatttctaagctggagctccaccagcaagagcagcaagctctgcagacagacaccgtgaatgctaaagttctcctggggaggtgcatcaacgtgatcctggccttcatgactgtcatcttagtgtgtgtgtccaccatcgcgaagtcgtctcacccatgatgaagagtcgctgccacattcttggcaccttctttgccgtgactcttcttgctatattttgtaaaaactggggaccatatcctgtgtgccatagaaaggatgataataccaagatgaagccactggttcctgccttcaagttctttcaagtttttattttaaagaaaactctgtgcatactaccaaattttacagtgaatgattgtgcggactcgtgtgtaagaaaaactaggactgtgtggtgtaaataactacaattctcttaactccgtagcagttgccaactcagtccttgtacttcgttaacacgaatctgtttcagagctctcctaccttgctcactgccttaatcagaccgatttcctgcccacctgaccagcccagcgtggtaaacctctgtatattgagaccttggcataattggtgatcctgaagaanagaggtctctctcctaagtctctgtcagaattgagcttcacaattgctaaatggttgttttctgtgagtcctataaaaagcaaggatatgcatgaatcagggnaatgaagaatcacaggcttggggcagtgttaaacacgggtgccctaatggtccccgctgtgatccaaccctgcttctctccaagggaacataagtcccgtcatgtactcagtgtccacagcaatcagtcgtgtatgaccctgtaacgtggaaatcttatcacacacctggtatccaacaagtctacctgaaggggtttggtacactttaaatgggaaggcatagggatttatgaatggggctttcaccttctcatacccaggcaaccaacacctgattttgtctcaactggctagcaaatgcccagccttcagagtgtgcaggaatgttttcaaatccctcatcagactgtgactttaacattaatttggaatcctgtgagcactactctgaaggtttgtgttttggcaaatcnnnnnnnnnnnnngagacagggctctgctaaatattgctcaagctggttgcaaactccttgcttcaagggatcctcccacctcagcctcccaagcagccgggactgcaggcacaagccaccatgcctggctgttttttggcaaatcttgattgtgataagcccccctggaggatatgattcactttatgtgattcatcttattcacaggtctgtgagggactgcgaagcttactcaggaaatgaaaacaaatgatggtcatgttgcagttttttccttgaaggacaaccgaaccatagcctctaaagttcaagtgcactgaggtgtcggaacgctgaaanatgaggaaacgaggacgtagggtgtgactgaatggtggctagattagtgggagcagttcacctggatgaagattgagagcatcgtctttgagaagtgaaagactagcaagaataaaataaattaagtccagtgtttgagccaaggttgccacctgtct

SEQ ID NO: 350636 - DNA, 533 bp, Homo Sapiens
  misc_feature (17)..(17): n is a, c, g, or t
  misc_feature (46)..(46): n is a, c, g, or t
atgttggaataaacagntgtgtgaataagatttcccacgttaacanggtcaatacacgactgaactgcctgtggaacactgagtaaccatggaacggacctaatggtccccctggagaagaaaccagggtggaatccacacggggacaaataggcccacagtgtttaaacactgccccaagcctgtgattccttcattccctgaatcatgccatatccttgctttttataggactcacagaaaacaaccattagcaattgtgaagctcaattctgacagagacttaggagagagacctctttcttcaggatcaccaattatgccaaggtctcaatatacagaggtttaccacgctgggctggtcaggtgggcaggaaatcggtctgattaaggcagtgagcaaggtaggagagctctgaaacagattcgtgttaacgaagtacaaggactgagttggcaactgctacggagttaagagaattgtagttatttacaccacacagtcctagtttttcttacacacgagttccgac

SEQ ID NO: 350637 - DNA, 902 bp, Homo Sapiens
gactgttcaactgactttgctttctagagcaggtatattttagcagtggagactccttcagtttgggtctctgtgtcagatgaatcagtactcacggaaaagctggagtgtttcagaatacttcccagaggcagatgagggctactgtctaagaaaaagtttaagtctgtctgtgtctgtgtgtcaaacatctcaaggcctaagaagttagaatttcccctacacccataggactgagcagaggtatctgcgagtaagaagtccgtttgagtctctatgtccagtgactccaagactggctcggtggtcatggtgctaagttcactctcttcagtttgagtctggatatttgaggccgaaaagaactcttcgatatcaaaatcgattccggggttctgggctgggccagatgggagctgggtgtcaggtccaggatttgtgtcagacaaaagactacgatgatccaatgtctgggcaggcagattacttgacaagatgttttccaaatcacttaataaatctatggtttgggtctgattatctgtcatgttctgtgaaggaagcatactattctgtgcactgaaatttataattggtgcagatttctcaatatcttgatttaaagtcttaggctcattctgaggtaacaaactatgagttactgtctctgctactaaactgttgcttataatgttacctgtagcaacattatatgatgaatgaacactctcaaaaatgtctccgcacattccagcttggtccatctgtacatggtcatccgttggactttctatcccactggtttgagtttctctggagaccccacctgactggaaacaggtgtccataaatgcatcagtctgagcagctatagatgaagttaccttagagctgggcaaaaa

SEQ ID NO: 350638 - DNA, 215 bp, Homo Sapiens
ttacgtaggattaatacagaaatttaatcatgtctgattaattgctctatgaaaataaggggcatttaaagacccagcataaccatttgtataatgagaaatctaggggaaaaccaatcagtccaacatgagattttaggaatagaaatttgccggccatttggaaagtgaaatgccacttagttctcaattgatgacagtgtttgaatcatcat

SEQ ID NO: 350639 - DNA, 797 bp, Homo Sapiens
  misc_feature (534)..(554): n is a, c, g, or t
  misc_feature (694)..(731): n is a, c, g, or t
atgagacgacaggaagaattaagacgcatgggaagaacttcacaatcaagaaatgcagaaacgtaaagaaatgcaattgaggcaagaggaggaacgacgtagaagagaggaagagatgatgattcgtcaacgtgagatggaagaacaaatgaggcgccaaagagaggaaagttacagccgaatgggctacatggatccacgggaaagagacatgcgaatgggtggcggaggagcaatgaacatgggagatccctatggttcaggaggccagaaatttccacctctaggaggtggtggtggcataggttatgaagctaatcctggcgttccaccagcaaccatgagtggttccatgatgggaagtgacatgcgtactgagcgctttgggcagggaggtgcggggcctgtgggtggacagggtcctagaggaatggggcctggaactccagcaggatatggtagagggagagaagagtacgaaggcccaaacaaaaaaccccgattttagatgtgatatttaggctttcattccannnnnnnnnnnnnnnnnnnnnagataccaatcttttaaattcttgcattttagtaagaaagctatctttttatggatgttagcagtttattgacctaatatttgtaaatggtctgtttgggcaggtaaaattatgtaatgcagtgtttggaacaggagaannnnnnnnnnnnnnnnnnnnnnnnnnnnnnnnnnnnnnactgtataatgtccctcaagtttatggcagtgtaccttgtgccactgaatttccaaagtgtaccaa

SEQ ID NO: 350640 - DNA, 1417 bp, Homo Sapiens
ggcctgggtggcgaattcggcacgagggccaggcccgactccgaccccgcccggcggccgcagcgaggagaagatctcggactcggaggggtttaaagccaatttgtctctcttgaggaggcctggagagaaaacttacacacagcgatgtcggttgtttgttgggaatctacctgctgatatcacggaggatgaattcaaaagactatttgctaaatatggagaaccaggagaagtttttatcaacaaaggcaaaggattcggatttattaagcttgaatctagagctttggctgaaattgccaaagccgaactggatgatacacccatgagaggtagacagcttcgagttcgctttgccacacatgctgctgccctttctgttcgtaatctttcaccttatgtttccaatgaactgttggaagaagcctttagccaatttggtcctattgaaagggctgttgtaatagtggatgatcgtggaagatctacagggaaaggcattgttgaatttgcttctaagccagcagcaagaaaggcatttgaacgatgcagtgaaggtgttttcttactgacgacaactcctcgtccagtcattgtggaaccacttgaacaactagatgatgaagatggtcttcctgaaaaacttgcccagaagaatccaatgtatcaaaaggagagagaaacccctcctcgttttgcccagcatggcacgtttgagtacgaatattctcagcgatggaagtctttggatgaaatggaaaaacagcaaagggaacaagttgaaaaaaacatgaaagatgcaaaagacaaattggaaagtgaaatggaagatgcctatcatgaacatcaggcaaatcttttgcgccaagatctgatgagacgacaggaagaattaagacgcatggaagaacttcacaatcaagaaatgcagaaacgtaaagaaatgcaattgaggcaagaggaggaacgacgtagaagagaggaagagatgatgattcgtcaacgtgagatggaagaacaaatgaggcgccaaagagaggaaagttacagccgaatgggctacatggatccacgggaaagagacatgcgaaatgggtggcggaggagcaatgaacatgggagatccctatggttcaggaggccagaaatttccacctctaggaagtggtggtggcataggttatgatagcgaatccgggcgttccaccagcaaccatgagtggttccatgatgggaagtgacatggtaaaaatgattgatgttggctggatattggagtgctcattcacattgaagtggatagatacttctcaagacatcacacagcgtgagtcaatccagggagggaagccacaagcagactgacaacgtttatagcaggatcaggtgagctgtgtccagaaaaccaacgaga

SEQ ID NO: 350641 - DNA, 1202 bp, Homo Sapiens
  misc_feature (59)..(78): n is a, c, g, or t
  misc_feature (111)..(124): n is a, c, g, or t
tgatagataatgattggaaatttttaagaatcaactggaaatatcaaaagttgctggtnnnnnnnnnnnnnnnnnnnngttgcttttgaacaaaagtgctgaaaaaaatannnnnnnnnnnnnngagagtgaaaagggcttggacttaagataggaaaatgtggagaatggggggaagaatgaaaaaagatatagtatccattatggatggtaaatgtgaaaagggaaatattaattaatataaactttgcagtaataattaagggaggaagaaaaaaatggaaattgaatgaaggatgatatttgttttgtgaaatgtggccatgcaaggaatatagtgaaggtgaatgtattatacataagaaaaaaattggttaattgctgtaccagtaaggaatagcttttaaagccctaaatttaaaaataagtgaggaattagatgggaaagaatgaggtaaataaaaaggattgaaggaaaaaaaataaagagttgtgtaatgagggaaggggagttgggaaatattggaggaataatgatgaaggtggtaagaatgaatgaaaatggaagaaataattgaatggggagaagggtatgtgatttaatatgaaaaaagagatgatgttaaaaataatttggtgaggtaaaagttgtaaaataaattaaaataagggatagtatattttgggttgcagtcaaacttgtgctcagactggtgaaactgagagtcaggcttttacattttaaagaaaatacagttttcattctaattcaggtgtctacttattttatgtaagaataattttagatttcccccccaccatgaagtttcttcctatttttttatgctgtaacttacccccaatctttatctctggatttttactctttaaattttgaagttgactagcattttcaaacctttattttatacccttgtcttttatattaactttttcttattattctttaggtaagaatgattgatgttggctgatattggagtgctcattcacatgaagtggatagatacttctcaagacatcacacagcgtgagtcaatcaaggagggaagccacaagcagactgacaacgtttctagcaggatcaggtgagctgtgtccagaaaaccaacgagaaggagtggaaggaggaatgaacgtttcattctcgttaataaaggcattatcctaattaaaaaaaa

SEQ ID NO: 350642 - DNA, 843 bp, Homo Sapiens
  misc_feature (49)..(49): n is a, c, g, or t
  misc_feature (115)..(115): n is a, c, g, or t
ccaccacccttccctaagaaggtggaaaattttctggccctccctgaancccataggggatcttccccatgttccattgctccctccgccaaccccattcgcatgtcttctttcnccgtggatccatgtagcccattcggctgtaactttcctctctttggcgcctcatttgttcttccatctcacgttgacgaatcatcatctcttcctctcttctacgtcgttcctcctcttgcctcaattgcatttctttacgtttctgcatttcttgattgtgaagttcttccatgcgtcttaattcttcctgtcgtctcatcagatcttggcgcaaaagatttgcctgatgttcatgataggcatcttccatttcactttccaatttgtcttttgcatctttcatgtttttttcaacttgttccctttgctgtttttccatttcatccaaagacttccatcgctgagaatattcgtactcaaacgtgccatgctgggcaaaacgaggaggggtttctctctccttttgatacattggattcttctgggcaagtttttcaggaagaccatcttcatcatctagttgttcaagtggttccacaatgactggacgaggagttgtcgtcagtaagaaaacaccttcactgcatcgttcaaatgcctttcttgctgctggcttagaagcaaattcaacaatgcctttccctgtagatcttccacgatcatccactattacaacagccctttcaataggaccaaattggctaaaggcttcttccaacagttcattggaaacataaggtgaaagattacgaacagaaagggcagcagcatgtgtggcaaagcgaa

SEQ ID NO: 350643 - DNA, 672 bp, Homo Sapiens
  misc_feature (542)..(542): n is a, c, g, or t
  misc_feature (570)..(570): n is a, c, g, or t
ggagaggtagacagcttcgagttcgctttgccacacatgctgctgccctttctgttcgtaatctttcaccttatgtttcccaatgaactgttggaaaaagcctttagccaatttggtcctattgaaagggctgttgtaatagtggatgatcgtggaagatctacagggaaaggcattgttgaatttgcttctaagccagcagcaagaaaggcatttgaacgatgcagtgaaggtgttttcttactgacgacaactcctcgtccagtcattgtggaaccacttgaacaactagatgatgaagatggtcttcctgaaaaacttgcccagaagaatccaatgtatcaaaaggagagagaaacccctcctcgttttgcccagcatggcacgtttgagtacgaatattctcagcgatggaagtctttggatgaaatggaaaaacagcaaagggaacaagttgaaaaaaacatgaaagaatgcaaagacaaattggaaagtgaaatggaagatgcctatcatgaacatcaggcaaatcttttgcgccnagatctgatgagacgacaggaagaattnagacgcatggaagaactttcacatcagaaatgcagaaaacgtaagaatgcattttgagcagagagaacgacgtagaagagagaagaatgatgatcgtcacgt

SEQ ID NO: 350644 - DNA, 1269 bp, Homo Sapiens
  misc_feature (878)..(887): n is a, c, g, or t
  misc_feature (894)..(894): n is a, c, g, or t
agcggaggatgtccttggtatataatatatggacttcaagggaactttattggggtggggggttaatttgccttaccctgttcactttcagatgattaaggcttttgcactttagaatgagaaacttgtgacgttagtgtgttcttactagctttaatttgtatgtagcaatgaattgtgaatcttagtgcagtgggtttttttaaaaaactcaaaaagctgggaattaagtggtttcagtaataatgctataccgaggtgcttgcattgtatttcataattttgttacaaaccaaaattatttttaatgagaacagtcttgggttcagaggtgtgatgccagaatgtattttcgtactgttaggcccttggaacagataccggtgctttctgaaagatgaaagaaatgcaatgggtgctcttcatgcaaggttgcaaacctaccaagaatgcataatagtctcacttttccccaataaagagatgcgtgtgactagttttggacttttaaccttaatgggggttgcatgtctcctattgttaatcattgtcagctgcagtgacatgatccacagtcctgcatttactgcctttcacttaatgattttggacaggttttagagagccaggatgttggtctgggcctttatttggttttggctttagctgataatgttttagtgatgtcagctagtgcagttctcaaatggctgcctattagggaaagaattcagaggatttgactgctcctaatcatctgtcattgctgctagataatgattggcaatttttaagactcaactggaaatctcaacagttgctggtaaaccattaaccataaaaacgttgcttttgaacaccagtgctgaaaaaaatannnnnnnnnntgttttngagagtgaaaagggcttggacttaagataggacaatgtggagaatggggggaagaatgcaaaacgatatagtatcccttatggatggtacatgtgcaacagggaactcttacttcatataccctttgcagtaatcattcagggaggaagaaaaacctggaacttgaatgaaggctgatctttgttttgtgcactgtggccctgccaggcatatagtgaaggtgaatgtcttctccctcagaaaaaaattggttccttgctgtcccagtaaggcatagcttttccagccctaactttaaactcagtgaggacttagatgggaaagaatgaggtaaatacaagggatggcgggacaacaactacggcgtggtgtccc

SEQ ID NO: 350645 - DNA, 382 bp, Homo Sapiens
  misc_feature (160)..(175): n is a, c, g, or t
tccctcccctgaaatgaattactgccaaagggtaatatgaaagtaaacagttcccctgttggcacatgtacccatcccataagggatactatatcgttttgcattcttccccccattctccacattgtcctatcttaagtccaagcccttttcactctcnnnnnnnnnnnnnnnntatttttttcagcactggtgttcaaaagcaacgtttttatggttaatggtttaccagcaactgttgagatttccagttgagtcttaaaaattgccaatcattatctagcagcaatgacagatgattaggagcagtcaaatcctctgaattctttccctaataggcagccatttgagaactgcactagctgacatcactaaaacatta

SEQ ID NO: 350646 - DNA, 1696 bp, Homo Sapiens
  misc_feature (1284)..(1292): n is a, c, g, or t
aacaaccccggacaagtctgtacataaaaccacaaaagaacatcagttttgtggacaatggtatcctctgctgtaaaaaaacgtatgcatatatgatcagtaagcagctcacatctttctgaatgtcaaggtctacaggattgtctctgtccacctttggtcaatgggttcaggaagtgactcatgggaactgcactcttaggagaaacacttttgggaataattttattgaataacaaccaccactcaattacactaagcttcagaaattgttggatttgtttaattttgctgtgtacctatacattgtttagaaagtttcttttggcttaaactgaccatttccccccttctttttgagttttccatgattaaacttgcccaaataaaaacataacaatccatatgcaaagcatatctgccaccacctcccactgcttcctgggccgcaaacagaaaaataaacagtgattaaaaaaaatgccaaagtgaaggtttctctttcttctatcacaacatagttgggtagttcccttaaagtacatcattgctataagttggtatcactgcaaatctcaagtcccaaataatctctttttctggatagaaagttattcaaaagggagcacaaaagagcaagctttggggcatactgacaaacacttcattggttagaagagaataattttaaaaatcaaataaaattgaggctggcataggaagtacagattaaatacaggttaaatagctaccagaaacacagaagaggtggttaataaaaactgagattgcttcagaggacacaggagggttgatgagacagtctattttccttccaccatcttccacgagagtcaggaaaagggttctgtgagcacccaacctggagcggtcacctgtctcttccatacacaggaggatgctaagacccagttagctttaaatggtttttagaaagacttacctagtcaaaagtggttaatttgaacttttcaaacttgcaaaagcatatacatttgatatcatcatctgagaagcaattcttagaaaaaaatgtttgcttcaatgtctaaagaaatccagtgaaagttttagaaacattgccagctagacgtctccgagttagagttgattgatatactggattgggatggagaggatgagaactgaaaaagaactgctccagcctctgcctcagaagaggaaactcagcttggagatgacagaattgggtagcggagtagatgctagagcccatgacagatagaaaactacccccatttnnnnnnnnncaacaactcattaactctatctctttgaggttttggagaacaggaagtttatgtgaagttatcgaacacgtcatattaagaacatttcataactaaccccaaaccaaaatgtagatgcatagctagctgtgcaagtttcccaatgctcttcctatctcctaataagtcacacagaaagactatgtgatagcctggattttcttgaagaaattttaaaagaactgattttcctatcatcattgaggccccttttacttcatgccatcagtatgcacttaagagtcccaaggaagtcaaatgttcccaaatgtagccctttacatcggcaccagggaagcctgccatatatacaatccccttcctagggtgaacaagctccaccagtttgagtgtgttaataactg

SEQ ID NO: 350647 - DNA, 417 bp, Homo Sapiens
  misc_feature (41)..(49): n is a, c, g, or t
ttctccaaaacctcaaagagatagagttaatgagttgttgnnnnnnnnnaaatgggggtagttttctatctgtcatgggctctagcatctactccgctacccaattctgtcatctccaagctgagtttcctcttctgaggcagaggctggagcagttctttttcagttctcatcctctccatcccaatccagtatatcaatcaactctaactcggagacgtctagctggcaatgtttctaaaactttcactgggatttctttaggacattgaaggcaaacatttttttctaaggaattgcttctcaggatgatgatatcaaatgtatatggcttttgcaagtttggaaaagttcaaattaaccacttttggactagggtaaggtctttgctaaaaaacccttttaaaggctaactgg

SEQ ID NO: 350648 - DNA, 1336 bp, Homo Sapiens
  misc_feature (239)..(276): n is a, c, g, or t
gcactcctcccatttccgccgccaccagaataactctgcttttatctgtcttgcctactgagatttcattttcaagctttctttgaagaagaacttcaaaccaccatctcgaggtttgatcttagaccagccagcacaggttctattcttgctgttcatgttggaatggctccagcgttccagtacaaagtgtctttgtgttggaacttgggtcacagacccaggcacaagcatttatnnnnnnnnnnnnnnnnnnnnnnnnnnnnnnnnnnnnnngtacatagttgatggtttttctagccaacccaccctgaagctctggccaaggtttgatttggacagggacctggtgctcagtggggatgggtcgtgaccctgatattggcccatgaagcatggggagctctggagcaaggaaacaggctcaatcccccactgaggacttgtgtctgcacccctatctggcaccccactttcctggcctaggcccaagggacacagcaggagaagcagtgtgataggagagaggctagggttaaattcatctttacacagcgccggatggatggaaatcttggctcacataaaagacagactcagggaggattttatgacaaaagtccctcctttgagggcaggattcccccaggaatcctggacactttagtgagaactggaccagcccttggcacaaaaccctgcctgccctgtcccccactcccaccccccagggaattctaggtgaaaatgtgaagctcagggcacagcaagcgcatgacacgggtgtattacattcggtccgagtgtgtccttagtttccctgtgtgcaaaatggggctagtccaggctcttcccacctcactgggacaattgcaagggtcataggagaggtgggtatgataggtggtcatatgaggtggtgagtatgagaggtgggtgcctcacaaactcggggtatggtcctgacctgcatggcagatgagcagagcacttgggaacgagcataggaagtgccatcttcccgggcatctctgctcagtgttaaggtctagccacagacactgtgggacctgcctcttcctatggaatgggggcctgcatgggttgtgtcctggggcaggagtgagggatggctgggaagaatctccaggtctgtggcccttgtgttgagtgattattttgtgacactctcattcctggaccacctgccaggtttatctgttatacctgtggcattcttattatgtcagacaagttattatagttcattcaactctaacaaatgaacaaaagaacaataaataggaggccattaaaggtcttttgtggcaaaaaa

SEQ ID NO: 350649 - DNA, 563 bp, Homo Sapiens
  misc_feature (473)..(473): n is a, c, g, or t
  misc_feature (500)..(500): n is a, c, g, or t
  misc_feature (519)..(519): n is a, c, g, or t
aagggtcacttctaaaggatgctgggggttgggcggaaggggtgaggaggtaagattgagtaacttgctgtcactgcttgtactttgtagacagcctgagagtggcaggaccttatgtgaatgggggggatggactgtgatcagtgccggggagtctctgaagctggggtccccacctccaggggcttctgctcagaggttacgtgtgcagtttgaagatgtacatcttgacctccggtttagaggcactttctgcccatcagattccaaactctaggggcgcagcaccttttctttgctcccaaacaccaaccaacaccccttcacaggaccagcactgttaggatggctaagtggatgttttatgttcccacgtccctgactctgtttcagaggttgtgtctggctctcccagcccctgaaggccaaaatgacttcctggcagcttttcatggaggttcagcctgtttccnggggggtatgtgttgagggggaaagcnggggttcaaagttttagantttattttttagggggagcccggggtttctttcaaaaccagagg

SEQ ID NO: 350650 - DNA, 546 bp, Homo Sapiens
  misc_feature (190)..(204): n is a, c, g, or t
ggatatctatgtaatgaaaagagacttacttaaatttgggattctgcttaaactttaagttgaatttgactgtagtcattcattctttttatatatctctgtcaggtatgacattaattaccaggtggtattatactctactttgagtttggacatcactttcagttaaatttctgttgttattgtggcnnnnnnnnnnnnnnnaaccccactgaagatggaagtagagcagtctgccatctcctgctgttctttctctgtgccccctaattgcttggtaatctaaaattattctgactttccacatactgtctttaaaaaccaattgtagcaatctgcccgcctccaccctttaagctaaatctttcactgtgctggatacatagacactcgataaatgtgtgatgatagttctaaaataattatgctatatatcagggttctgtatttttgagcaatatcattattcctatgctgtgatgttaaatggaatttattttacactagtaatagactgcttaagtggctgatttgaaacctttctct

SEQ ID NO: 350651 - DNA, 714 bp, Homo Sapiens
  misc_feature (39)..(40): n is a, c, g, or t
  misc_feature (127)..(127): n is a, c, g, or t
  misc_feature (144)..(144): n is a, c, g, or t
cgcaagactctggataaactctgctttatttccacaaanntcatcattcatcacagtctaaccactctaagttggccactttctcagcctggacaggcagaaaacctgacataatgggctagggccnccttagttcctgatacngaagctctctgtctactacgtacagtgattatttctactttcttgcccccacaccaaggtggtaacaggaactgcaatgtcatggttttaggaaagaggaagaaaaacctccctactgttctcagactctcacacctattgatggctctgttatccctccttggtgtgaatctgatggggaggggcaagaaacagagcctccatttcagaaaccttcaaaagtttctaagtatcttgcttttttctcctatagtttttgcctccttcttacctttcagaatgaggggtggagttggcgggacttcctgggccagtttggggacttttacaaaagacccccatgactcagggttttgagttcttaactgatcgaatgaaggattcaaaattaaccactccaaggggggattgaaggaagaaccactcttaatggacaaaaagaaagaaaggggagggagtaacagggatatgagctctagccgcccaagctagcaatggcaacccttttgggtccccttccagcatgtggaagctttcctttcgcttcattcaataaacagctgctgctcc

SEQ ID NO: 350652 - DNA, 1275 bp, Homo Sapiens
  misc_feature (47)..(83): n is a, c, g, or t
  misc_feature (746)..(799): n is a, c, g, or t
  misc_feature (1196)..(1205): n is a, c, g, or t
gatgataatcactatagggcgaacggagctcaccgcggtggcggcgnnnnnnnnnnnnnnnnnnnnnnnnnnnnnnnnnnnnnatcaggccaaatcggccgagctcgaattcgtcgagagcgggctctgcgcggctgctggaccgacgggcgcacccaggtaggggggcggctgagccgcgcagtgcggaccctcgcggggaactgcgccgccgccaccatgtctcaggaaggtgtggagctggagaagagcgtccggcgcctccgggagaagtttcatgggaaggtatcctccaagaaggcgggggctctgatgaggaaattcggcagcgaccacacgggagtggggcgctccatcgtgtacggggtaaagcaaaaagatggccaagaactaagtaacgatctggatgcccaggatccaccagaagatatgaagcaggaccgggacattcaggcagtggcgacctccctcctgccactgacagaagccaacctacgcatgtttcaacgtgcccaggacgaccttatccctgctgtggaccggcagtttgcctgctcctcctgcgaccacgtctggtggcgccgcgtgccccagcggaaggaggtatcccggtgccggaaatgccggaagcgctacgagccagtgccagctgacaagatgtggggcctggctgagttccactgcccgaagtgtcggcacaacttccggtgagggcgctgacccccgacatccccctccagcacctnnnnnnnnnnnnnnnnnnnnnnnnnnnnnnnnnnnnnnnnnnnnnnnnnnnnnnccccatgcacgccaaggagcgagcggccaccaaggcgcaacacggggcagccgggccatcggcacagcgagcgagggtccgcggcaccaccaaccccgacgagcaccgcgaggaaccaaggagcacccgcgacagcggcaccgacacacgacgaggcgaccagccagcacgcggggcgaccacgcacacgggcacaagcccacggcgagtggtgcgagtgcgagcgcccagggcaggggccggccagaccacaaccacagcagaggaggggcgccggagcgcaaccatcggggggcgcacacaaggtggccgaggggcaacgacgacgcgggcggtggcgacgtcggcgatgcgcggtccaccggtgtggcggcgggggcgcgacacagcccagccnnnnnnnnnncgacaaggcggcgatcacacagccgggccggcgggccaacgacagaggggcaggcgacgccgtgcagcat

SEQ ID NO: 350653 - DNA, 797 bp, Homo Sapiens
ggctggtactggccccgaatcttaggatctgagacgggggtaaggcaagagagggtggaggaaattctgcaggagacaggcttcctccagggtctggagaacccagaggcagctcctcctgagtgctgggaaggactctgggcatcttcagcccttcttactctctgaggctcaagccagaaattcaggctgcttgcagagtgggtgacagagccacggagctggtgtccctgggaccctctgcccgtcttctctccactccccagcatggaggaaggtggtgattttgacaactactatggggcagacaaccagtctgagtgtgagtacacagactggaaatcctcgggggccctcatccctgccatctacatgttggtcttcctcctgggcaccacgggaaacggtctggtgctctggaccgtgtttcggagcagccgggagaagaggcgctcagctgatatcttcattgctagcctggcggtggctgacctgaccttcgtggtgacgctgcccctgtgggctacctacacgtaccgggactatgactggccctttgggaccttcttctgcaagctcagcagctacctcatcttcgtcaacatgtacgccagcgtcttctgcctcaccggcctcagcttcgaccgctacctggccatcgtgaggccagtggccaatgctcggctgaggctgcgggtcagcggggccgtggccacggcatgttctttgggtgctggccgccctcctggccatgcctgtcatggtgttacgcaccaccggggacttggagaacacca

SEQ ID NO: 350654 - DNA, 766 bp, Homo Sapiens
agttgatctgccctcatggggctgacagtcctaaaatcaagtgctaggacacagtggccattgagctgggagcattcttccctctaccgcttaagccactgatggctgcgagcttgaagagagggattctgagggagagcttggtccatctggtcaccaaggctgggcgggacagagcagtcaagaaccacggtgtggcttgagaaacagtcctgcttcctgagcctctttgctctgcctcttggggcaagctccttaacctgtctgtatttttatgcctctgtctcccattcagttcctccttgaatacctctttctacagagaggcacgggctcccctgaaggattgtcgaggccagggttcgggaagtacactgccatcggtcaggggacagctgcctcccaccttgcctgggtgatggtgaatgggactcatcttttcctgcccttgcttttgaggagatggttgaatttaagctaacaggaaagccaaaccagcaccctcctttgtgctctgagaggttggagacatctggtccaccccattgcccctgcccctggcaagccctgaagtcgggagaggtgaccacaggtctggaaaatcagccagtgccaacattgcttgccctgcaagtggcaactgagcccacatagcgcattcatagtttccctggaccacagccttggggaaggacggtgggaaacccgaggatgttgtggggttttcccagcttaacgggacaagttcccttgccacacccagttg

SEQ ID NO: 350655 - DNA, 1017 bp, Homo Sapiens
  misc_feature (994)..(994): n is a, c, g, or t
  misc_feature (997)..(997): n is a, c, g, or t
cagctgagagggaaatttagatacaattcaggaatatcatgcccaaaaatagtggtcccagcaaccaggacacagagggaagacctggatattgtcagtgattggtggagggggacatcttggaccctcctaggcctggtgtcacatctcccatctctcagaccccacagaggccaaggggccttggctctgacccaggttaaagagagccaccagcccccaggctcagggagctgaaaccacccatccgcagaaatctaagggcaaggagaaatagaaattgtctgttccttcccttcaaagtgtaaggcctcttccaggagcaactggagccaccacagcttctcagtgacattgggagggcttcgggcccaggaaaaacccaagccttttgtcctgagagccgagccacagcggatgcagtggcgtcagcatcccagagcggcagcttctctcctgcctgtcactggggactggttgctctccacccatccaggaggaaggggttaggtcccagtcttacactcttatagggtctcatggacataggcctatgcctgttctgatatctataattttttaaactcaaaaggaccaaaacactcctgaaccctcatctatacggcctgcactgggcttggtgtttcctcctggcccaggcagctccatctcttctgccattcctcctggacgaaagtggcaggaccccacctctaccacttccccacagggtcactgcacagcggcttcaaagacacgccctgttgaaggggaaacatcctccccccatcacactccaactcgtcaccccaaaagggaagtcaaagcacaggtccgtggggcctatggtttgtagacactgacacagtggttttcaaaccaggtgctgcggaacccctgatattccacagagctttgtcaggggatgctaaagtggggaagatgggagtggaggcaaaggataggtttccagccctcctcccattttcgccgncancagaataactctggctttta

SEQ ID NO: 350656 - DNA, 2580 bp, Homo Sapiens
  misc_feature (2031)..(2108): n is a, c, g, or t
ggcacgagggaaatggaggaaaaagaaaaacgaaaaactgaagcagacaacgtcagcgctggagaagaagatggccggcaggcaaggccgagaggagctcatcaagaaggggctgctggagatgatggagcaggatgctgaaagcaaaacttgcaaccccgatggaggaccccgatctgtacagagtgaaccacccactcccaagtcggagacgctgacttcagaagatgcccagcccggaagccccttggccactgggacggaccaggtctccctggacaagccactgtcctcagctgcccacttggacgatgcagccaagatgccttctgcatccagtggtgaagaagcagacgctggcagcctcctgcccaccaccaatgagctctcccaagccttagctggggctgactccctggacagtcctcccagacctctggagagatccgtgggccagctccccagccccccactgctgcccactccgccacccaaggcaagctccaaaaccacaaaaaatgtcacaggccaagccacactcttccaagcctccagcatgaagagtgccgacccttccctccggggccagctctccacacccacggggtctccgcatctcaccacggtccaccggcctcttcccccaagccgcgtcattgaggagctgcacagggcgctggccacgaagcaccgccaggacagttttcaaggaagagaaagtaaagggtctccaaagaagcggctggatgtccgtctgtcgagaacgtccagcgtggagcggggcaaggagagggaggaggcttggagctttgacggggcattggagaacaagcgaactgccgctaaggaatctgaggagaacaaggagaacctgatcataaattctgaactcaaagacgacttgcttttgtatcaggacgaggaggcgctgaacgactccattatttctggaacactgccacggaaatgcaagaaggagctcctggccgtgaagctaaggaaccggccaagcaaacaggaactagaagaccggaacattttccccagaaggactgatgaagaaagacaggagatccggcagcagatcgagatgaagctttccaaacggctgagccaaagacctgccgtggaagagctggagagaagaaatatcttgaaacaaaggaatgatcagacagagcaggaagaaagaagagaaatcaagcaaagattgacaagaaagcttaatcagagacccactgttgatgaattaagagacagaaaaattctgatacgattcagtgattacgtggaagtagcaaaagcgcaggactatgacaggagggcagacaaaccctggacgagactgtcagcagcagataaggcagcaattcgtaaagaattaaatgagtacaaaagtaatgaaatggaggtacatgcatcaagcaagcacttgacaagattccacaggccatagagattttcttctgagaagaatttgtgtttaattttttgataccaacactgaacattcatcagggaactttcctgaagttcagctcaagactaccctacctgctgtgtttgtgagaagagtaggatcacacacacaggtgcaatcttgaccacacttacctgcaagaggagtaaccagaggacacacttccttccttctttggtgtctgaggagtgtgaactgttggggtcagttaagacccaacataactctatcagaagaaaactgttgtttgcctttcaaccttgttttacagttctgcagtgtaatggaggacgggcaacgtgcatgtgcaggctcaccactcccaggcctctgacatgagggacatgtgacagtgtcattcagtattatgttcaaaagacatttttatcctgatcataattaatttgaaaactctttaagttcatgttatacaagatgatttactgtattatacttttccttttttatataatgtctaacaaaaaatacagctgcaacattttgattcctgttaattttgttctttaattaaatgactacttattgcaggnnnnnnnnnnnnnnnnnnnnnnnnnnnnnnnnnnnnnnnnnnnnnnnnnnnnnnnnnnnnnnnnnnnnnnnnnnnnnngggggggcggcgccacaaaaaatacacacgcagagggggcagaacgagcaaaataccgcacctagatactatattacagaagaggggacccagcaaacagagagggtaataataaaaaacagcagaagcagggacgcgcgtttaacaaaacccagcatggggcaggacaacacaacacagcaagagaaacacatctgcgagaagaacaaccccccctcaggtatggggggggacagacaacaatcgaggaggagaacgacacccacaatacagcaagcagaggaatgaagccgaccgccggccgaagggaacacacaaaatcaataggcagcgaacgagctaggaagggagacaaaaaccaacgcgccaccatcagcgcggccgagcagaagaaagactgcaggcaaccgagaggagagaaacgaacgagcgcaaacatatctacagcaggcggaaagaacaaacaaggggg

SEQ ID NO: 350657 - DNA, 822 bp, Homo Sapiens
gctggcctggaagagattcccagtttttattcagcgctcgagctgggctgcatgcttgctgacaagaggcgggaggcccttagacgtctttagacactccccctgtgctgggctgggcacaggcggctctactcagcagttcagcaggcagaaagccggaaggagagatcagtgctcccaaggctggtgtctcccgtgctgacaacggaggcagtgctgggaagcatgaatctcccagcatctctggatccagaagcctgaaaacaggtggtgctacccacccctccctaagccaatgggcaggaaaaagaatttcctgaacagatctcctcgctgcttaaacacactgctccggtgaacagtccagaccaggcaaagtttgggcgacagatcagaaaaatgaagacctgcacatgtggagctggagcaaggactagtctagtattagctctgtgacgggagagctttgactgtcacctggaagtctgacttgattttgccagcaagaggcaacaaccaaaggtttcactttctcttcctcccaattttgggaggcgatcttattaggggttttgccagccacctctcatccttgcagaccccaggtggaattttgcaggcagccactatggtgcaaaatgtaattttagtgtttttccgcagacggctgaagccaaagacctgccgtggaagagctggagagaagaaatatcttgaaacaaaggactgatcagacagagcaggaagaaagaagagaaatcaagcaaagattgacagaaagcttaatcagagacccactgttgatgacttagagcacgaaac

SEQ ID NO: 350658 - DNA, 2055 bp, Homo Sapiens
agggcacccagcccacctgccacgatttcaaccagttcactgctgccaccgagaccatctcgctgctggtgggcttctcagcgggtcaagtgcagtacctggatctcatcaaaaaggacaccagcaagctgttcaatgaggagcggttgatcgacaagaccaaggtgacatatctgaagtggctgcctgagtcggagagcctgttcctggcatcacacgccagtgccacctgtacctgtacaacgtcagccacccctgcgcctcggccccgccccagtacagcctgctgaagcagggcgagggcttctctgtctatgctgccaagagcaaggcaccccgcaacccgctggccaagtgggcggtgggtgaggggcccctcaacgagttcgccttctcgcccgatggccggcacctggcctgtgtgagccaggatggctgcctgcgcgtcttccacttcgactccatgctcctgcgtgggctcatgaagagctactttgggggcctgctgtgtgtgtgctggagccctgacggccgctacgtggtgacgggtggcgaagatgacctggtcaccgtgtggtccttcaccgagggccgcgtggtggctcgaggccatggccacaagtcctgggtcaacgctgtggcctttgacccctacaccacaagggcagaggaggcggcgacagcagccggtgctgatggggagcggagcggcgaagaggaggaggaggagcccgaggctgcgggcacaggctcggccgggggcgccccgctctctccactgcccaaggctggctccattacttaccgctttggctcggcgggccaggacacgcagttctgcctgtgggacctcactgaagacgtgctctacccgcacccgcccctggcccgcacccgcaccctccctggcacacctggcaccacgccaccggccgccagcagctcgaggggtggcgagcctggcccaggccccctgcctcgctcgctgtcccgctccaacagtctcccgcacccagctggcgggggcaaggcgggcggcccgggtgtggcggcagagcctggcacaccattcagcattggccgcttcgccacgctcacactgcaggagcggcgggaccggggggcagagaaggagcacaagcgctaccacagcctgggcaacatcagccggggtggcagtggcggcagtggcagtggtggggagaagcccagcggccctgttccccgcagccgcctggaccccgccaaggtgctgggcactgcgctgtgcccgcgcatccacgaggtgcccctgctggagccccttgtgtgcaagaagatcgcccaggagcggctcacagtcctcctgttcctggaggactgcatcatcactgcctgccaggagggcctcatctgcacctgggcccggccgggcaaggcgttcacagacgaggagaccgaggcccagacaggggaaggaagttggcccaggtcacccagcaagtcagtggtagagggcatctcctcccaaccaggcaactccccgagtggcacagtggtgtgaagccatggatatcgggcccccccaaccccatgcccccagcctcctagccataaccctccctgctgacctcacagatcaacgtattaacaagactaaccatgatggatggactgctccagtccccccacctgcacaaaatttgggggccccccagactggcccggacacgggcgatgtaatagcccttgtggcctcagccttgtcccccacccactgccaagtacaatgacctcttcctctgaaacatcagtgttaccctcatccctgtccccagcatgtgactggtcactcctggggagacactccccgcccctgccacaagagccccaggtctgcagtgtgcccctcagttgagtgggcagggccgggggtggtccagccctcgcccggcccccaccccagctgcccttgctattgtctgtgcttttgaagagtgttaaattatggaagcccctcaggttcctccctgtcccgcagacctcttattttatactaaagttccctgttttctc

SEQ ID NO: 350659 - DNA, 1336 bp, Homo Sapiens
ccggcttctcatcggatcagatcgagcagctccatcggagatttaagcagctgagtggagatcagcctaccattcgcaaggagaacttcaacaatgtcccggacctggagctcaaccccatccgatccaaaattgttcgtgccttcttcgacaacaggaacctgcgcaagggacccagtggcctggctgatgagatcaatttcgaggacttcctgaccatcatgtcctacttccggcccatcgacaccaccatggacgaggaacaggtggagctgtcccggaaggagaagctgagatgtgcgtgccactgagtccccttgctcacacctggcctggggtgcagcctcccctaagacctcagaacgcaaggcgcctctgcagcaggaggctgggtgtgcattggcttgggggcttggagggcttggggccaccagccctcgtccctgtgaggctggcattgctgtctcccgttcccggcaccttcatcctaaacattcctcagcagcttgtggcttcctgggactagaagggggttgtgcggtggatgtgaaacaaggcccttgatgcaaagacctgggtcccagtgtggcccgtctcaccagccatgtgaccttgaaccttgacccagaacgtgggtatgccgatcatgcgtggttctgagggctgggtaagatcacacagtcagcctttggcacacaggaagcgctccctaaagtcagtttcctcctctccctcctccatgggctgtgctattgctgggttcctgagaccagccccactatgttctggctcccgagtgggttcagttgtggtcccagctggccagccgcacaggtcccaggcagtgccccgagtcacatctccttttcctgtggcctttcccatgactcctgacatccctctgtgtcccgccccaggtcagcctcctcatcaagaaaatgtaaacatgggacttcgctatatttagcactggaatgtgtatgcggggctggtgggaacagcccgggtggcgggggtggatccctggtgtgagcctggcttcctgtctgctccaaggggcgtggaacaggacggactcaggtccaaatccctggtttcctgtcccttagtggtgtggccgtgggcaaacgccttaacttccgtgagctttgacagtctgtctgggaggcagggctcaggcatccctggcctcttggggtgggtgagagggagacagacgttgtgaagcgcttggacacctggggcatctggtcagtgttcaggtaaatgccagctgggctcaagtggtgcactcctgttaatcccagcactttaggaggcttgaagtgggaggatc

SEQ ID NO: 350660 - DNA, 2365 bp, Homo Sapiens
  misc_feature (2293)..(2293): n is a, c, g, or t
  misc_feature (2335)..(2335): n is a, c, g, or t
taggctaggtagaggccgggtggtaatcggcccgaggctggtgtgtggcctcccaagataggcttctgagggcaagtcagcgactgaagacgggagcgccagaatctgtggactcaagagtctagaatcaagtggaaaaaccggaaaaaaggccaggaacctgaatacgacctaatagctgtttccgagggggcaacttccacggagaaccttctgccctggtaacggccaaagaggaggagatggcgccagtcagggagcggccgtggcccagacagtgaggaagcgcgaaggcggagcaaccgaggaatcctccggagaagaatcagagccgtcgctaccgccactaccgccaccaccatggaaggagcaaagccgacattgcagctcgtgtaccaggcagtgcaggcgctttaccacgacccagatcccagcggaaaggagcgcgcctctttttggcttggggagctgcagcgttcggttcatgcatgggagatctcagaccagttgttacagatccggcaggatgtggagtcatgctattttgctgcacagaccatgaaaatgaagattcagacctcattttatgagctccccacagactctcatgcctctttacgggactcattgctaacccatatccagaacttgaaagacttgtcacctgttattgtaacgcagctggctttagcaatagcagatcttgccctacagatgccttcctggaagggatgtgtgcaaaacactggtggaaaaatacagcaatgatgtgacttctttgccttttttgctggagatccttacagtgttacctgaaagaagtacatagtcgttcctttacgaattggagctaatcgggcgcacagaaattatagaagatttggccttctactctagtacagtaggtatctctattgatgacctgtgtagaaaaagcaggaacagatgagaaaatgcttatgaaggtttttcgctgtttgggaagttggtttaacttgggagttttggacagtaacttcatggctaacaataaattactagcactccctttttgaggtttttgcaacaggataagaccctcgtctaacctacatgaagctgcttcggactgtgtatgctcagctctctatgccattgagaatgtggagactaacttgccattagccatgcaactttttcagggagtgctgacattggagactgcctatcatatggccgtggcacgtgaagatttagacaaagttctgaattactgccgtattttcactgaactatgtgaaacttttcttgaaaaaattgtttgtactccaggccaaagtcttggggaccttcgaactctggagctgctgcttatctgtgcaggccatcctcaatatgaggtagtagaaatttcatttaacttttggtaccgactgggggaacatttgtacaaaactaacgatgaagttattcatggcatcttcaaagcttacattcagaggctgcttcacgccttggctcgacactgccagctggaaccagaccatgagggggttcctgaggagactgatgactttggggagtttcgcatgagggtatcagacctggtaaaggacttgattttcttgatagggtctatggagtgttttgctcagttatattctactctgaaagaaggcaacccaccctgggaggtgacagaagcggttctctttatcatggctgctatagcaaagagtgttgatccggaaaacaatccaacacttgtggaagtcctagaaggagttgtccgcctcccggagaccgtacatacggctgtgcgatacaccagcattgaattggttggagagatgagtgaagtcgttgatcgaaatcctcagttccttgaccctgtgttgggctatttgatgaaaggcctgtgtgaaaagcccctggcttctgctgcagccaaagccattcataacatttgctctgtctgccgagatcacatggctcagcactttaatggactcctggagattgcccgctccctcgattccttcctgttgtctccagaagctgctgtgggcttgctaaaagggacagcacttgtcctagcccgattacctttggataagattaccgaatgtcttagtgaactatgttctgttcaggttatggcattgaaaaagctgttgtctcaagagcccagcaatggcatatcctcagatcccacagtgttcttagatcgccttgcagtgatatttaggcataccaatcccattgtggaaaatggacagactcatccgtgtcagaaagtcatacaggaaatatngccagtttttatccgaggactctaaaataagcaccgagctgnataatcggattgtagagcgttgtttgcagg

SEQ ID NO: 350661 - DNA, 1691 bp, Homo Sapiens
  misc_feature (32)..(32): n is a, c, g, or t
  misc_feature (109)..(109): n is a, c, g, or t
  misc_feature (115)..(115): n is a, c, g, or t
  misc_feature (1162)..(1172): n is a, c, g, or t
gccggccctaagaagtgatgggaaactgatanaatcagatgtggaaggtgctctactaccattaatttacatgcaccagtctcacttacttcagcttcaaagaggtaancaaagnaggcattttctctatctgagtgaaacatggagacgcagagttcctgtgattgcacgaggtcagctgttcaagcggagaaccagaaccaggctctggctctacaccccatgttccttcagcaggcctgtggccagctgtgacaagtatagcctggccacctggctgaggctcacagagcccacagccagcatggtatgggaaatcctggattggggctggttgtggtccagctgtgatccagctttctccacttctagacagggctagtgccaggcaatgaagccaatgactacagatgtcactcacagctggaaaatgggcctcctttggcaaaggaatctggaagcactctctagctgctctgctcaggctggggccctgctagcctccttttagataaagtggggagactagattcacaccaaacagtggaaatgagggaatgcagcttccagacgatcatcacttggttaagtttgcacagaaagtgtaaccagttccagtgagaacaaacctaaagctgtccgtcttttaaagccaccctgagtggtaaagataaggtacatatcttaacctatataaaggtgaagtattatttttcaactgtacaagacacattactagggttacagttcagtggcatgcaccttatgttggactgcatttaaactacaactgtgtagtgtgacatctccattacatggcaccaaacatttgtcaattgcacaactattacttggtgagatctggttttaactacaatactttaaaagccaatttctatttaaatgtgttatgaaaaaatgcaatagcttaactttatacacattttacatttatggcagagtaagtacggtaatttctgcacccgaatgggtagtgttgcctttgaagtagtcaccttgggaagatgtatgtttattccagtgaagctgaccttacacagaacattcctagaaccctctttagaaactgtcaacttgtaagggtcttcagtgttggtaaatctttgtcctttaagggtagatctattttttgaggaatgannnnnnnnnnnaacagctaaagagcattagaaaataagtctgctaaataaaatgggtgaagcagctcaggatgatcttggtgggcaggaggaggggttggataaaacacaaggtctgactataaagttgtgaggcctcttgccttgcatggcttcaaaggtaatcccaaaggggaaccctaagtgttcttggcacatgcaacatcaagaaaataactccaattatgctaactcttgagtgcatatgttctagtgtatttggttaaaaaggtggctttgttcattttcagtcatatttcgtataagcagaaatgggaaaactccatctctgtggatttctcccaagggaaagatctcatctactgcttagagaattaaaatgaaaagcacttggtgtcatgtctacattagccccccccgcaaaatgtgcaatgggtaattcctgatacctgagtcttccccgtttggaaaagtgggtaaggacaggtgtctggatcctagataaaagtagagtttcaaggggattggagt

SEQ ID NO: 350662 - DNA, 1544 bp, Homo Sapiens
  misc_feature (58)..(94): n is a, c, g, or t
  misc_feature (1261)..(1326): n is a, c, g, or t
cgaaaaatgtatacgactcactatagggcgaactcggagcttaatcgcggggcggcgnnnnnnnnnnnnnnnnnnnnnnnnnnnnnnnnnnnnnatcaggccaaatcggccgagctcgaattcgtcgagagcgggtcgctgagccgcgccagctgagccaggtttgcagtaagcattggctactggcatgacccttacatacagcactttgtgagactgtctaaagagaggaaagcccctgaaatcaacagaggatattttgctcgagtccatggtgtcagtcagcttataaaggcatttctacggaagacagaatgtcattgtcaaattgtcaaccttggggcaggcatggataccaccttctggagattaaaggatgaagatcttctcccaagtaaatattttgaggttgactttccaatgattgtcacgagaaagctgcacagtatcaaatgcaagcctcccctatccagccccattctagaactgcattcagaggacacacttcagatggatggacacatactggattcaaagagatatgccgttattggagcagatctccgagacctgtctgaactggaagagaagctaaagaaatgtaacatgaatacacaattgccaacactcctgatagctgaatgtgtgctggtttacatgactccagagcagtccgcaaacctcctgaagtgggcagccaacagttttgagagagccatgttcataaactacgaacaggtgaacatgggtgatcggtttgggcagatcatgattgaaaacctgcggagacgccagtgtgacctggcgggagtggagacctgcaagtcattagagtcacagaaagaacggctcctgtcgaatgggtgggaaacagcatcggccgtcgacatgatggagttgtacaacaggttacctcgagctgaagtgagcaggatagaatcacttgaattcctggatgaaatggagctgctggagcagctcatgcggcattactgcctttgctgggcaaccaaaggaggaaatgagcttgggctgaaggagataacttattaatctgtcgaaggcttatgccgagccagaagccgaagccacttgccctcctggaggagacctgcaagctccctgagcggtgggcgggcctcgtccgcaggtctcatcccacactcttgagaagccttggtcactacagtggtcgcacatgttcctcttcctgttcctgttgacatgtcgttgtttaaataaatctcacttgccaccagtnnnnnnnnnnnnnnnnnnnnnnnnnnnnnnnnnnnnnnnnnnnnnnnnnnnnnnnnnnnnnnnnnngaaaagagaggcgggggcggccgagcgcgcgaacaagaaggactcctcccgacgagggagcgggcagcaagactagcgagcgcgacgccacgccgagttgtttatgaagataaaagagggcgccgccccaatatagaggaggaggcgtgataattataacaagggagcggacggcgggccgccagtttatataacaacgagcaggagagagaggcggg

SEQ ID NO: 350663 - DNA, 1094 bp, Homo Sapiens
  misc_feature (785)..(785): n is a, c, g, or t
agcgggggggcggcgtcactgagccgcgccagctgagccaggtagggccctaccctcttctgttgctttctccctgtggctcgcgccgtcccccgccgcccgtcgaccccgcttccatgtccctggcggacacagctcccaggaacctccacgcccatggccactaggcagagggaatcctctatcacctcctgctgttccacctcgagctgcgacgcagacgacgagggcgtgcgcggcacctgcgaagatgcttccctgtgcaagaggtttgcagtaagcattggctactggcatgacccttacatacagcactttgtgagactgtctaaagagaggaaagcccctgaaatcaacagaggatattttgctcgagtccatggtgtcagtcagcttataaaggcatttctacggaagacagaatgtcattgtcaaattgtcaaccttggggcaggcatggataccaccttctggagattaaaggatgaagatcttctcccaagtaaatattttgaggttgactttccaatgattgtcacgagaaagctgcacagtatcaaatgcaagcctcccctatccagccccattctagaactgcattcagaggacacacttcagatggatggacacatactggattcaaagagatatgccgttattggagcagatctccgagacctgtctgaactggaagagaagctaaagaaatgtaacatgaatacacaattgccaacactcctgatagctgaatgtgtgctggtttacatgactccagagcagtccgncaaaccccctgaagtgggcagccaacagtttggaggagagccatgtccataaactacgaacaggttgaacatggggtgatcgggtttggggcgatcatggatggaaaaaccggccggagacgccagtgtggacctggcggggaatgggaagacctgccaaggcattaggagtcccaagaaaaggaacgggctcctggccaaatggggtggggaaaacaggaatcgggccgtccggaaatggaggggaggtttggtacaacccggggtttaccctccaaagcctggaaggtggagcccggggaaaagaaa

SEQ ID NO: 350664 - DNA, 1174 bp, Homo Sapiens
  misc_feature (938)..(977): n is a, c, g, or t
accaaacctcttcgaggcacaaggcacaacaggctgctctgggattctcttcagccaatcttcattgctcaagtgtctgaagcagccatggcagaagtacctgagctcgccagtgaaatgatggcttattacagtggcaatgaggatgacttgttctttgaagctgatggccctaaacagatgaagtgctccttccaggacctggacctctgccctctggatggcggcatccagctacgaatctccgaccaccactacagcaagggcttcaggcaggccgcgtcagttgttgtggccatggacaagctgaggaagatgctggttccctgcccacagaccttccaggagaatgacctgagcaccttctttcccttcatctttgaagaagaacctatcttcttcgacacatgggataacgaggcttatgtgcacgatgcacctgtacgatcactgaactgcacgctccgggactcacagcaaaaaagcttggtgatgtctggtccatatgaactgaaagctctccacctccagggacaggatatggagcaacaagtggtgttctccatgtcctttgtacaaggagaagaaagtaatgacaaaatacctgtggccttgggcctcaaggaaaagaatctgtacctgtcctgcgtgttgaaagatgataagcccactctacagctggagagtgtagatcccaaaaattacccaaagaagaagatggaaaagcgatttgtcttccacaaaatagaaatcaataacaagcttggaatttgagtctgcccagcatccccaactggtaacttttgccaccccttccagcccaaaaacaatgccccgctcttccctggaaaggcgcaccaaatgttgcgccccgccaattcacctcgactttcctctacggccattctgaggcaccttcctcctatgacccgtctttnnnnnnnnnnnnnnnnnnnnnnnnnnnnnnnnnnnnnnnntttcccgttcgcgctttcgcccataacagcccacgacgctctcgctcttatatcatactcaccacccaaaccattttattattgtgctagaactcaagaacctaactcacggctaacccctcacgcatgtctcgctctctcgacgtcacctctggactttgctcctctttgcgctcatactccctctctcctcatcg

SEQ ID NO: 350665 - DNA, 1987 bp, Homo Sapiens
  misc_feature (1779)..(1792): n is a, c, g, or t
  misc_feature (1838)..(1839): n is a, c, g, or t
  misc_feature (1848)..(1848): n is a, c, g, or t
agcgggagttctacgagggaggggaagcggttggacgtgttcgcttgggttcctgctgcggcagccacctcgcaatctctctgcatcgatcgccgctcgcaagctactgaccgtactcgggcgtattaggagccgcgttccagcctcacaccccacggtgctgttttcgacttcagaaaggatctagtctcagcacagaagcgcctcaggcgcggcgcaaagctcgagcggacggcgggggcggccggagcctctctcgggggagccgcgcctgaggaggcggaagaacccccctgacgcgactggcgtgtgcttctgcccgccaccgcccctcccgctctcacccgggccgtccctggccactgcccctgccgcggaggcagcggcggcagcggctctcctttccacagccggcgctccgcgacccgcttggctcctgagcccgtcgggtaggctctcctcgagttcccgctcttcaccccttccctcaccctcttctttcgtcacccgtccccgaccccacccgagcccggcgcctcagctgcccccggccatggcgtgcggagccactctgaaaaggactctggatttcgacccgctgttgagcccggcgtccccgaagcgcaggcgatgtgcgccattgtcggcgcccacctcggccgctgcctccccgttgtcggcggccgcggccaccgccgcctccttctccgctgcggccgcctcgccgcagaagtatctccgaatggagccatccccctttcggcgacgtctcctcccgcctcaccacagaacaaattctgtacgacataacacaaaagtatctccgaatggaagccatcccccttcggcgacgtctcctcccgcctcaccacagaacaaattctgtacaacataaaacaagagtataaacgaatgcagaagagaagacatttagaaacgagtttccaacagacagatccgtgttgtacttctgatgcacagccacatgcatttctcctcagtggaccagcttcaccagggacttcatctgcagcatcctcaccattaaaaaaagaacagcccttatttactctacggcaggttgggatgatctgtgaacgtttgttgaaagaacgtgaagagaaagttcgagaagaatatgaagaaatattgaacacaaaacttgcagaacaatatgatgcgtttgtgaagtttacgcatgatcaaataatgcgacgatatggagaacagcctgctagctatgtttcatgaatcacgtatcctgcatttgtgggctgccttgttccttgttgagttgttgcaagaggtcccaattatgacatgcagcaatgccaataccccttctgtgaatacaggttatttcaagctttcgtcagtggcaaccactcttaggcagcagcaactggttttggaaatttccctgatgtcagtaccacctggatgtggacctttgctacctgtattaataccagtggcctcattttgctgtatcattacaatttggcttcttatattaatgtttgaaaaggattaaagctggtattctagaacatgcccttcactggttgtgtaaataaaactgtagaatgacacttcagatgaagttagtgtgattttaattgggcactacaaccgagctgtaaccagttactaattttagaatgtaatcccaggacaatattaagcaaatagcctgcagtgcttcctgtgaaatagtgaaggaggagggcatttccgtattccaggacttcttggggtttcagaatgggtttgtatgannnnnnnnnnnnnngtagttttatttattctatcagtctttttaacaaatgtttattgcnncattttttntttttccagtgtatcattgttttactgcccttgtagtactggaatttagttggaagaataaaacatttacttctattttgcttgtttcttaatgtccagatggggttagtatttgaataaagttggtgttttaaaacgt

SEQ ID NO: 350666 - DNA, 2479 bp, Homo Sapiens
  misc_feature (1366)..(1366): n is a, c, g, or t
  misc_feature (1422)..(1422): n is a, c, g, or t
  misc_feature (1965)..(2187): n is a, c, g, or t
  misc_feature (2357)..(2357): n is a, c, g, or t
aaacttacgctaggtacgaggctgggtggtgaattcggcacgaggcctcgtgccgaattcggcacgagggtctccctacctcgtccctgacacccaggccctctgccaccatctccctgtcatccgccaactggccaccagtggccgcttcattgtcatcatcccaaggacagtgatcgatggcctggatttgctgaagaaggaacacccaggggcccgggatgggattcggtacctggaggcagagtttaaaaaaggaaacaggtacattcgctgccagaaagaggtgggaaagagctttgagcggcataagctgaagaggcaggatgcagatgcctggactctctataagatcctagacagctgcaaacagctgactctggcccagggggcaggtgaggaggatccgagtggcatggtgaccatcatcacaggccttccactggacaaccccagcgtgctttcaggccccatgcaggcagccctgcaggccgctgcccacgccagtgtggacatcaagaatgttctggacttctacaagcagtggaaggaaattggttgatactgacccccaggccctgcagtggggctgactccagatctctcctgccctccctggcagccaggaccagcacctgtagtcaccccaccacacgcagactcatgcacgcacacaggagggaggcctagctgctcagaggctgcagggagggcccaggagccggctgggagggtggggtccctttgttgccaagacgttaggaaagcgaggaaagtgcttggattaggagagtcttgtgggcccctggccagccttcctgcctcagctcccctgctgtctccaggggcaggtggtaggcatgggtacctgcatttcactggagtgggttcttggatctctgaggggaaggaacagcaaaagaggcccttcttcctcacccaagatgcagggtggttggggccaggagtttggaccctctaggtcttgggggaagagctgggtaatacctggtgtctgagtgattctctgcagacccttcccctcctcaaggatcacccatcctcctttcagccccctttatggggaccaggcagctctggagccagccacaggggctgttagagaagcaaggcctggagtggcctgcaccgagtagcagggtcagggttcgtgtgctcctcctcctgctgcaggggctgcacatcccattgccccacttctgctttgtgtctccctctgtctagcttccagggcagggagcaggccccacctagggctgcaggcagtctggcctgtgccagcacggtctcctgtgcccaccagccccacaggtgctgtgctttgtgctcttggctgctgtgctgngacagaatgggatgccaggaagagaagaagggggtgcagtctgaggccaccacccnccttcctatctaagggagggctgaagacaaggggccggcattcagtgggcagcagaaaggagaggctccttgaagctgctcagtcagaggcccccgtccctccttttgccttccgcaggactgaagacctgaaggggctggcttttggagtgttgaggtgaatatctgggagcagagatcatgaatagctcagggcagtgaatggcgcaccaagagcagggctgtgtgtgggaggctgcagccaggattgcctcagctcctccccctcaggctgggaggatagcacaggctaggggctcggggtggagggtctcagctctgctgcccccaccccagtactagcctagcttcccaagctgtggcttagaggatagttggcttcctgcctctctcctctaaaatagcaagtctgggaaatcctggggtgagtggagtcaccccactcccagttgctggcagagactgagactaaagcatcacttaataaaccccccaagcccaaacaacgcgaccttatacatccctcactcgcgcccgttcgcnnnnnnnnnnnnnnnnnnnnnnnnnnnnnnnnnnnnnnnnnnnnnnnnnnnnnnnnnnnnnnnnnnnnnnnnnnnnnnnnnnnnnnnnnnnnnnnnnnnnnnnnnnnnnnnnnnnnnnnnnnnnnnnnnnnnnnnnnnnnnnnnnnnnnnnnnnnnnnnnnnnnnnnnnnnnnnnnnnnnnnnnnnnnnnnnnnnnnnnnnnnnnnnnnnnnnnnnnnnnnnntcctcccctagcgctacgcgaacgtccttgcttccgccgcgcccgcccgccgttcgcgtgcccgcctcttcctggcccgttcccatgttcgcgccctcggccgtcagctatgcctccctcgacccgcgtaacgtcctcccgccccgtcgggtccgccgtatactcgcctnacctcgcgcccctcccgccccacgagattgcgctgccagctcccgcaccctgcgatattgcgcagctcccgcgcacgccctgatctccgctacatgccccctctgctccccgttctcctccg

SEQ ID NO: 350667 - DNA, 1459 bp, Homo Sapiens
  misc_feature (1301)..(1363): n is a, c, g, or t
  misc_feature (1430)..(1431): n is a, c, g, or t
gtccggaattcccgggatgggaagagtgtgcagacggaacttcagccgctgcctctgttctcagcgtcagtgccgccactgcccccgccagagcccaccggccagcatgtcctctgctcacttcaaccgaggccctgcctacgggctgtcagccgaggttaagaacaagctggcccagaagtatgaccaccagcgggagcaggagctgagagagtggatcgagggggtgacaggccgtcgcatcggcaacaacttcatggacggcctcaaagatggcatcattctttgcgaattcatcaataagctgcagccaggctccgtgaagaagatcaatgagtcaacccaaaattggcaccagctggagaacatcggcaacttcatcaaggccatcaccaagtatggggtgaagccccacgacatttttgaggccaacgacctgtttgagaacaccaaccatacacaggtgcagtccaccctcctggctttggccagcatggcgaagacgaaaggaaacaaggtgaacgtgggagtgaagtacgcagagaagcaggagcggaaattcgagccggggaagctaagagaagggcggaacatcattgggctgcagatgggcaccaacaagtttgccagccagcagggcatgacggcctatggcacccggcgccacctctacgaccccaagctgggcacagaccagcctctggaccaggcgaccatcagcctgcagatgggcaccaacaaaggagccagccaggctggcatgactgcgccagggaccaagcggcagatcttcgagccggggctgggcatggagcactgcgacacgctcaatgtcagcctgcagatgggcagcaacaagggcgcctcgcagcggggcatgacggtgtatgggctgccacgccaggtctacgaccccaagtactgtctgactcccgagtacccagagctgggtgagcccgcccacaaccaccacgcacacaactactacaattccgcctagggccacaaggccttccctgttttccccccaagggaggctgctgctgctcttggctggacccagccaggcccagccgaccccctctccctgcatggcatcctccagcccctgtagaactcaacctctacagggttagagtttggagagagcagactggcggggggcccattggggggaaggggaccctccgctctgtagtgctacagggtccaacatagagccgggtgtccccaacagcgcccaaaggacgcactgagcaacgctattccagctgtccccccgactccctcacaagtggtannnnnnnnnnnnnnnnnnnnnnnnnnnnnnnnnnnnnnnnnnnnnnnnnnnnnnnnnnnnnnncattcccgcagtgggagcaaactgcatgcccagagacccagcgaacacacgcggtttggtttgcagnnactggcatactatgtggatgtgacagtg

SEQ ID NO: 350668 - DNA, 725 bp, Homo Sapiens
  misc_feature (44)..(44): n is a, c, g, or t
gtggggcttctagtagctctctctgcacctctggttgacaaggnacccaagggccaggacctgaggggcagagagagctctagggaaccacaacccttattgtcctgggtggaccaatccaaaggctaagtgatagtgactcatcaatgttgggtcctgtggggtaccagtttaggttcctaagtaatagtgaccctttcacgtcctggagcccgagtggaccaatcggaagcctaagtgacgatgaccctcgcatgtcctaggtccctgggtggacccatcaggaccccaagtgatagtgacccagtggtcttttagatcctcagtagaacagtccagaagcctgagagacagtggccccttgataatctgggtctcacgggaccagctaggggtccaggtttcagtcagtaaataagagtggtccacgtcctaaagacacctctcctttacaaagacttgtgatgctctggggcttctgtggccaagccccaccctttcctggtcatggtacccgtacagcgttgatggccacagctcgaaggggggctttcgtgtccccctgtgcggtcagtgttttcagtaccacctctctcccgtgcccacttggctatttacttatttatttattgtgtgccagtgatggtgggtgggggctgggccttccccgccacctccacccctgttgtaccgtccttccgtacttaataaaggcgcgtgggagt

SEQ ID NO: 350669 - DNA, 1597 bp, Homo Sapiens
  misc_feature (1453)..(1453): n is a, c, g, or t
  misc_feature (1462)..(1463): n is a, c, g, or t
  misc_feature (1534)..(1534): n is a, c, g, or t
  misc_feature (1567)..(1567): n is a, c, g, or t
cctccctctccattctccttcctacgcgcccctaactttcctatgtagcgaggcctgggtggcgaattcggcacgagggccgtgcccgcggagagagcgcggcgcgggaggccggcggcggccggctgcatggcgcgctgcgagaggctgcgcggagggccctgcgcgacgtgctgggccgggcgcagggggtcctgttcgactgtgacggggtgctgtggaacggcgagcgcgccgtgccgggcgccccggagctgctggagcggctggcgcgggccggcaaggcggctctgtttgtgagcaacaacagccggcgcgcgcggcccgagctggccctgcgcttcgcgcgcctcggcttcggggggctgcgcgccgagcagctcttcagctccgcgctgtgcgccgcgcgcctgctgcgccagcgcctgcccgggcctccggacgcgccgggcgccgtgttcgtgctgggcggcgaggggctgcgcgccgagctgcgcgccgcggggctgcgcctggccggggacccgagcgcgggggacggcgcggccccgcgcgtgcgcgccgtgcttgtgggctacgacgagcacttctccttcgccaagctgagggaggcgtgcgcgcacctgcgcgaccccgagtgcctactcgtggccaccgaccgtgacccatggcacccgctgagcgacggcagccggacccctggcaccgggagcctggccgctgcagtggagacagcctcgggacgccaggccctggtggtgggcaagcccagcccctacatgttcgagtgcatcacggagaacttcagcatcgaccccgcacgcacgcttatggtgggtgaccgcctggagaccgacatcctctttggccaccgctgcggcatgaccactgtgctcacgctcacaggagtctcccgcctagaagaggcccaggcctacctagcggccggccagcacgacctcgtgccccattactatgtggagagcatcgcagacttgacagaggggttggaggactgagcccactgcacctgcagccacaggcccacccctccccactccctgatcccgtaggtggaggcgatgggtcacgagccatgttaagcacaaccggctccttggtccagttctgcaccggggtggggctgggacccggggaaggtttgagggcccttgcaaccccctcccagcagtggctgggcactctttgctgccccagaagctggtcccctatggattcatcttggcctgacccagccaggtggccttatttcttccctgtcacctcccctccttgaaatctgggccctggtgcctgctgaagattccctctatccctgagtacttagtcttctcccccttccctggggctgctagagctctctctgccctcaggtcctggccttgggtccttgtaaccagagtttaggggaccacacccttattggctgggntggaccatnncaaggctagaggatagtgacctttaatggttggtcccgggggtaccaggttaggttcttaagaaaagggcncctttaccgtctggagccgcgttggccattcgnagcctagtgagatgacctcgcattgccaag

SEQ ID NO: 350670 - DNA, 994 bp, Homo Sapiens
  misc_feature (723)..(723): n is a, c, g, or t
  misc_feature (808)..(808): n is a, c, g, or t
  misc_feature (862)..(862): n is a, c, g, or t
  misc_feature (870)..(870): n is a, c, g, or t
  misc_feature (893)..(893): n is a, c, g, or t
  misc_feature (905)..(905): n is a, c, g, or t
  misc_feature (910)..(910): n is a, c, g, or t
  misc_feature (937)..(937): n is a, c, g, or t
  misc_feature (942)..(942): n is a, c, g, or t
cccgcacgcacgcttatggtgggtgaccgcctggcgaccgacatcctctttggccaccgctgcggcatgaccactgtgctcacgctcacaggagtctcccgcctagaagaggcccaggcctacctagcggccggccagcacgacctcgtgccccattactatgtggagagcatcgcagacttgacagaggggttggaggactgagcccactgcacctgcagccacaggcccacccctccccactccctgatcccgtaggtggaggcgatgggtcacgagccatgttaagcacaaccggctccttggtccagttctgcaccggggtggggctgggacccggggaaggtttgagggcccttgcaaccccctcccagcagtggctgggcactctttgctgccccagaagctggtcccctatggattcatcttggcctgacccagccaggtggccttatttcttccctgtcacctcccctccttgaaatctgggccctggtgcctgctgaagattccctctatccctgagtacttagtcttctcccccttccctggggcttctagagctctctctgcccctcaggtcctggcacttgggtccctgtcaccaagagtctagggaaccacaacccttattgtgctgagaggaccaatccaaagcttagtgttagtgactcatcgatgttgggtcctgtggagtaacatgttgagctcctaagtaatagngagccttttcacgtgctggaggccgagtggcccattcggagacctaagcggatattgaacctcgcttgttcttagctcctggatngacccctacaggacccaaatgtatctaccccaatggttttttaatccttattgnaatactcnagaagccgagaagcacgggcccnctggatatttgnggctnaccgacacaccctgagggtccacgttnagggntatatatagagcgcacggacttagacacctctctataagacgatatgaggct

SEQ ID NO: 350671 - DNA, 1353 bp, Homo Sapiens
  misc_feature (6)..(6): n is a, c, g, or t
  misc_feature (14)..(14): n is a, c, g, or t
  misc_feature (17)..(17): n is a, c, g, or t
  misc_feature (21)..(21): n is a, c, g, or t
  misc_feature (23)..(23): n is a, c, g, or t
  misc_feature (29)..(29): n is a, c, g, or t
  misc_feature (37)..(37): n is a, c, g, or t
  misc_feature (45)..(45): n is a, c, g, or t
  misc_feature (58)..(58): n is a, c, g, or t
  misc_feature (63)..(63): n is a, c, g, or t
  misc_feature (67)..(67): n is a, c, g, or t
  misc_feature (79)..(79): n is a, c, g, or t
  misc_feature (87)..(87): n is a, c, g, or t
  misc_feature (95)..(95): n is a, c, g, or t
  misc_feature (111)..(111): n is a, c, g, or t
  misc_feature (116)..(116): n is a, c, g, or t
  misc_feature (1097)..(1098): n is a, c, g, or t
  misc_feature (1101)..(1102): n is a, c, g, or t
  misc_feature (1104)..(1104): n is a, c, g, or t
  misc_feature (1107)..(1107): n is a, c, g, or t
  misc_feature (1115)..(1116): n is a, c, g, or t
  misc_feature (1121)..(1121): n is a, c, g, or t
  misc_feature (1141)..(1149): n is a, c, g, or t
cccatnatatgtgnaanatcnanattganagagggtngagaatgnccactgaactggnacaanagcncaccctccccantccctganccgtagtngagccatggtcacgancaatntaagcacaaccgctccttggtccagttctgcaccggggtgggcctgggacccggggaaggtttgagggcccttgcaaccccctcccagcagtggctgggcactctttgctgccccagaagctggtcccctatggattcatcttggcctgacccagccaggtggccttatttcttccctgtcacctcccctccttgaaatctgggccctggtgcctgctgaagattccctctatccctgagtacttagtcttctcccccttccctggggcttctagagctctctctgcccctcaggtcctggcccttgggtccttgtcaaccagaggtctagggaaccacaacccttattgtcctgggtggaccaatccaaaggctaagtgatagtgactcatcaatgttgggtcctgtggggtaccagtttaggttcctaagtaatagtgaccctttcacgtcctggagcccgagtggaccaatcggaagcctaagtgacgatgaccctcgcatgtcctaggtccctgggtggacccatcaggaccccaagtgatagtgacccagtggtcttttagatcctcagtagaacagtccagaagcctgagagacagtggccccttgataatctgggtctcacgggaccagctaggggtccaggtttcagtcagtaaataagagtggtccacgtcctaaagacacctctcctttacaaagacttgtgatgctctggggcttctgtggccaagccccaccctttcctggtcatggtacccgtacagcgttgatggccacagctcgaaggggggctttcgtgtccccctgtgcggtcagtgttttcagtaccacctctctcccgtgcccacttggctatttacttatttatttattgtgtgccagtgatggtgggtgggggctgggccttccccgccacctccacccctgttgtgacctgtccttccgtacttaataaagtgcgcgtgggagtgttcnnccnncnccnaccccccnnccctnattgcaccctatccaacatnnnnnnnnntagtcatgactattttttcaccgtcccacccctgcaaacaaataacctctttgccggccgccttggcccccccgaaaagttttcttaaacctttcccttttgccggccggggccccaccaagggaaagggaaacttgggcccaaacttgttttcccatggggaaaccctcggcctaggacccaagggctgtgaatctccccccc

SEQ ID NO: 350672 - DNA, 650 bp, Homo Sapiens
cgggagagatgactcagctgccagtgatcaaagcagagcctctggaggtgaaccagttcctcaaagtgacaccggaggacctggtgcagatgcctccgacgccccccagcagccatggcagtgacagcgacggctcccagagtccccgctctctgcccccctccagccctgtcaggcccatggcgcgctcctccacggccatctccacctccccactcctcactgcccctcacaaattacaggggacatcagggccactgctcctgacagaggaggagaagcggaccctgattgctgagggctaccccatccccacaaaactccccctcaccaaagccgaggagaaggccttgaagagagtccggaggaaaatcaagaacaagatctcagcccaggagagccgtcgtaagaagaaggagtatgtggagtgtctagaaaagaaggtggagacatttacatctgagaacaatgaactgtggaagaaggtggagaccctggagaatgccaacaggaccctgctccagcagctgcagaaactccagactctggtcaccaacaagatctccagaccttacaagatggccgccacccagactgggacctgcctcatggtggcagccttgtgctttgttctggtgctgggctccctc

SEQ ID NO: 350673 - DNA, 754 bp, Homo Sapiens
  misc_feature (141)..(154): n is a, c, g, or t
aacactgaagaacaatgcatcacacgggaaaaaaacacttcacctaaaattgggtaatgtgctacaattactaattaagatctgagccttttacaagtagattttcttcacatacttaaaatagatcgaaactctgtctcnnnnnnnnnnnnnnagataatgaagactaaatgttgattctgtattaacaaatgaaggcagaggagagtaaatgactctagggcagacttgccaaaccctagcttggagggagtcccatattgccgttcatgcagaaagcagacactatcattagtctgaggactaaccctaaaggggccacacccattaaagctgaggagtgtccaaataccagggcaacaaaacgtcatggcaaatagtcttctccagatatgaaaacccaagactgtggtcttcacatctttaatcccccaaattcttaagttggtgttctgagtcaggactctatttcaaaatagggtctcacatccaaggaaatatgtccttctgtagagcagttcttacttgactatgcttcagggaaaagagcagcagcatctataaacatacatgtatgtgtgtgagagtgtgtgtaatttaaaaggggatccagagccccttcttgattataaattggaagtaacaataggccaaactgtctccttaaataaaaccactgatactaaaaaattaaaagattaaacgagccgaattcatgcagcccggaggatccactaggtctagatcggccaac

SEQ ID NO: 350674 - DNA, 922 bp, Homo Sapiens
  misc_feature (801)..(815): n is a, c, g, or t
cagaaattcctgtggcctttttacacaaaatgtaaagcaacaggcttgaatatacaccctaagcaccaattatgataaatgcatattggtaaaatgtgacttctggctttaaaagacattattgacctccctggggctaaagattgcacccatgtgagtaatacactgctaaagaataattcattttttaagatctatagaggttctccactaggcacaattcattgctgaagttggatcatgcaacagttttacaagagaagtaggaaaacatacgtatactgaatatagtgcatatcaccatgaagactttcagcatgtaagattaagacaggacagtgctttaaaacacttgcatggatttgggtttgcctattcaaatgaaagggaattcattgagatttatatggaaaaattccatgttggggttaatggcccaccactctgaactgagtccagtaagagcttgaggaatttggctttgttagtacagaccttctccttgcactcctcttctcagtattcaacaagctgtctttgtttaaaaatatgcaaaatgcactgatttttggagtggttcatgtgacttttactgctcattttgttaaaaattctgtcttaagttagaaggtattttttgctttcttttcaacatctgaagaacaatgcatcacacttggggaaaaaacatttcttcaccttataattggtaatgtgctaccattaccttttaattaagatctgagccttttacacagtagattttcttcacaaacttaaatagatcgaactctgtctccnnnnnnnnnnnnnnngataatgaagactaaatgttgattctgtattaacaaatggaggcagaggagagtaaatgactctagggcagacttgccaaacgctagcttggagggagacccccgct

SEQ ID NO: 350675 - DNA, 524 bp, Homo Sapiens
actcactcccacaggatgaaatggagatcggctacatccaagccccacacaaaacgctgcccgtggtcttcgactctccaaggaacagaggcctgaaggagtttcccatcaaacgagtgatgggtccagattttggctatgtaactcgagggccccaaacagggggtatcagtggactggactcctttgggaacctggaagtgagccccccagtcacagtcaggggcaaggaatacccgctgggcaggattctcttcggggacagctgttatcccagcaatgacagccggcagatgcaccaggccctgcaggacttcctcagtgcccagcaggtgcaggcccctgtgaagctctattctgactggctgtccgtgggccacgtggacgagttcctgagctttgtgccagcacccgacaggaagggcttccggctgctcctggccagccccaggtcctgctacaaactgttccaggagcagcagaatgagggccacggggaggccctgctgttcgaagggatcaag

SEQ ID NO: 350676 - DNA, 1496 bp, Homo Sapiens
agcgggctggaggagctcgaggctgaggctgccggggggctgtgggctaccgggccgccggcgcctcagcgatgttttactcagggctcctcactgagggcggccgcaaggagaccgacatgcgggaggcggcgtcactgcgacagcagcgccggatgaagcaggcggtgcagttcatccacaaggactccgccgacctgctgcccctggacggcctcaagaagctgggctcgtccaaggacatgcaacctcataatattctgcagaggcgcctcatggaaaccaacctgtctaagctccgaagcggtccccgtgtcccttgggcctctaagacgaacaaactcaatcaggctaagtctgaggggctaaagaagtctgaggaggatgacatgattttggtttcttgccagtgtgctggaaaggatgtgaaagccttggttgacacaggctgcctatataatctcatctctttggcctgtgtggacagattgggactcaaggagcatgtcaaatcccacaagcatgaaggagaaaagctttctctaccccggcatctcaaagtagtgggccagattgagcacctagtgatcacactgggctccctccgcctggactgcccagcagctgtggttgatgacaatgagaaaaacttgtcccttggtctacagactctccgatctctgaagtgcatcataaacttggataagcaccggctgatcatgcggaagacagacaaggaagaaatcccttttgtggagacagtctctttgaatgaagacaacacttcagaagcataactacagcctgcagcatgtctgcacgtgtgcatgcatacacaccgggttgacagattgagaaaactgggtttgaaccaaatgccgtagtgacttgctgtggaccaagtccttccatctaatagaagctccaggggctccttcccattcagacctctctagactatagtctatgcttagagatcttgtctggttatggccattgttttttactactttgatcacttaacttatagaccttttttgacactgccagtctcacttgtggcctatttctctgcttcttccaggaatttgcttttattagtcaagtataggggctgccaggttctgtgtctccatagatatatgtgcttcttttcctatagctaaatgtataataaacaggaacctgacctttacctcctttcagctgtttcaaacaggtgccaggatacctatgtcttagaattagagtttcttcaaattgattcattgatttctcaagtatggattatgtgaaagagcccagggacattatccattacagtttaactctttcatttaaaggtccagagaggcaagtgaattgtctaagttcatatattaggtcagtgactgaagggaccaagaacgcagacctgatttccaagccaagactcccatgctgcctcatttgtattcaagcctttaacaggagggcaaagaggtgagaatgtgtta

SEQ ID NO: 350677 - DNA, 1073 bp, Homo Sapiens
  misc_feature (120)..(120): n is a, c, g, or t
gagctagggcatggggaggtgaacatcacagggagtggaagagaacaccctgattgccagcctttgtgatctcctggaaaggatctggagtcatggactacaagtgaaacaggggaaatnagccttatggtcccacctgttacattatcaggacaaccggcagagaaaactcacatcaggaagcctcagtacctcaggaatacttcttgattcagaacgtaggaagtctgatgccagctcactcatgcctcccctgaggatctccctgattcaggatatgaggcacatccagaacatcggggaaatcaagactgatgtgggaaaggccagagcatgggtgcgactgtccatggaaaaaaagttactttccagacacctgaagcagctcctctcagaccatgagctcaccaaaaagttatataagcgctatgccttcctgcgctgtgatgacgagaaggagcagttcctctatcacctcctgtctttcaatgccgtcgattacttttgcttcaccaatgtcttcacaactatcctgatcccgtaccacattctgatcgtaccaagcaagaagctggggggctccatgttcactgccaacccatggatctgtatatcaggagaattgggtgagacacagatcatgcagattcccaggaatgtgctagagatgaccttcgagtgccagaacttggggaagcttactactgtccagattggccatgataactctgggctgtatgccaaatggctggtggagtatgtgatggtcaggaatgagatcacaggacatacctacaagttcccgtgtggccggtggttagggaagggcatggatgatggaagcctggagcggatcctagttggggagctgctcaaatcccagcctgaggttggatgagaggccatgccggaccccggccgtgcacgaaagtccccccaggtgtccataccggaacgcttggtacacatctcaacccgaaaaaaaggccaagctgaacactgggcagatccaaggagtccatcggggacggagataatggcttgtgaagcattacacaaaagcttgagaacag

SEQ ID NO: 350678 - DNA, 1778 bp, Homo Sapiens
  misc_feature (582)..(683): n is a, c, g, or t
atcaacccggccccggtccggaattcccgggatgtcccagcgaccgctttggtcggctgtgtagactgttgggtaggctgcgtgctagcttcggcgcggatccctgggcgtccgtacgtcggagtccttcgtcctccagggtccctgttctttgcgccagcgggaaccactatctctgcactcctggggttttgttacatggctgctttcctcaaaatgagtgttagtgtcaatttcttcagacctttcaccaggtttttggtgccatttacccttcataggaagagaaataacttaacaattttgcagagatacatgtcttccaaaataccagctgttacttatcctaaaaatgagagtacacccccttctgaagagctagagttggataagtggaaaactaccatgaaatctagtgtgcaagaagaatgtgtttcaacaatctcaagcagtaaggatgaagatcctctagctgccaccagagagttcattgagatgtggagattgcttggcagagaagtaccagaacacatcactgaagaagagctcaaaacccttatggaatgtgtttctaacacagcnnnnnnnnnnnnnnnnnnnnnnnnnnnnnnnnnnnnnnnnnnnnnnnnnnnnnnnnnnnnnnnnnnnnnnnnnnnnnnnnnnnnnnnnnnnnnnnnnnnnnntatcaagctgctagaaaccactgaggaagataaacagaaaaactttctatttttacgactttgggataggaatatggacatagcaatgggctggaagggtgcccaggccatgcagtttggacaacctttggtttttgacatggcttacgaaaattatatgaaacgaaaagaattgcagaatactgtttcccagcttttagaaagtgaaggatggaacagaagaaatgttgatcctttccatatttatttctgcaatctaaaaatagatggtgctttgcacagagagttagttaaacggtatcaagaaaaatgggacaaattgcttttaacatcaacagaaaagtctcatgtagatttatttccaaaggacagtattatataattaacaaaaaaatctcccaatgttatgactactttcaggcatgacaaagtttatgtaattgggtcttttgttgataacgagtatgcagccagcgcacatccctagccaagccaaaacggctgaacctggcaactaaatcccttccattagataaatatttacaatgggaaattggtaacaaaaatctcaccttagatcaaatgatacgtattttgttatgtctgaaaaacaatggtaattggcaagaggctctgcaattctgttcccaagagaaaacatactgggttttctggagatttctcagcattctctaagagtttatcaacagactaaagaaggcaaagacttaattcattttcaaaaggttctctgaatgtgcacagaacacgtggctcaaatgagaacatttgatggcttaaaaagtaaatgcgttagaaatacagttctgttaatgtatttctttcccaaacaattcatttttctccttctaaaggtagtctttcccaactgactgtagggttgtgtcttttcccaattaaatatctgcagaactttgggattatactttgtttactgtagaaagataataaaaagagttgtccaagattgttgaacagaataatctttatcccagttaaatagttgtaccattggtagacttttttatggaggttcctagagggtggtgccctggggtgggcttggaagctctg

SEQ ID NO: 350679 - DNA, 2491 bp, Homo Sapiens
acttcggagagagaatgtagaatggaggaggtgaggaatttaactaatagagatgctttttctaacaggcagaaattagagaaatggatcaaaagatttaaacattgattacatataaacgagtttcctttttttctacatagcacacaggtgctcaacatttaatgaataatataacagatactgtcttaaaagtttaaaaacaggatttgtacttaatcctaaattcctcttatcacacaccagaaaataatttggattttatttacaaactacatccaaatactcttaaggaaagagtgtcatttagcttggagtagggactgactggggtctaagtgttggaaattaaattctgccattcagtccaacctcaaaggtgttccaggcaaggagttttgcaaggactacgaaaccctttcacacttgaaagtgcaggtgttggctgaaagaatagagggacatttcacaaacacagaacacgggctcccctacaggaaagggattggagacagctacctttgctcttgctctcacattctctgtcctcatggactttcttctctgtttccctctgcctatctatctgcctggttctcttgcttctcctggccaaccagctttctcattagtgcatatgtagctgaaaaatccacccctcaagaacccactccacacaacctttccttttcagtacccaccacgctctgactagcatctctgtgatgcctaaggcaaatttttgaggatctgattggtttagttcatctgcctatgggtgagccaccctggggtcaggtgcctgtccaatcacctgttaccaaggaggcagggccgtgtcatttaagcatggccccatggactgaccctttcagcagggacttttattgggggctggtacccagaagaaggagcatgagtgggcaagaccttcaaaaagaacctactacacactggaactgactagtactcctgggatgccatgccacgcagcagccagcactcggagagcagtcccctggatactaccacacagagaaaaggggcatcttcacttgcacatcaggtgagggtgcacacacttgaaactctgctagactggccagagctgccccagccacttctcaccccaccaccagttattgatacagccgctgggtctaggaagcgatttctgaacaaggcccagttagcacaatgtcttgctcagcagacaataaatacttgtaaattgaattgcatgatcttagctcaggtgctactaatgtggctcacggccacacacttgcatggataagaaaaccaatgagcccctcaacagagtcttttgaaacaaaattggtttcaagtgaaacttacattattttttggctgtgaccttctgaatataataacttagtgtcctgagaattgaaaggcctcttgatttcttaggtgaactgttacagaatcctagcctgtggtaaatgctaaaatgtaaggtgtttctgagaaggaatatttaggaaatataattgtgccacacacacattactttagaagatatgcagttgctctgattctgcaggtttaaaaaaaattgggaaagtttgtgatatggcagaatctgtctccattggtcaaaccatacttcagtgagagccattataagtgaaatctaaaaattgatcgttttcattctctgactttggtcagacttttgcaaattatggagagaggccatcaacatattttacataaattactgtggccccatcttatttctcctcatttcttccttatgtttaaacacgcccccatctcacacacaaactgagaaaagatttgtatcaaacagaatcagaggcatatgaatggactggaaattgtgaaaaaggtataaatatcctagaccttgatcaactcactttaaactggtctctgattcctcatctgtcaaatgagtataagaccctctgtacttcccatggtgattttgaggagcacatgcataatgtatctgaaaatggcttgacaagcacttgaagccattcttactaaattattagttttgtaattcggttttatccaggaaaatattttagctcctcctatctgctgaattaatttatacagtcacatgttccatgacaccatgttttgccaaggaaaaataaagaaattcctaaatttgaaattgcccacaagatctagcctcatctggagttgctgttattgtccttgttgtctatgatttggaggatatgtaagtacttgtacatgtgctttaactctgggtgaaaaaccccaaccggtgagtctttaaaaccatattagacacattgggcaaagtactgagcagaagctttgaatgtagctgttgttattttaaagcttcgctttctaatgaactttgtacgtccttagcctctgccgggaacagagtgttcatatgctgttagaattttttattgtaaaataaaatgacaaaggctttcataccccaaaaaaa

SEQ ID NO: 350680 - DNA, 2298 bp, Homo Sapiens
  misc_feature (1577)..(1610): n is a, c, g, or t
  misc_feature (1615)..(1620): n is a, c, g, or t
  misc_feature (1969)..(2043): n is a, c, g, or t
  misc_feature (2096)..(2112): n is a, c, g, or t
agcgggcgctgcgcgcccggaggagcgaccgccgcagttctcgagctccagctgcattccctccgcgtccgcccaacgcttctcccgctccgggccccgcaatggcccagtgcagtgtggtcgcgcctcggccgcatcctctggcttgcctgcctcctgccctgggccccgtgcagggtgtggccgcagagttcctcgtgggggaccttgttgtcacccagaacacttccctaccctggcccagctcctatctcactaagaccgtcctgaaagtctccttcctcctccacgacccgagcaacttcctcaagaccgccttgtttctctacagctgggacttcggggacgggacccagatggtgactgaagactccgtggtctattataactattccatcatcgggaccttcaccgtgaagctcaaagtggtggcggagtgggaagaggtggagccggatgccacgagggctgtgaagcagaagaccggggacttctccgcctcgctgaagctgcaggaaacccttcgaggcatccaagtgttggggcccaccctaattcagaccttccaaaagatgaccgtgaccttgaacttcctggggagccctcctctgactgtgtgctggcgtctcaagcctgagtgcctcccgctggaggaaggggagtgccaccctgtgtccgtggccagcacagcgtacaacctgacccacaccttcagggaccctggggactactgcttcagcatccgggccgagaatatcatcagcaagacacatcagtaccacaagatccaggtgtggccctccagaatccagccggctgtctttgctttcccatgtgctacacttatcactgtgatgttggccttcatcatgtacatgaccctgcggaatgccactcagcaaaaggacatggtggagaacccggagccaccctctggggtcaggtgctgctgccagatgtgctgtgggcctttcttgctggagactccatctgagtacctggaaattgttcgtgagaaccacgggctgctcccgcccctctataagtctgtcaaaacttacaccgtgtgagcactccccctccccaccccatctcagtgttaactgactgctgacttggagtttccagcagggtggtgtgcaccactgaccaggaggggttcatttgcgtggggctgttggcctggatcatccatccatctgtacagttcagccactgccacaaagcccctccctctctgtcacccctgaccccagccattcacccatctgtacagtccagccactgacataagccccactcggttaccacccccttgaccccctacctttgaagaggcttcgtgcaggactttgatgcttggggtgttccgtgttgactcccaggtgggcctggctgcccactgcccattcctctcatattggcacatctgctgtccattgggggttctcagtttcctcccccagacagccctacctgtgccagagagctagaaagaaggtcataaagggttaaaaatccataactaaaggttgtacacatagatgggcacactcacagagagaagtgtgcatgtnnnnnnnnnnnnnnnnnnnnnnnnnnnnnnnnnngagannnnnngaaatataaacacatgcgtcacatgggcatttcagatgatcagctctgtatctggttaagtcggttgctgggatgcaccctgcactagagctgaaaggaaatttgacctccaagcagccctgacaggttctgggcccgggccctccctttgtgctttgtctctgcagttcttgcgccctttataaggccatcctagtccctgctggctggcagggggctggatggggggcaggactaatactgagtgattgcagagtgctttataaatatcaccttattttatcgaaacccatctgtgaaactttcactgaggaaaaggccctgcagcggtagaagaagttgagtcaannnnnnnnnnnnnnnnnnnnnnnnnnnnnnnnnnnnnnnnnnnnnnnnnnnnnnnnnnnnnnnnnnnnnnnnnnngagatcaagaaccacccctggctaacacgggtgaaaacccccgtcctctactnnnnnnnnnnnnnnnnnggttaccccgggccttggttggttggggtgccctttaattccccaacctacctccgggaaggccttaaaagcaagggaaaaaaggtggcccaaaaccccggggaagggcggaaaacctttgccaattgaaacccccaaaaatgggggccccccatgggaaactccccaacccctcgggaatgtaac

SEQ ID NO: 350681 - DNA, 785 bp, Homo Sapiens
tgagctttcacggtgaaggtccccaatgatggaatagttataatagaccacggagtcttcagtcaccatctgggtcccgtccccgaagtcccagctgtagagaaacaaggcggtcttgaggaagttgctcgggtcgtggaggaggaaggagactttcaggacggtcttagtgagataggagctgggccagggtagggaagtgttctgggtgacaacaaggtcccccacgaggaactctgtgatggggaggaccacaaagcccctggccacaggctggcacatccagcagtcagcggcagtgacccagacagagaccgggaattccccgggcacgtggccgaccacacggatggtggagctgagacccttctccatcttgccagtaagcaccagcggggtgtggatccagtggaagcggtagaggtgggcgtcagcgggcagggccaggctgccgttgtccttggccaccaggctggccgagatggtcaccaccgctcccgtggtggcagggctatcggtggtgagattgagttcatacaggcctgcggccacccctgccggggcccagggcaggaggcaggcaagccagaggatgcggccgaggcgcgaccacactgcctgggccattgcggggcccggagcgggagaagcgtggggcggacgcggagggaatgcagctggagctcgagaactgcggcggtcgctcctccgggcgcgcagcgcgggcggtgcggggaggtgcgggcgccgtgctcgctcgtcctcgccgggggaccctctccgct

SEQ ID NO: 350682 - DNA, 2286 bp, Homo Sapiens
  misc_feature (1664)..(1678): n is a, c, g, or t
gggaagtttaagaaattaaacactttttgagcaccaaatatatatagggcattgttctggtgggtgtgtcacgctcccagaagactgaatttatggtaggatcactcgcaaggccttgtgaaggagtcttacctaaaacaaaagaaatatcagggacttttgttgactatttacaactcagttttacatttaaattcaggcagtgttaatatgccaaggtagggaatgtgcctttttcagagttggccaggagctcctggctgggacacggagaggcaggtgtggcgtaaggcctcactcccggctgtgaaggtctctgatcacacagaagcagccctgcccagcctggtcatttgctgtccgcttttctctgtgaccacagcagccctgaacaaccagtatgtgtcttcttctccagatagtgaaaaaggtgtccagataaacccacctaagtgaaatggccatcctctaaactgggtacctcactgcacagcttctaggtagccttccaacttaatctaacttgagcctcacagtaaccctgtaaagttagtagagcttgttcttgtattgtgaccttttttaaaaaaaaggaactgaggttcagaatgattaagggcctggcccccagggttgtccagctccataaggtggagctgggcaagattttgggtttgctgctccctgaagctggattctttcatacgatactctttctcaagaagggggctccctgggatctccaggtgtactgcacttaccctcaatccagccccggagaagcaagtgaaaagggtgggtccctcataggctagaatgtgcagctctttctccaggtgggatgtagcaccccaaagtagagctttctgctctgctcctggaaaaggctagggagctggggctggggctcccctcccatgaccaggcagtggtcaccccatgggacaggcacagctacttacgcgaacacagcaggttggtgtggctggctaactaggacctctcgaaagtctctgtgggggcatgagggagaaaaggccattgggagaattactgcctttactttgggactacttttatgctgataacttgggatttcttgatagtccttcacccctgaaaccccgtatttacttaacaagatttagctcttagttcttcaagtaaaattaaagtctcttgtgtaagagccaacacatgcccagctgcggatgggagctgttcctggacagccttctactgcctgggaagtgatggaacaggaactcagggtgcccttaccccctccccagacctgttccctttctttgactgacagagcaccatccaggcaaaattagagcgccaaatggttttcttctcaatcttaaagcagtatacctttccacaggctcgtctgtgtccctgccactctgagttatccagaaaccaccacctacaaatgaggggactcatctagaagacctctaaggtccccttttggctctgaggggtctctaataatccccacttggaattcagcaccgcaaggaaattatgggtatgtgagccataatatgatggccagcaggtggcgctgccttccacccatggtgatggatggtttggaaagggaatgttggtgccttttgtgccacaagttaagatgctactgttttaaaggnnnnnnnnnnnnnnngtactgatcttcaatatgaagacatgaagcttttctcgcaggaaatttttctttttcacagaactggtgtccacgaaatcactgaaatggcctaaccggggcatagtcctctggcaagtacccccaacgggcttctattccttgaattgggacaataacaaagaacacctttctcccgtgtggcagacgcaaccagcatttccgccttgcggacagaccttctaaacctctacttcgctgttgccccttccttttaaaaagacccaaccccaaaaatattcttataagcgggccaccatcttcggacattcaacacacaacaaagacaagcgccaaatccttttcttctctgggcgacacacacaaaaaagggtggcgaaaaaaccttacccaaacaaccctcgggatacttagtatccccgtcgccccaacccccgcggggaacgctttgttaataagatctcccccgattgccgggatctccacccaacaattccaccggcgtagttacaccaatacacccgcctgctaaaattttttctctaccgccccataacaataatacatataaggcgctctattccaccgtcttacataaaaaaatgaaa

SEQ ID NO: 350683 - DNA, 1774 bp, Homo Sapiens
  misc_feature (493)..(508): n is a, c, g, or t
  misc_feature (877)..(877): n is a, c, g, or t
  misc_feature (879)..(959): n is a, c, g, or t
  misc_feature (1144)..(1180): n is a, c, g, or t
  misc_feature (1242)..(1252): n is a, c, g, or t
  misc_feature (1398)..(1398): n is a, c, g, or t
  misc_feature (1662)..(1662): n is a, c, g, or t
  misc_feature (1730)..(1730): n is a, c, g, or t
cactccgggaaaggttatagccgttcccaacggttagttatcgcctacctcatgatgcggcagaagatggacgtcaagtctgccctgagcatcgtgaggcagaaccgtgagatcggccccaacgatggcttcctggcccagctctgccagctcaatgacagactagccaaggaggggaagttgaaaccctagggcacccccaccgcctctgctcgagaggctcgtctgtgtccctgccactctgagttatccagaaaccaccacctacaaatgaggggactcatctagaagacctctaaggtccccttttggctctgaggggtctctaataatccccacttggaattcagcaccgcaaggaaattatgggtatgtgagccataatatgatggccagcaggtggcgctgccttccacccatggtgatggatggtttggaaagggaatgttggtgccttttgtgccacaagttaagatgctactgttttaaaggnnnnnnnnnnnnnnnngtactgatcttcaatatgaagacatgagcttttctcgcaggaaattttctttttcacagaactggtgtcaggaatcactgaagggctaaccgtgatagtccttgcaagtaagtcaaggttttatcctgattggaaatagaagacatttccggttgagagaacagattcgttggaagcttaacttttgttgcctcttaacgccaccaaattttagggtaatttgattatgaaagagtgaatttttctggacagaaaagggagagctaccaaattgtttttttcattttaaaaggaagtttaatgtccgttgtatcacaaatcagtgttaaaacaccagaactttagccaaaataaatgtcttacattacnannnnnnnnnnnnnnnnnnnnnnnnnnnnnnnnnnnnnnnnnnnnnnnnnnnnnnnnnnnnnnnnnnnnnnnnnnnnnnnnnaactacggggaaccatagcgcccccgcgattatgaaaaaaatagcttgtggggggccccgccttccgcccccctgaaaaaaattttttttagaaaccctctttgcttttggggcgccgcgggggccccccctgtgggcgaaagcgggcaaacattgggcccaaaaatgtgttgggtcttctcacnnnnnnnnnnnnnnnnnnnnnnnnnnnnnnnnnnnnngaggcgctcgtggggaatatcccctcgcccccacaattgataaaataaaccccccccgcgcnnnnnnnnnnnaacaaccacgcgaggagggtgttattttgttgtgaacaaataaatactctcccatcaataaggtggggggggcgtttctctcccttcggagaggggggttatctttcatagcgcggggcgggattttttatttctatctctaaacnaggcggggagggagagcgcccccacaggtggcgcgcggcgcgctcctcccactcatatatctgccgcacaattttttatccccggcacgtctgcctgcgcccaacctgcggttgaccacatcttatctgttctttgcggcaaggagcaacagcgtgggggcggggggaaaaaaaccctcccctattttattaaaaggctatatttcttcttccgccccccacacctcctctgggtaaaaacaacactctcactttctctaacanaaaacagggcggggattgtgatagacaagaacacctactccgtgttataaatctcccccaaccccaangggggggcgttaatccaaccacgcaacaccacggtatgtggata

SEQ ID NO: 350684 - DNA, 418 bp, Homo Sapiens
  misc_feature (237)..(237): n is a, c, g, or t
cctttaaaacagtagcatcttaacttgtggcacaaaaggcaccaacattccctttccaaaccatccatcaccatgggtggaaggcagcgccacctgctgcccatcatattatggctcacatacccataatttccttgcggtgctgaattccaagtggggattattagagacccctcagagccaaaaggggaccttagaggtcttctagatgagtcccctcatttgtaggtggtggtnttctggataactcagagtggcagggacacagacgagcctgtggaaaggtatactgctttaagattgagaagaaaaccatttggcgctctaattttgcctggatggtgctctgtcagtcaaagaaagggaacaggtctggggagggggtaagggcaccctgagttcctgttccatcacttcc

SEQ ID NO: 350685 - DNA, 1195 bp, Homo Sapiens
agctgatccgccgctctccgcctcgcttgctcctgccgggcgtgcagggccccgccgccgccatgtcgggctcgttcgagctctcggtgcaggatctcaacgacctgctctcggacggcagcggctgctacagcctcccgagccagccctgcaacgaggtcaccccgcggatctacgtgggcaacgcgtctgtggctcaggacatccccaagctgcagaaactaggcatcacccatgtgctgaacgcggctgagggcaggtccttcatgcacgtcaacaccaatgccaacttctacaaggactccggcatcacatacctgggcatcaaggccaacgacacacaggagttcaacctcagcgcttactttgaaagggctgccgacttcattgaccaggctttggctcaaaagaatggccgggtgctcgtccactgccgggaaggttatagccgctccccaacgctagttatcgcctacctcatgatgcggcagaagatggacgtcaagtctgccctgagcatcgtgaggcagaaccgtgagatcggccccaacgatggcttcctggcccagctctgccagctcaatgacagactagccaaggaggggaagttgaaaccctagggcacccccaccgcctctgctcgagaggtccgtgggggaggccgtgggcaaaggtgtcccgagctgccatgtttaggaaacacactgtaccctgctcccagcatcacaaggcacttgtctacaagtgtgtcccaacacagtcctgggccactttccccaccctggggagcacataaagaagcttgccaagggggggcgtcccttgctccccagttgtcctgtttctggaacttatgatgtcttttccctgagatgggggctcagagggggaaggcctgtggcctgcatgcttcccgatggcccacggcaggaggtgtgtggaagtgtaaggcctaagatgctcacagaggtccctcatgacctcccttccccaactcccgaatcctctcttgagtgtggacctcaacaccttgagccctagtaaaggaactatgcaaatgcaggccactctccccaccacgtctgtgccccgcactgtcaccacagccttccacaccctgtgcataggcagccctctcacgtcttgaggtccgaagctggggtgggggtgtccgacagttataagtggatggaga

SEQ ID NO: 350686 - DNA, 442 bp, Homo Sapiens
agaccttcaacagccgggaagtgaagccttacgcccacacctgccctcctccgtgtccccaacccaggagctccctggccaactctgaaaaaaggcacattcccctaccttggcatattaacactgccctgaatttaaatgtaaaactgagttgtaaatagtcaacaaaagtccctgatatttcttttgttttaggtaagactccttcacaaggccttgcgagtgatcctaccataaattcagtcttctgggagcgtgacacacccaccagaacaatgccctatatatatttggtgctcaaaaagtgtttaatttcttaaacttttatcagacacctatgtgcaaggtgctgggggcatggctgaggaccttctctttgcccagagtgaccctgaagataaatagcatcacaatcactttccataataacaataacgtaaaa

SEQ ID NO: 350687 - DNA, 1184 bp, Homo Sapiens
gggtcccacaaacccggaagcggatcgcgtggagtgaaggtcacgccgcggcgcgattgacttctaaagagtcatgctgtgtgatgaaaaagcccagaagagaaggaagaggaaagcaaaggagtcagggatggctcttcctcagggacacttaacattcagggacgtggccatagaattctctcaggcggagtggaaatgcctggaccctgcacagagggctttatacaaggatgtgatgttggagaactacaggaacctggtctccctgggaatctctcttcctgacctgaatattaactccatgttggagcaaaggagggagccctggtctggtgagagtgaagtgaaaatagcaaaaaattcagatgggagggagtgcatcaaaggtgtgaacacagggagcagctatgcattgggaagcaatgcagaagacaaaccaattaaaaaacaacttggagtaacctttcacttacatctgccagaactggagatatttcaaggtgaagggaagatttatgaatgtaatcaagttcaaaagttcatcagccacagttcttcagtttcgccacttcaaagaatttactctggggtcaaaacccacatatttaataaacatagggaatgattttgttgattttccatttgctgtcacaagaacagaaagcacacattaaggagaaaaccttacgaatgtaatgagcagggcaaagtcttcagagtgtcttctagccttcctaatcatcaagcaatccacactgcagataaacctaacagatgtcatgaatgtggtaaaaccgtcagggacaagtcaggcctcgcagaacattggagaattcgtacaggagagaaaccttacaaatgtaaagagtgtggcaagctcttcaatcgaattgcataccttgcacgacacgagaaagtgcatactggagagagtccttacaaatgtaatgagtgtggcaaggtcttcagtcgaattacataccttgtacgacatcagaaaattcatactagagagaaacctcataaatgtaacaaatgtggcaaggtttatagtagcagttcatacctagcacaacattggagaattcatacaggagagaaactttacaaatgtaataaatgtggcaaagaatttagtgggcattcaagcctcaccacccatctgttaatccacactggag

SEQ ID NO: 350688 - DNA, 1823 bp, Homo Sapiens
  misc_feature (169)..(169): n is a, c, g, or t
  misc_feature (1363)..(1476): n is a, c, g, or t
  misc_feature (1660)..(1660): n is a, c, g, or t
ttttgtttagtggttggggccccaaaaaattcgccccctctacattaaggtttctccaagtagaacgcccgagggtagtagggctaaagccacttaagccttccaccattttatcattttaaagtttctttccagaaggatcccctaagggaagtaagtttaaaagccnctaaagggctttccacctcctttacacttgagaggttccttccagaatgaatctcccgatgattcgcaagtgttgattgtacttaaaacccttcccacatccattgcttggaaggttcctccccagaataattcttccatcgcctgcaaggctttaagtctgactgaagactttcccccttcattcccctttatgtttctccccagtgtgattctctgatgaattgcaaggcttaaagtctgacttaacaccttgccacattcattgcatttgtaaggtttcttgccactattaattacctgatggttggtaagtgttgacctcacactaaaggctttgccacactctttacatgtgtaaggtttctctccaatatgagttttctgatgtagtgcaaggcatgaatttcgactgaagaccttgtcacactcataacatttgtaaggtttctctccagtgtgaactctccgatgtagtgcaaggcatgagttgcgactgaaacttctgtcacattcattacatttgtatggtttctctccagtatgaactctccaatgacgcgcaaggtttgatttttgactaaagaccttgccacacagatcacatttatatcctttctctccagaatgacttacctgacgtacagtcatgtgtgagccatgattcaaggctttgtcgcactcaatatatctgtaaggtttttccctaatgcatgatttctgttcttgtgtgagtaatgaagaacagatgaaatcagtcccatatttattagaaacatgggttttgatggtagaagaaattatttggggtggtgaaactgaggaaccatggttgacagacttctcaacatggttacattcataaattttcccttcagcttgaaactgctgcagttcatggggatgtggtagaaagcttaatccaagctgatgtttaatagacttgtttcctatacctcttctatcgcgttggtctctcctacaagtaagattttcttttggggccgtagtcactttgttgcaatttctttcatcatctctccactgacagtcaaagtcgtgtatttttttcttgatttccctgaagcaaaactcttcaatgtcatgtttttcatgttgttccaatgtcactgtgtggaatacttctcctgggttaccttcctgttgtggtgctagttccttgattacacagttnnnnnnnnnnnnnnnnnnnnnnnnnnnnnnnnnnnnnnnnnnnnnnnnnnnnnnnnnnnnnnnnnnnnnnnnnnnnnnnnnnnnnnnnnnnnnnnnnnnnnnnnnnnnnnnnnngagaccaggttcctgtagttctccaacatcacatccctgtataaagtcctctgtgtagagttcaggcatttccactcatcttgagagaattcgatggccacgtccctgaatgtcaactgagtaaaagccattcctgactcctttgctctcctcttctgggtttcttcctcatgtgccaggagtntttggaagtcaatgctgcagctgaggggccagcgagttccagcagaggcacagcccacgtgaaggccttgaggcaggagcaagctcggcccaggaacaggaaggacgcatgcttggctggagcagagggagcgaggaggacacaggcaggagatgaggtcaga

SEQ ID NO: 350689 - DNA, 1769 bp, Homo Sapiens
  misc_feature (127)..(137): n is a, c, g, or t
agtccattcacaacccctgcgttcaggttcacgcaacatagaccatgaacgcaccagtttcaagtgcaaggcaaaatttatcatggaccccaggtacaagtcctgtcaaccagggttccccagtttnnnnnnnnnnnaatatttcttctaccatcaaaacccatgtttctaaataaatatgggactgatttcatctgttcttcattactcacacaagaacagaaatcatgcattagggaaaaaccttacagatatattgagtgcgacaaagccttgaatcatggctcacacatgactgtacgtcaggtaagtcattctggagagaaaggatataaatgtgatctgtgtggcaaggtctttagtcaaaaatcaaaccttgcgcgtcattggagagttcatactggagagaaaccatacaaatgtaatgaatgtgacagaagtttcagtcgcaactcatgccttgcactacatcggagagttcacactggagagaaaccttacaaatgttatgagtgtgacaaggtcttcagtcgaaattcatgccttgcactacatcagaaaactcatattggagagaaaccttacacatgtaaagagtgtggcaaagcctttagtgtgaggtcaacacttaccaaccatcaggtaattcatagtggcaagaaaccttacaaatgcaatgaatgtggcaaggtgttcagtcagacttcaagccttgcaactcatcagagaattcacactggggagaaaccatacaagtgtaatgaatgtggtaaagtcttcagtcagacttcaagccttgcaaggcattggagaattcatactggagagaaaccttacaaatgcaatgaatgtggtaaggttttcagttacaattcacaccttgcgagtcatcggagagttcatactggagagaaaccttacaagtgtaatgagtgtgggaaagcctttagtgtgcattcgaacttaactacccatcaggtcatccatactggagagaagccttacaaatgtaatcaatgtggccaaaggctttcagtgtgcattcaagcctaactacccatcaggtcatccatactggagaaaaaccttacaaatgtaatgagtgtggcaaatcctttagtgtgcgcccaaacctcactagacatcagataatccatactggaaagaaaccttacaaatgtagtgattgtgggaagtcctttagtgtgcgcccaaacctcttcagacatcaaattatccatactaaggagaaaccttataaaagaaattaatatggcaaggtcttcagtcaaagtttaaatcctgtgagtcatcaaagaatttatatcagagagaaaccatacaagtataataaatgtggcaaggttttcagtcacaattcactcctacacagcatcagagaatttcattcttgagagaatccttacaagtacagcaaacccttcatcacaagttcaagcattcattgacatcagagtccatgctaaagagaaatcatatacacctaactgtgtggcagaggcttcatttaggtctcacaactcactagacatcaaaatgtgtaaacatctttgtatattttgtgcatgttgaagctattaaccaaggatcaaaactgtaacacatccaaggatttatgtgaggaataattcagtctagttgtgctgataaacttttcatattacacattgtagaacaaatgcaagcccaaatgtgttaaaactcacacaacatgatatatattaaaggttgcaggatgtttgaagtca

SEQ ID NO: 350690 - DNA, 1139 bp, Homo Sapiens
  misc_feature (325)..(492): n is a, c, g, or t
  misc_feature (983)..(983): n is a, c, g, or t
  misc_feature (1005)..(1005): n is a, c, g, or t
agcggaagcggattatgtggagtgaaagttacaccgtggcggattgacttctaaggactcttggtacatgaggaagaaacccggaaggggaagaggaaagcaaaggcgtcaggaatggttcttcctcagggtctattgacattcagggatgtggccatagaattctctcaggaggagtggaaatgcctggaccctgctcagaggactctatacagagatgtgatgttggagaattataggaacctggtctccctggatgttctgcattcttcatgatagctcagtgggggttccagaagtaaagaaggcttaaaaccttatggcnnnnnnnnnnnnnnnnnnnnnnnnnnnnnnnnnnnnnnnnnnnnnnnnnnnnnnnnnnnnnnnnnnnnnnnnnnnnnnnnnnnnnnnnnnnnnnnnnnnnnnnnnnnnnnnnnnnnnnnnnnnnnnnnnnnnnnnnnnnnnnnnnnnnnnnnnnnnnnnnnnnnnnnntattttttctaaatgtgagatcaaggaattaccaccaaaaaaggagagtaatacaggagaaatattccagacagtaatgttggaaagacatgaaagccacgacatacaagatttttgcttcagagaaacccagaaaaatgtacatgactctcagtgtctgtggaaacatgattgaagacattataagcgagtgcgtgtgacctataaggaaagtctcattggtagaagagacatgcatggtagaaaggatgatgcacaaaagcagcctgttaaaaatcagcttggattaaacccgcagtcacatctaccagaactgcagctatttcaagctgaagggaaaatatataaatatgatcacatggaaaaatctgtcaacagtagttccttagtttccccaccccaacgtatttcttctactgtcaaaacccacatttctcatacatatgaatgtaattttgtggattcattattcacacaaaaagagaaagcanatattgggacagaacactacanatgtaatgagcgttgcaaggcctttcatcaaggcttacattttactatacatcaaataatccatactatagagacgcaattaaatgtgatatatgtggcaagatcttcaataaaaaatcaaaccttgaagtcat

SEQ ID NO: 350691 - DNA, 722 bp, Homo Sapiens
  misc_feature (321)..(321): n is a, c, g, or t
aaccttataaatgtaacgaatgtggcaaggtcttcactcagaattcacaccttgtaagacatcgaggaattcatactggagagaaaccttacaagtgtaatgagtgtgggaaagcctttagagctcgttcaagcttagctatccatcaggcaacccacagtggagaaaaaccttacaaatgtaatgaatgtggcaaggtcttcactcaaaattcacaccttacaaatcactggagaattcacactggagagaaaccttacaagtgtaatgagtgcggcaaagcctttggtgttcgttcaagcctagctattcatctggtanttcacaccggagaaaagccttacaaatgtcatgaatgcggcaaggtctttaggcgtaattcacaccttgcaaggcatcagctaattcatactggagagaaaccttataagtgtaatgagtgtggcaaagcctttagagcacattcaaacctaactacccatttctcccagtatactttgagtgcttgaggaccagaatctttcttcatcctattgtgttcagcatttcctgcagtgcgtgacacacatttggtgttcagtaaaggctttctgcatggataagtgcttgagaagtgtcattagtgagctgaaatccttcaaaagagagttgtgagaaaacagagacatacttccattaagaacaaaaatcaaatcattcaaaaaggaaggaacatggcgaaa

SEQ ID NO: 350692 - DNA, 416 bp, Homo Sapiens
gcaagcgccattcatggattgacttataaacagtcatgctatgtgatgaagaagcccagaagaggaaagcaaaggagtcagggatggctcttcctcagggacgcttgacattcatggacgtggccatcgaattctctcaggaggagtggaaatccctggaccctggacagagggctttatacagggacgtgatgttggagaactacaggaacctggtctttctgggaatctgtcttcctgacctaagtattatttccatgttgaagcaaaggagagagcccttgattctgcaaagtcaagttaaaatagtaaaaaatacagatggaagggaatgtgtcagaagcgtgaacacagggaggagctgtgtattgggaagcaatgcagaaaacaagcctattaaaaatcaacttggatta

SEQ ID NO: 350693 - DNA, 559 bp, Homo Sapiens
ccacgcgtccgcccacgcgtccgcaggaagcggatcccgtggagtgaaggtcgcaccgcggcggattgacttctaaagacttggtacgtgaggaaaaaacacggaagaggaagaggaaagcaaaggagtcagggatggctcttcctcagggtctactgacattcagggatgtggccatagaattctctcaggaggagtggaaatgcctggaccctgctcagaggactctatacagagacgtgatgctggagaattataggaacctggtctccctggatacctcttccaaatgcatgatgaagatgttctcatcaacaggacaaggcaatacagaagtggtccacacagggacattgcaaatacatgcaagtcatcacattggagatacttgcttccaggaaattgagaaagatattcatgactttgtgtttcagtggcaagaaaatgaaacaaatggccatgaagcactcatgacaaaaaccaaaaagttgatgagtagtacagagcgacatgatcaaaggcatgctggaaacaaacctattaaaaatgagcttggagc

SEQ ID NO: 350694 - DNA, 882 bp, Homo Sapiens
  misc_feature (700)..(700): n is a, c, g, or t
gggggaagcagattacgtggagtgacggtcatgctgcggcgtggacacttggcattcagggacgtggccatagaattccctcaggaggagtggaaatgtctggaccctgctcagaggactttatacagggaagtgatggtggagaactacaggaacctggtctttctgggaatctgtcttcctgacctgagtgttatctccatgttggagcaaaggagagatccccggaatctgcagagtgaagtgaaaatagcaaacaatccaggtggcagggagtgcatcaaaggtgtgaactcaggtaagtacttgtatggccatactggaggccccataatttcttctctctttcaacaggccttgcttccgtacctaggcctgctccatagtggctctcccctttgtcaatccgtgccctatctcttttacctcaaactccctggtctttttggggttacacctttgccgtatgccttccaaaaagggcgggcggatattataagcaagggatccacatgtataccttttattacccacccctttttacactttccttcatttcggtagcctcctcccgcgcacccgcataaaaaattcccttcgggcccaaatacagcactccctttcccctctttaaaccctaaaagtaagaccactttccccacctttttcttatcttttagattgccaggtgccccagtcnacgtaatcgcactttcaacattaatatcctgcacctatgctatccggcgcatcctcatatagtatacgtggtctcgtttggacataccgccctcaccttcacgctcatgcgacttgatgcctacgaacgaaccggtcgccgactttaatttttatctcatcctgacggtcaccgacttccca

SEQ ID NO: 350695 - DNA, 568 bp, Homo Sapiens
tgggttatcttcctgttgtggtgctagttccttgattacacagttacgagacagatctgttttcacacctttgatccattcccacccttttggttttcttgctactcgtacttggctttctatggtccagggctctttcctgtgctcccacataggataatactccagggagaccaggttcctgtagttctccaacatcacatccctgtataaagtcctctgtgtagagttcaggcatttccactcatcttgagagaattcgatggccacgtccctgaatgtcaactgagtaaaagccattcctgactcctttgctctcctcttctgggtttcttcctcatgtgccaggagtctttggaagtcaatgctgcagctgaggggccagcgagttccagcagaggcacagcccacgtgaaggccttgaggcaggagcaagctcggcccaggaacaggaaggacgcatgcttggctggagcagagggagcgaggaggacacaggcaggagatgaggtcagagaggtcgctcgacgccgtcaccttcacccaacgcgtccgtttccgggcctgt

SEQ ID NO: 350696 - DNA, 1644 bp, Homo Sapiens
  misc_feature (48)..(59): n is a, c, g, or t
  misc_feature (78)..(335): n is a, c, g, or t
tttacaaaattatcttaataagttctatatggtcagcttcatcttccnnnnnnnnnnnngagatggagtttcgctctnnnnnnnnnnnnnnnnnnnnnnnnnnnnnnnnnnnnnnnnnnnnnnnnnnnnnnnnnnnnnnnnnnnnnnnnnnnnnnnnnnnnnnnnnnnnnnnnnnnnnnnnnnnnnnnnnnnnnnnnnnnnnnnnnnnnnnnnnnnnnnnnnnnnnnnnnnnnnnnnnnnnnnnnnnnnnnnnnnnnnnnnnnnnnnnnnnnnnnnnnnnnnnnnnnnnnnnnnnnnnnnnnnnnnnnnnnnnnnnnnnnnnnnnnnnnnnnnnntcagctcagcttcaacctgtctgcaaagaaaagttttaccaagaccagaagttaaatatgacatttcctaggtagttgtaactctaacatagtttaaaaagtatgtggcttcagattgcctatactttgttcacaaacgtgtgatttagatatgactgatttagaagtgaacaacttggtaacatccctagactccactcatgaacgcagaattattacctgctgtttgctttctgaaagaatttcagaaatcagagcaaatgtgtctttaggcagattcagctccttttaatatttttctcttggcccactctctttgcctcccctgaatctgtgtggtactatagcagctctactctgtgcaccatgctaggaagcttcctttttggcagaatatgtttggcagcaaagctatagagacaggtgcattcagaacatcctgggcaccagtcatgagtcttactgtgtcaaaaatctgaaaacacttgctgagaaccaaatttattccattggaaaaaccctctgtggagctataagcctcttggactcttcttcctagattaaggcttgcatttccctccctgtttcagtaaaagatgatgaaagccactatcaatcctcactgctgagtggcagggagaagcagcaccactctcagctcttttctaatcttgtaacttagtgctagaagtctctccaggctattaccatgggcatttgttctctgttggagctgtaagcagatgaacccaagtagagaagatagatcttggaaggagagatccattgagtccagaagccagatcagcaaatggaggaacctcggaggtgaccagaaagatctccatcggttgcccaaggctgtaagtagtgatggttttagcgatgaataacgtaattggctatgaagtactgtggcagagctgctgttttctgaaggtgagaagccatttttagctcagagcaacccttaagagaacttttggcagattttgttggcattattgaaatatatatagaaaagttgctgattgcaatggttatgggaatggaatttaatgacatttgtaatttattacactcattggtttttattgattatagtattgtctgactttttattttctactatggttcctttagcagaaaagtaacttttgtgcatatattgaagtggtttttcagctatgaattctttagggtagaaatttatttagcaaatgtgaattcttttgagaaagtatgaagttttgcagaaattgactgtgaaatgtcagagaaaaataaaagtcacttacttgaaacctaa

SEQ ID NO: 350697 - DNA, 1039 bp, Homo Sapiens
  misc_feature (917)..(917): n is a, c, g, or t
  misc_feature (923)..(923): n is a, c, g, or t
  misc_feature (961)..(961): n is a, c, g, or t
  misc_feature (972)..(972): n is a, c, g, or t
  misc_feature (987)..(987): n is a, c, g, or t
  misc_feature (999)..(999): n is a, c, g, or t
  misc_feature (1002)..(1004): n is a, c, g, or t
  misc_feature (1013)..(1014): n is a, c, g, or t
  misc_feature (1020)..(1020): n is a, c, g, or t
ggggcaggaatgggagccgcgcgctctctcccggcgcccacacctgtctgagcggcgcaggagccgcggacccgggcgggctgctcggcgcggaaaagtgctcggcatggcagggattccagggctcctcttccttctcttctttctgctctgtgctgttgggcaagtgagcccttacagtgccccctggaaacccacttggcctgcataccgcctccctgtcgtcttgccccagtctaccctcaatttagccaagccagactttggagccgaagccaaattagaagtatcttcttcatgtggaccccagtgtcataagggaactccactgcccacttacgaagaggccaagcaatatctgtcttatgaaacgctctatgccaatggcagccgcacagagacgcaggtgggcatctacatcctcagcagtagtggagatggggcccaaaaccgagactcagggtcttcaggaaagtctcgaaggaagcggcagatttatggctatgacagcaggttcagcatttttgggaaggacttcctgctcaactaccctttctcaacatcagtgaagttatccacgggctgcaccggcaccctggtggcagagaagcatgtcctcacagctgcccactgcatacacgatggaaaaacctatgtgaaaggaacccagaagcttcgagtgggcttcctaaagcccaagtttaaagatggtggtcgaggggccaacgactccacttcagccatgcccgagcagatgaaatttcagtggatccgggtgaaagcacccatgtgcccaagggttggatcaagggcaatgccaatgacatcggcatggattatgattatgccctcctggaactcaaaagcccacaagagaaatttatgagattggggtgagcctcctgctaagagctgcnaggggnagaatcacttctctggttatgaaatgaccgacaggcanttggtgtatgnttctgtgacgtaaanagagactatgantgnnnacagcatgnntgccancagggcagcggtctggggt

SEQ ID NO: 350698 - DNA, 1688 bp, Homo Sapiens
  misc_feature (1397)..(1422): n is a, c, g, or t
agcggagttgcctgcgctgctcgccagcttgtcgcactcggctgtgcggcggggcaggcatgggagccgcgcgctctctcccggcgcccacacctgtctgagcggcgcagcgagccgcggcccgggcgggctgctcggcgcggaacagtgctcggcatggcagggattccagggctcctcttccttctcttctttctgctctgtgctgttgggcaagtgagcccttacagtgccccctggaaacccacttggcctgcataccgcctccctgtcgtcttgccccagtctaccctcaatttagccaagccagactttggagccgaagccaaattagaagtatcttcttcatgtggaccccagtgtcataagggaactccactgcccacttacgaagaggccaagcaatatctgtcttatgaaacgctctatgccaatggcagccgcacagagacgcaggtgggcatctacatcctcagcagtagtggagatggggcccaacaccgagactcagggtcttcaggaaagtctcgaaggaagcggcagatttatggctatgacagcaggttcagcatttttgggaaggacttcctgctcaactaccctttctcaacatcagtgaagttatccacgggctgcaccggcaccctggtggcagagaagcatgtcctcacagctgcccactgcatacacgatggaaaaacctatgtgaaaggaacccagaagcttcgagtgggcttcctaaagcccaagtttaaagatggtggtcgaggggccaacgactccacttcagccatgcccgagcagatgaaatttcagtggatccgggtgaaacgcacccatgtgcccaagggttggatcaagggcaatgccaatgacatcggcatggattatgattatgccctcctggaactcaaaaagccccacaagagaaaatttatgaagattggggtgagccctcctgctaagcagctgccagggggcagaattcacttctctggttatgacaatgaccgaccaggcaatttggtgtatcgcttctgtgacgtcaaagacgagacctatgacttgctctaccagcaatgcgatgcccagccaggggccagcgggtctggggtctatgtgaggatgtggaagagacagcagcagaagtgggagcgaaaaattattggcattttttcagggcaccagtgggtggacatgaatggttccccacaggatttcaacgtggctgtcagaatcactcctctcaaatatgcccagatttgctattggattaaaggaaactacctggattgtagggaggggtgacacagtgttccctcctggcagcaattaagggtcttcatgttcttattttaggagaggccaaattgttttttgtcattggcgtgcacacnnnnnnnnnnnnnnnnnnnnnnnnnnaaggtgtcttataatcttttacctatttcttacaattgcaagatgactggctttactatttgaaaactggtttgtgtatcatatcatatatcatttaagcagtttgaaggcatacttttgcatagaaataaaaaaaatactgatttggggcaatgaggaatatttgacaattaagttaatcttcacgtttttgcaaactttgatttttatttcatctgaacttgtttcaaagatttatattaaatatttggcatacaagagatatg

SEQ ID NO: 350699 - DNA, 845 bp, Homo Sapiens
agatggacaaagacagacaagttagaaagactgatggtcaagattggggtgttctcagtactgtacacaagtccctgcaacgtgtgtgattgcctgttaattgtttatgaaatcgtccaactgggcactttttcggtaattctgcagatgattccaacatggctgttgaaatgttgaaaatttttatgtctttgttggtgggcatcacttcaggcatagtggatttggtctgccaaaactcttcacacgtggcagaagtgttccaacagattggtgaattacacataaggtatccagtggatttttcttctctgtcttcctctcttaaatttcaacatctctcttcttggctgctgctgttttcttcattttatgttaatgactcaaaaaaggtatttttatagaatttttgtactgcagcatggtgtttctggcgatgttctcttctcttgattgatgattcctcagagcctgcccacctcctagggctaaactggctcaattttaagaatggatgaaaaatgtgaagctctcctcgactcttctgtgaactccatgaaagcagaacactgtcttttctgtcctggtgtctctgcttctagccaggtcctggaacctagttggtattcaggaggtggtggttgaattgaattcgaaactgttgagccctctcgcttcacagttgtgggggcatgaggactaggccagggttggcacacaggtctcattctactcattagggagccatccgcgccgagcagcccgcccgggccgcggctcgctgcgccgctcagacaggtgtgggcgccgggagagagcgcgcggctcccatgcctgccccgccg

SEQ ID NO: 350700 - DNA, 1646 bp, Homo Sapiens
  misc_feature (23)..(23): n is a, c, g, or t
  misc_feature (1422)..(1435): n is a, c, g, or t
  misc_feature (1564)..(1600): n is a, c, g, or t
ggtccggaatttccgggattggntaaccttcatgaagttgggggcgatcccccggtagaggccccgcatgccctcctgggacaggatgtgacgtagcagacccagcatggacagctgggggccaccctcgatggaggcttgtgcctgcatgcgggtccggaccagggccagcgggtaactggctatctggccgcaggtgctggatatggtaccgcaggccaggagcacgaggatgcctgggtctgccgagtcgtggctgtactgctgaagccaccagttcttcagagtctcgtagacggccaggtcgatgcccgcataggggatgatgcccagcacgttggggaggtagccgcggtagaaggcacggggcccctccctctccaggatacgcctggcgcagtccagcagccccttatactggcccgtccggcgcaaggtcagccgcgtcttcagcacctccatagggtaaatgatggtttgggctgtggcaccagccagggagccagccacgaagcgctcctgcacatgcagtgtctcctgctgccccaggatggccctcttgatctgttcataggccatgaacttgatagctgactcgggggcaatcttgagtacattaataccattgccgcgccacagggagcggatgcctccctcaaggaccatgcttcgaagccccccaaggatgttcagccggttggtctttgaggcatggacctgcatgaagaccttgaggcggtccagaggggccgtgcctgtccgtgacacggcacctgccactgcgccggccaccagctgtttccaccacatgcccgtcagcttctcttgctttgagaactcgtccggcactgtcaggcactcgccaatgtccaggaccgtggaatgcttccagaaatacagcacgtcctccacattttccagcgaatgcaacaggaagtggtcgcgccattcttgccagtcaatggtcattgtgccgtctcggtccatgctgtgcaaaattttctcagcctgctccagcgagatggaaatgcccagagctcggaaactctgttggatctcagagacatcaatgtgaccatcctggttccggtcaagactgtgaaacatgagcagcagacgctgttcccgctcctgcagatagcgggaaaattcctccaggtcgagcccgccatctgggtcagcatcaccctcagaggagataccctgttgggcgccggggtctgggttgcccccgcccagcctggccagcccctggcgcaactcgtgcacgtccacgcggccatccttgttactgtccagctcctcgaacaggcgaccccagcgctgccgccgctccgcgtcgcccgggctcccccgcatggcgcccgcccgggggggaggggaggcccggcagcggcggcctcagtgggggcttcgcggctnnnnnnnnnnnnnngggaccccgcagggtcagctcccgcggccgccggctccgcagcctccgcgcagtccgctcggctctggcacttgcgggaggtggtgacccgctctcgacgaattcgagctcggccgatttggcctgatnnnnnnnnnnnnnnnnnnnnnnnnnnnnnnnnnnnnncgccgccaccgcgtacagcgcgattcccctatatgatctatcatcc

SEQ ID NO: 350701 - DNA, 575 bp, Homo Sapiens
acccagcctgtccctaggctgggtatcgctatgtctcattggttggggcataggagtcttaggattcaggatctggatgctgggatcccatgaccctatgtttgggaaataggagtctaggagccaggatctgggtactgggatctcttggccaaagagtagggatcctgtggttggatcatcagtctccagtggctgaggtgtggggggtgagggattggggggacgggctccgggtccctcacctggacgtgacccccaaggcctgcttcatgttctcgtagaccacataggagatgctcacagctggaataaccttcatgaagttgggggcgatcccccggtagaggccccgcatgccctcctgggacaggatgtgacgtagcagacccagcatggacagctgggggccaccctcgatggaggcttgtgcctgcatgcgggtccggaccagggccagcgggtaactggcatatctggccgcaggtgcaggatatggtaccgcagcacaggagcacgaggatgcctgggtctgccgagtcgtggctgtactgctgaagccaccagttcaacca

SEQ ID NO: 350702 - DNA, 608 bp, Homo Sapiens
  misc_feature (232)..(232): n is a, c, g, or t
actgccgcggcgacagcagggactggtggaatcccgatgtggctgaggggccgccaccgccagcagggaggcggagagctagcgagccaagcggtggggacgccgctgccttcctctttgcctgtctcgccgccctcctagacacgctcctcatctacggatcctaccctccccgctcttgcaagcattcactcggccggtcgcctgctgaccctccttcgccacaggctcngtagcggaggcagcagcgaggtgtccgatttgggcacgtgaggcccgcgatccccggcggtggacgccaggcatgggaatgaagacccccaacgcacaggaagccgaaggacaacaaaccagggcagctgcaggacgggccactgggtctgcaaacatgacaaagaaaaaagtctcccaaaagaagcagagaggccgaccttcatcccagccccgcagaaacatcgtgggctgcagaatttctcatggatggaaggaaggagatgagcccatcacgcagtgaaaaaggaaccgttctggatcaggtgcctataaatccctctctttatctggtgaaatatgatggaattgactgtgtctatggactggaacttcac

SEQ ID NO: 350703 - DNA, 574 bp, Homo Sapiens
atgacaaagaacaaagtctcccaaaagaagcagagaggccgaccttcatcccagccccgcaggaacatcgtgggctgcagaatttctcatggatggaaggaaggagatgagcccatcacgcagtggaaaggaaccgttctggatcagcttctagatgattataaggaaggtgacctccgcatcatgccagaatccagtgagtctcctccaacagagagggagccaggaggagttgtagatggcctaataggtaagcatgtggaatataccaaagaagatggctccaaaaggatcggcatggtcattcaccaagtggaagccaaaccctctgtgtatttcatcaagtttgatgatgatttccatatctatgtctacgatttggtgaaaaagtcctaactgttagggtaaaatttggcacatgtgtggaaacaaatgtataatttgtagacatgcaaaaaatgttgcctttcagtgtattgaaagcttatggaatccctgataactaaacatctttgccagcattaactgttgttttgctctaaaaaatacaaacttgtgtgtacatgaaaaaaaa

SEQ ID NO: 350704 - DNA, 716 bp, Homo Sapiens
ccctcttaagttcctttggctgtggggaaggctgggtggttcagtagagctgtctggggttaggaactctgcagaagtggctgggccacctcctcctagctcagagcccactgccctcccggaaccccttgctaccactggcgtccacttccaatccccttgcaaagaggccttgaccggcacccactgccctccttccctgagcgtcccagctgctgtccacgacaccccctgcctaccctaaccacttctctggtacccaccgcccttgcttcccggcgctcaccttcaaatccttgtctggctcccgttcctacccccttttcatgttgctcaccgcactcccccaccccacccttgcctggcgcccaactccaccccatgtctcctgctggattccttcccatccccctctccattctggcgcccactaatggccttgccctgcctggcgtccaccgccggggatcgcgggcctcacgtgcccaaatcggacacctcgctgctgcctccgctacgagcctgtggcgaaggagggtcagcaggcgaccggccgagtgaatgcttgcaagagcggggagggtaggatccgtagatgaggagcgtgtctaggagggcggcgagacaggcaaagaggaaggcagcggcgtccccaccgcttggctcgctagccctccgcctccctgctggcggtggcggcccctcagccacatcgg

SEQ ID NO: 350705 - DNA, 696 bp, Homo Sapiens
ctggtccgagggcagcccgaatatgtccctgggtgtgggtatgggtgtggggcaatttgggtgggagcagcgtggaggctcccaggaccaagtcctgcgcctctttggcggggtgtgtgcaggaggaggggggatgaataggaggctccctcctcccggcgacattcacggagccggccggcctcccgccctgggtgtttccctgccttgtagccagggtgccagcctgggaaatagtttcgtttccttctgcctccgggattagtttccaggcaccctctcaggcgcccgaggcccgggaagggggcgaagaaggagggagacttgtctaggggctgcccggcccggcagagcggggttgatggaccgggccgcccggtgcatggcggcgccagactccctgccacgtgctcctggcccttgccctgggtctagtgatccttcactgtgtggtggcagatgggaattccaccagaagtcctgaaactaatggcctcctctgtggagaccctgaggaaaactgtgcagcgacatctcgaatcagcgatgcacacttggcagacacaatgattggcaaagcagtggaacatatgtttgagacagaggatggttctaaagatgagtggaggggaatggtcttagcacgtgcacctgtcatgaacacatggttttacattacctatgagaaagaccctg

SEQ ID NO: 350706 - DNA, 1167 bp, Homo Sapiens
agcgggtctggctcaggctggggccggcgggagcgcgaacgagcgacggcggaacccgtgggcctgtggactgcagcctcggcggtcagcagagtgcttgtgatttcacgtatttttgctgaactcgtaaaagagacacttggatggtggattaaccagaacactaacattctgtgaaaagtttcaaattggagaatattgaattttcaccctagtccagcagctccgctgctcacttaaatacagatgaatgaagaccccattcggaaagacacctggccagcggtccagagctgatgcaggccatgctggagtatctgccaacatgatgaagaagaggacatcccacaaaaaacatcggagcagtgtgggtccgagcaaacctgtttcccagccccggcggaacatcgtaggctgcaggattcagcatgggtggaaagaggggaatggccctgttaaccagtggaaaggaaccggtctggaccacgtgcacctgtaatgaacacatcgttgtacattacaaaataagaaagaccctgactgtgtacatggaccaaaacttaataaagatgaacaaagaagccgaccttcgaagtactacctgatacaaatgagacacctccagcagaaagcgaaccacgagaagtagcagacacaatgataggcaaacaagtggaacatatgcttcagacagaagatggctcgaaagaggactggacggggaatggtcttagcacgtgcacctgtcatgaacacatggttttacattacctatgagaaagaccctgtcttgtacatgtaccaactcttagatgatcacaaagaaggcgaccttcgcattatgcctgattccaatgattcacctccagcagaaagggaaccaggagaagttgtggacagcctggtaggcaaacaagtggaatatgccaaagaagatggctcgaaaaggactggcatggtcattcatcaagtagaagccaagccctccgtctatttcatcaagtttgatgatgatttccatatttatgtctacgatttggtgaaaacatcctagatgtcatcacaaactctgccaaatttgtggaactatgaaatgtattatttgtagacataaagacttgattgctttccagtttaatgaaagcttaaatgtcctgtggaaaagta

SEQ ID NO: 350707 - DNA, 730 bp, Homo Sapiens
  misc_feature (682)..(682): n is a, c, g, or t
ggaatttttctacttaaatggtttgattgatacaatgagaggttacagggatctaaggaagtctaggcagtaatctgtcgaagctgctggagaggatgacgaaatggggcgaggaggcaagatgcgggggcctttccatagcaagaaaatactgaatgcactgccataatgtaaatatgagagttacacagacaaagcaaggcaaataccaaagagaatcaggaaagaatgccctgaagatatgcattaaaactgttctctgaaattaagcttgtcttgtgaggattcatctgaaaatgagagtcaaccactaaggagaccctgtatgaaaagaacccacgcgaattagagaaaagatagatgatggcagctaagacaggagagggacatgtgagttgggccagggtacagaaaatgcagtgtggcaaagggcagagtgggaaaggtgggagggagctgccaggtctcaaccacctgggggagaccatgacaaagtaagagacacttatgaggtatttccagaaagctttgttagaataataattaaagaaaagggtatgtcactagggcaaaagattagaaagaaggcaaaagagatggatctgtacaggctaactgcagcagtctatgcaggtctggactgaactgagaagcaatgggtgcagcatatgtgtgtaggacnatcgaggaaagctgggcagttgagttgccaaaataagcaatacacacc

SEQ ID NO: 350708 - DNA, 1870 bp, Homo Sapiens
gttaatggggtgtctgagctcagccctgaccctcctcaggctgcagccatcaatgtcagcaccagccatgaagtgccctctgctgtccctgtggtgcaccaggtgagccgggcatccaacagcatcacggtgtcctggccgcagcccgaccagaccaatgggaacatcctggactatcagctccgctactatgaccaggcagaagacgaatcccactccttcaccctgaccagcgagaccaacactgccaccgtgacacagctgagccctggccacatctatggtttccaggtgcgggcccggactgctgccggccacggcccctacgggggaaaagtctatttccagacacttcctcaaggggagctgtcttcccagcttccggaaagactctccttggtgatcggctccatcctgggggctttggccttcctcctgctggcagccatcaccgtgctggcggtcgtcttccagcggaagcggcgtgggactggctacacggagcagctgcagcaatacagcagcccaggactcggggtgaagtattacatcgacccctccacctacgaggacccctgtcaggccatccgagaacttgcccgggaagtcgatcctgcttatatcaagattgaggaggtcattgggacaggctcttttggagaagtgcgccagggccgcctgcagccacggggacggagggagcagactgtggccatccaggccctgtgggccggggggcgccgaaagcctgcagatgaccttcctgggccgggccgcagtgctgggtcagttccagcaccccaacatcctgcggctggagggcgtggtcaccaagagccgacccctcatggtgctgacggagttcatggagcttggccccctggacagcttcctcaggcagcgggagggccagttcagcagcctgcagctggtggccatgcagcggggagtggctgctgccatgcagtacctgtccagctttgccttcgtccatcgctcgctgtctgcccacagcgtgctggtgaatagccacttggtgtgcaaggtggcccgtcttggccacagtcctcagggcccaagttgtttgcttcgctgggcagccccagaggtcattgcacatggaaagcatacaacatccagtgatgtctggagctttgggatactcatgtgggaagtgatgagttatggagaacggccttactgggacatgagtgagcaggaggtactaaatgcaatagagcaggagttccggctgcccccgcctccaggctgtcctcctggattacatctacttatgttggacacttggcagaaggaccgtgcccggcggcctcattttgaccagctggtggctgcatttgacaagatgatccgcaagccagataccctgcaggctggcggggacccaggggaaaggccttcccaggcccttctgacccctgtggccctggactttccttgtctggactcaccccaggcctggctttcagccattggactggagtgctaccaggacaacttctccaagtttggcctctgtaccttcagtgatgtggctcagctcagcctagaagacctgcctgccctgggcatcaccctggctggccaccagaagaagctgctgcaccacatccagctccttcagcaacacctgaggcagcagggctcagtggaggtctgagaatgacgatacccgtgactcagccctggacactggtccgagaagggacatgtgggacgtgagccgggctccaacagcctctgtgagagatgccccacaccaaacccaaccctcccgatggctgcattccctggtcctccgcctctccaccagccccctcctcattaaagggagaagaaagggatattt

SEQ ID NO: 350709 - DNA, 1258 bp, Homo Sapiens
  misc_feature (7)..(7): n is a, c, g, or t
gcccgcngctgccgccgcgcttctacccgcgctacgtgctaccgctccccttcggcaagtacttcgcgtccgtgtcagcgcacgtcagcatctggaaggtgcccgtgtcctatgcacacaccgtcaaggccaccatgcccatctgggtggtcctcctgtcccggatcattatgaaggagaagcagagcaccaaggtcttgcgagattcacggatccaccatctccggctgctcaacatcctgggctgccacgccgtcttctttatgatccccacctgggttctggtggacctctcggctttcctggtcagcagcgacttgacctacgtctaccagtggccctggacgctcctgctcctggctgtcagcggcttctgtaactttgcccagaatgttatcgccttcagcatcctcaacctcgttagccccctgagctactcggtcgccaatgccaccaaaagaatcatggtcatcacggtgtccctgatcatgctgcgcaacccagtcaccagcaccaacgtcctgggcatgatgaccgccatcctgggggtcttcctctataacaagaccaagtacgatgcaaaccagcaagccaggaagcacctcctccccgtcaccacagcagacctgagcagcaaggagcgtcaccggagcccactggagaagccccacaacggcctcctcttcccccagcacggggactatcagtacggccgcaacaacatcttaacagaccacttccaatacagccggcagagctacccaaactcgtacagtttgaaccgctatgatgtgtagagtccaaaggacaggaccagactgttggtgactccttccccggcccccacagcagtatcagaaacttctgacaatcagtgaatgtacaacccagccgaggggacggtgcataactctccatcagaagccctggggttcctggccccccgtgagccgcaggaggatgcgttgcctgcagtgcagacggccgtgagctctgggcaaactaaacagagaccagtgtctcatgctctttcttcctggagtctgtcatctgaagggccgtgtccctgcggagatcttggccacgttgtaacctttccatgtggaattattcccccaagcagtgtagctcagagcacttgtgtctgcattccagataacattcaggacctgtgtgaaaagctggggtcactgtggctgtagaccatgaactggcagtgggggtgtccagatcataacggacttggggaccgtacagc

SEQ ID NO: 350710 - DNA, 2047 bp, Homo Sapiens
  misc_feature (1109)..(1359): n is a, c, g, or t
  misc_feature (1361)..(1382): n is a, c, g, or t
  misc_feature (1677)..(1877): n is a, c, g, or t
  misc_feature (1972)..(1977): n is a, c, g, or t
  misc_feature (1980)..(1981): n is a, c, g, or t
  misc_feature (2010)..(2011): n is a, c, g, or t
gctacccaaactcgtacagtttgaaccgctatgatgtgtagagtccaaaggacaggaccagactgttggtgactccttccccggcccccacagcagtatcagaaacttctgacaatcagtgaatgtacaacccagccgaggggacggtgcataactctccatcagaagccctggggttcctggccccccgtgagccgcaggaggatgcgttgcctgcagtgcagacggccgtgagctctgggcaaacctaaacagagaccagtgtctcatgctctttcttcctggagtctgtcatctgagggccgtgtcctgcggagatcttggccacgttgtacctttccatgtggaattattccccaagcagtgtagctcagagcacttgtgtctgcattccagataacattcaggacctgtgtgaaaagctggggtcactgtggctgtagaccatgaactggcagtgggggtgtccagggcggtgcttgagaacgtcagactggctagtttaattccctggcgcagatacgcataggaccaacagggtcaccaagcagacagggagcccgcgagaatcattcaaaacatccccagccacagagatggatccagtttcctggtcatccccttagcagttcacaagttcctggcaaatgttccaaagcaaaaagcgattgcaattagcatccagttcctgcagcctggtgctctgccctgcacgtcagggttggcatccacccagatccagatggaagggaaacttctctcttctcctttgcctcctcttccctcaccagagcagggcgcttctcttggggtggtgagaaggatcttcgagaaatcgtgttcagtatttcaagctctatttctgtggcacatgtcttttgagaggcatcttcacctcttctgtgatgacttggtatgttgtttggtagagagatcttgattttcggaggatcttgcatttttctagggaatattttgtagttgtgtgtgtgtgtttttgccttggtccccattatgggatgcattaggactggcctatgcatcgaaaatctttttgtttgtaaacgtttaaaaacaaagttccccggccaggcacagtggctcacacnnnnnnnnnnnnnnnnnnnnnnnnnnnnnnnnnnnnnnnnnnnnnnnnnnnnnnnnnnnnnnnnnnnnnnnnnnnnnnnnnnnnnnnnnnnnnnnnnnnnnnnnnnnnnnnnnnnnnnnnnnnnnnnnnnnnnnnnnnnnnnnnnnnnnnnnnnnnnnnnnnnnnnnnnnnnnnnnnnnnnnnnnnnnnnnnnnnnnnnnnnnnnnnnnnnnnnnnnnnnnnnnnnnnnnnnnnnnnnnnnnnnnnnnnnncnnnnnnnnnnnnnnnnnnnnnnccaagttcccactggtgatgcctgtctgacacgttttggtatttagtaggaaatgaagtgtttcgaagcttcgagagaagcttcaaaattgtcacaattgctgaaaacagaatgaatcgtgaacattatctcaatattttgtataatagacaagaccacagtgtttcggttccctgacctgttcttgtctttatgttaggatctgaatcatgttctgggtaaggggacgaggagcgaacactgcactaagatttggtttgccaaatcagattctttggtcaagagtcagtttggnnnnnnnnnnnnnnnnnnnnnnnnnnnnnnnnnnnnnnnnnnnnnnnnnnnnnnnnnnnnnnnnnnnnnnnnnnnnnnnnnnnnnnnnnnnnnnnnnnnnnnnnnnnnnnnnnnnnnnnnnnnnnnnnnnnnnnnnnnnnnnnnnnnnnnnnnnnnnnnnnnnnnnnnnnnnnnnnnnnnnnnnnnnnnnnnnnnnnnnnnaggggggagggtttcagccgaagctgaagattcgcgcccactggcactcccaagcccttgggtggcccgaaaatggaaaactcctggtcctcccnnnnnnagnngggcgccagaaaagaagcacaacgaacannaaaaaacatggtttccggggccccgccctcttcccg

SEQ ID NO: 350711 - DNA, 812 bp, Homo Sapiens
  misc_feature (351)..(351): n is a, c, g, or t
  misc_feature (747)..(747): n is a, c, g, or t
  misc_feature (763)..(763): n is a, c, g, or t
ggatagtctggataagctggagtgtagattcaagctgaattcctacaagatggtgtatgtgatcaaatcagaggactatatgtatcggaggaccgccctgctccgggctcatcagtcccatgagcgtgtaagcaagcgtctacatcagagattccaggcctgggtagataaatggaccaaggagcatgtgccccgtgaaatggcagcagagaccagcaagtggctcatgggtgaggggctggagggcctggtgccctgtaccaccacctgtgatacagagaccctgcattttgtgagcattaacaagtatcgtgtcaaatacggcacaatattcaaacccccttaactgcnaaacccagaccagaaaacttggggtgtgtgtgggaaagtgtgtgtgggcctatgcactcacacactgaagaaacaaggaagatgcctttcaagcctcactgggcctctctgggacatggccacctgacctgtgtgtggctggtgcagcctggcaccaagtgggctacctgttaggaacatgaataccttacaaagctgaagctggaacttttcccaaagggttttgggtatagcctgccctggaggggaaggaagtccatgcaagcaaagacatgcagtttgcttgcacacaccagcagagctaagactggagtctcctgtggcctaactttcaatgagggaaccggatgctgttcacactttgactggatggagatgcatttacaaaacagactnggagaaggacttaatnacttcagatggattggaactatcatggtcactgcaccctctcccctccc

SEQ ID NO: 350712 - DNA, 1647 bp, Homo Sapiens
  misc_feature (25)..(26): n is a, c, g, or t
  misc_feature (1639)..(1639): n is a, c, g, or t
tctgcagacacaagtgctgtccagnncagaagcctggagtccaaatcagccttatccctcctcatgcccacagtcagcccaatgctgtctccgttccatgggccagcacaggcaggcgccactctgctgacatgaggacctggggtagctcagacatttgactacccaagcccagaaaggagctgggtccagcccttacggggaattcctttaattcccccaggccaggtgagtgctgactcagtgatgacaacagctgtagaagtaggggtttggcttctggcccagatccacgcccttgtcctctgtcatcacctggaaggcagccacactgacgtaatcctctgccactttctggaagagctcgtctggcaggaaaaatgatgatcagcgagggcccaatgccagtagccctgggatctcccagtgacccagccctctgtgccctattcagcttcctctggtgcccctgcatgttcctgctgtgaggctccagcacagacactcacccacactctggcctgtcttgctggatgtttcaaagagctgagctttgatatctgtaaagagaagtgacgtaaagcctcatacctgagaattagataaatcagacaaaagggagggctagcagttcagggagtctcctggaccccacagttcaaggaggccaggaagacctcctagagcaccttgccctggcagccaaggcagtccctattttctttgatccacccagacagccacacacccccacccccccaaagggctgaggagcagctactgtctgcatagtcctggacgtcgtggaagtccacacgtcgacgcctccggtcttcttccagcaggtcactcttggtgccacataagtagatttggcagccctcctctaagctgcgcagttccttcaccccagaaatttgctcgctcaaagctgctgctgtctgtgaggtccaaatacctaatgtcacagtccggtctccgaccgacatcaccttggccacgaaggcggccccgatggtctgcaacgagagggaagagatcggggccataggtgcagattaccggccccccactcccccgcccaccgtgcctggcccctccggatgcactcacgttctgataaggccccaccagaaagcggtcgtgcacgtagcgctccaccaggctagtcttgcccacgtactccttgcccagcatcaccaccttgacgtccacgcgctgcccgctcatgctcccggggccgcttcagccacgtcagggtcctgagcggggacgggaggcaaaccccgatctccgctcggcccaggcagcgcccaagcctcagaccccgaccccaaacggcgccaacctacgactccagacagcgcgtcgggctcgagctctggccgtggccttgcacttcggcagcgccccgtgtgcccccgctgttcggccccgggcgccgattatccttcgaagaccccaagcctcggggcggcctgggagcgcgcgggacagcgtcctcaacagcgcagcacgccgccgtgcagctcgctactccgtcattcgctcgcctgcccggcttaagctccgttctggctgggaatcccaaccgaacctggggtctcccgcaacccggctcctacccgcagcgccgcgnctcccgcg

SEQ ID NO: 350713 - DNA, 1379 bp, Homo Sapiens
ggctggtacggtctggaagttaggatcgcccctcgccctctagccccctcccgcgggagtcgcggcgctgcgggtaggagccgggttgcgggagaccccaggttcggttgggattcccagccagaacggagcttaagccgggcaggcgagcgaatgacggagtagcgagctgcacggcggcgtgctgcgctgttgaggacgctgtcccgcgcgctcccaggccgccccgaggcttggggtcttcgaaggataatcggcgcccggggccgaacagcgggggcacacggggcgctgccgaagtgcaaggccacggccagagctcgagcccgacgcgctgtctggagtcgtaggttggcgccgtttggggtcggggtctgaggcttgggcgctgcctgggccgagcggagatcggggtttgcctcccgtccccgctcaggaccctgacgtggctgaagcggccccgggagcatgagcgggcagcgcgtggacgtcaaggtggtgatgctgggcaaggagtacgtgggcaagactagcctggtggagcgctacgtgcacgaccgctttctggtggggccttatcagaacaccatcggggccgccttcgtggccaaggtgatgtcggtcggagaccggactgtgacattaggtatttgggacacagcaggctctgagcgctatgaggccatgagtagaatctactatcggggtgccaaggctgccatcgtctgctatgacctcacagacagcagcagctttgagcgagcaaagttctgggtgaaggaactgcgcagcctagaggagggctgccaaatctacttatgtggcaccaagagtgacctgctggaagaagaccggaggcgtcgacgtgtggacttccacgacgtccaggactatgcagacaatatcaaagctcagctctttgaaacatccagcaagacaggccagagtgtggacgagctcttccagaaagtggcagaggattacgtcagtgtggctgccttccaggtgatgacagaggacaagggcgtggatctgggccagaagccaaacccctacttctacagctgttgtcatcactgagtcagcactcacctggcctgggggaattaaaggaattccccgtaagggctggacccagctcctttctgggcttgggtagtcaaatgtctgagctaccccaggtcctcatgtcagcagagtggcgcctgcctgtgctggcccatggaacggagacagcattgggctgactgtgggcatgaggagggataaggctgatttggaccccaggcttctgccctggacagcacttgtgtctgcagattatttaagtggcttttgatctgtaaataaaatcagtgcactgtgaatcacaaaaaaaa

SEQ ID NO: 350714 - DNA, 1293 bp, Homo Sapiens
  misc_feature (102)..(294): n is a, c, g, or t
aaacagagtctccgatcttttcgcggcagggttggaatttggtggttccaatccgcggctccaatgcaaccttccgctttcccaggtttcaagtgattttcnnnnnnnnnnnnnnnnnnnnnnnnnnnnnnnnnnnnnnnnnnnnnnnnnnnnnnnnnnnnnnnnnnnnnnnnnnnnnnnnnnnnnnnnnnnnnnnnnnnnnnnnnnnnnnnnnnnnnnnnnnnnnnnnnnnnnnnnnnnnnnnnnnnnnnnnnnnnnnnnnnnnnnnnnnnnnnnnnnnnnnnnnnnnnnnnnccaagtatgaatattaaataccactggtggtgccttgaagccctttcccatggggattgaagaaaaaccacagttaagactcaaagtaggggacaaatagcttggttgtaggccattgacgtgatccctgaaagattgtttgaacaatgttacccacaaccatccaaacttattaggaaggataaagattttctaaagctatattgaggtgaagagaagagactattcctccaactcaacgtggggatgaaaaaaaggtaaaaaccagagtttacaaaaattcacttttaatattcaaatgaaagcaacccccttctcctgcctctctgaacatggccagcatttcagacaccctaccacctcccaggctctggctgcctgataaaaaaatcccaatttttgccaaaacctcaaataccacaaaacactaaaagaacagatgtgagcaacttattaaagttctacatttagtagctgatggacacataaggctttcaagaagacactcttctcttcacaacatattaaataagtcctagcacaactgactgcttccaaaactaccacccaagcgtgccaccactcttggctgaacagaaactcttcctcatgacaagggcactatgctgatttcagcagaactgaaggaccacgactctcccagaatatctgtatttttacctctcagacttctcctgcaatgtcctaatgatcatgtaaatagtcttcaatgagaaacaggacatcaaaccttccaaacaggcagaaaatgctctgctaataccatgggagagggtgatcagtttttggcagaacaaaatggcatcaccaccttagtactgaaattagtaggagtaatagaacaatttctcctcaaatataatggctaggatcatacctaaaacccactggcctctaccatgagtgaaagaaaaggagacaataggcttgattgtacaatcccctcagtatacgtgtgtcaggtacacagagaaaaga

SEQ ID NO: 350715 - DNA, 3314 bp, Homo Sapiens
aaaaaaacccagatctctggcggcggcaaggggacagcactgagctctgccgcctggctctagccgcctgcctggcccccgccgggactcttgcccaccctcagccatggctccgatatctctgtcgtggctgctccgcttggccaccttctgccatctgactgtcctgctggctggacagcaccacggtgtgacgaaatgcaacatcacgtgcagcaagatgacatcaaagatacctgtagctttgctcatccactatcaacagaaccaggcatcatgcggcaaacgcgcaatcatcttggagacgagacagcacaggctgttctgtgccgacccgaaggagcaatgggtcaaggacgcgatgcagcatctggaccgccaggctgctgccctaactcgaaatggcggcaccttcgagaagcagatcggcgaggtgaagcccaggaccacccctgccgccgggggaatggacgagtctgtggtcctggagcccgaagccacaggcgaaagcagtagcctggagccgactccttcttcccaggaagcacagagggccctggggacctccccagagctgccgacgggcgtgactggttcctcagggaccaggctccccccgacgccaaaggctcaggatggagggcctgtgggcacggagcttttccgagtgcctcccgtctccactgccgccacgtggcagagttctgctccccaccaacctgggcccagcctctgggctgaggcaaagacctctgaggccccgtccacccaggacccctccacccaggcctccactgcgtcctccccagccccagaggagaatgctccgtctgaaggccagcgtgtgtggggtcagggacagagccccaggccagagaactctctggagcgggaggagatgggtcccgtgccagcgcacacggatgccttccaggactgggggcctggcagcatggcccacgtctctgtggtccctgtctcctcagaagggacccccagcagggagccagtggcttcaggcagctggacccctaaggctgaggaacccatccatgccaccatggacccccagaggctgggcgtccttatcactcctgtccctgacgcccaggctgccacccggaggcaggcggtggggctgctggccttccttggcctcctcttctgcctgggggtggccatgttcacctaccagagcctccagggctgccctcgaaagatggcaggagagatggcggagggccttcgctacatcccccggagctgtggtagtaattcatatgtcctggtgcccgtgtgaactcctctggcctgtgtctagttgtttgattcagacagctgcctgggatccctcatcctcatacccacccccacccaagggcctggcctgagctgggatgattggaggggggaggtgggatcctccaggtgcacaagctccaagctcccaggcattccccaggaggccagccttgaccattctccaccttccagggacagagggggtggcctcccaactcaccccagccccaaaactctcctctgctgctggctggttagaggttccctttgacgccatcccagccccaatgaacaattatttattaaatgcccagccccttctgacccatgctgccctgtgagtactacagtcctcccatctcacacatgagcatcaggccaggccctctgcccactccctgcaacctgattgtgtctcttggtcctgctgcagttgccagtcaccccggccacctgcggtgctatctcccccagccccatcctctgtacagagcccacgcccccactggtgacatgtcttttcttgcatgaggctagtgtggtgtttcctggcactgcttccagtgaggctctgcccttggttaggcattgtgggaaggggagataagggtatctggtgactttcctctttggtctacactgtgctgagtctgaaggctgggttctgatcctagttccaccatcaagccaccaacatactcccatctgtgaaaggaaagagggaggtaaggaatacctgtccccctgacaacactcattgacctgaggcccttctctccagcccctggatgcagcctcacagtccttaccagcagagcaccttagacagtccctgccaatggactaacttgtctttggaccctgaggcccagagggcctgcaagggagtgagttgatagcacagaccctgccctgtgggcccccaaatggaaatgggcagagcagagaccatccctgaaggccccgcccaggcttagtcactgagacagcccgggctctgcctcccatcacccgctaagagggagggagggctccagacacatgtccaagaagcccaggaaaggctccaggagcagccacattcctgatgcttcttcagagactcctgcaggcagccaggccacaagacccttgtggtcccaccccacacacgccagattctttcctgaggctgggctcccttcccacctctctcactccttgaaaacactgttctctgccctccaagaccttctccttcacctttgtccccaccgcagacaggaccagggatttccatgatgttttccatgagtcccctgtttgtttctgaaagggacgctacccgggaagggggctgggacatgggaaaggggaagttgtaggcataaagtcaggggttcccttttttggctgctgaaggctcgagcatgcctggatggggctgcaccggctggcctggcccctcagggtccctggtggcagctcacctctcccttggattgtccccgacccttgccgtctacctgaggggcctcttatgggctgggttctacccaggtgctaggaacactccttcacagatgggtgcttggaggaaggaaacccagctctggtccatagagagcaagacgctgtgctgccctgcccacctggcctctgcactcccctgctgggtgtggcgcagcatattcaggaagctcagggcctggctcaggtggggtcactctggcagctcagagagggtgggagtgggtccaatgcactttgttctggctcttccaggctgggagagcctttcaggggtgggacaccctgtgatggggccctgcctcctttgtgaggaagccgctggggccagttggtcccccttccatggactttgttagtttctccaagcaggacatggacaaggatgatctaggaagactttggaaagagtaggaagactttggaaagacttttccaaccctcatcaccaacgtctgtgccattttgtattttactaataaaatttaaaagtcttgtgaatc

SEQ ID NO: 350716 - DNA, 977 bp, Homo Sapiens
  misc_feature (219)..(219): n is a, c, g, or t
cggcccccgcgtgaaccccctgggcgcgcgggggctcattctccccgtccaaggttcttggtcctggggtgtgcccgagccaaaaaggggggccacaagggacactattctccctcgggctgggggaggaccccttgggagccctctgggtgagagggctccctggggtggaccgggcgccccccaggagtccttgcctcagccccagaggctgggccncaggttggttggggaccagaactctggccacgggccggcaagtgggagacgggaggcactcgggaaaagctccggaccacaggccctccatcctgagcctcggcatcggggggagcctggtccctgaggaaccagtcacgcccgtcggcagctctggggaggtcccgcagggccctcatgctgcttcctgggaagaaggagtcggcatccaggcgtaatgctttcgccacgaggcttcgggctccaggacacacagactcgtccatgcccccggcggccaggggtggtcctgggcttcacctcgccgatctgcttctcgaaggctgccgccatttcgagttagggcagcagcctggcggtccagatgcgtgcatcgcgtccttgacccattgctccttcgggtcggcacagaacagccatgtgctgtcatcgtctccaagatgattgcgcgtttgcccgcatgatgcctggcttcatgttgatacgtggatgagcaaagctacaggtatctttgatgtcatccttgctgcacggtgatgtggcatttcgtcacaccgtggtgctgtccagccagcaggacagtcagatggcagaaggtgcccaagcggagcagccacgacagagatatcaggagaccatgggctgagggtgggcaagagtcccgggcgggggccaggcaggcggctagagccaggcggcagagctcagcctcgtgccgaattcaccacccaggcctcgctacctagccgtatgtttct

SEQ ID NO: 350717 - DNA, 491 bp, Homo Sapiens
  misc_feature (28)..(28): n is a, c, g, or t
tcccttcaaaaaaagggtgccttggaangaaaggaaaacccaaactctggtccccaataaaaaagcaaaaaccctgtgcctgccccttgccccaccctggccccctgcaactccccctgctgggtgtgccgcagccatattcaggaaagctcagggccctggcctcaggtggggtcactctggcagcctcagagagggtgggagtgggtcccaatgcactttgttctggctcttcccaggctgggagagcctttcaggggtgggacaccctgtgatggggccctgcctcctttgtgaggaagccgctggggccagttggtcccccttccatggactttgttagtttctccaagcaggacatggacaaggatgatctaggaagactttggaaagagtaggaagactttggaaagacttttccaaccctcatcaccaacgtctgtgccattttgtattttactaataaaatttaaaagtcttgtgaaaaaaaa

SEQ ID NO: 350718 - DNA, 1866 bp, Homo Sapiens
gctgggtgggcgaagcggcacgagggtgccggccagctcaccagtcatggagcaggtcctcctctcactcgtagagggcaaggacctcagcatggccctgccctcagggcaggtctgccacgaccagcagaggctggaggtgatctttgcagacctggctcgccggaaggacgagcgcccagcagcgcagttgggcactatatgaggatgagggtgtcatccgctgctacctagaggagctgctgcatattctgactgatgcagaccctgaagtttgcaagaaaatgtgcaagagaaacgagttcgagtctgtcctggccttggtggcctattaccaaatggaacaccgagcatcactgcggctgctgctcctcaagtgctttggcgccatgtgcagcctggatgcagccatcatctccacgcttgtgtcatccgtgctgcctgtagagctggcgagggacatgcagacagacacgcaggaccaccagaaactctgttactctgccctcatcctggccatggtcttctccatgggagaggcagtgccctatgcacactatgagcacctgggcacgcctttcgcccagttcctactgaacatcgtcgaggatgggctgcccttggacaccacagagcagctgccggacctctgcgtgaacctgcttctggctctcaacctgcacctgccagctgctgaccagaatgtcatcatggctgccctgagcaaacacgccaatgtcaagatcttctccgagaagctgttgttgctcctgaacagaggggatgaccctgtgcgcatcttcaaacatgagccacagccaccacactctgtcctcaagttcctgcaggacgtgtttggcagcccggccacagctgccatcttctaccacacagacatgatggctctcattgacatcactgtgcggcacatcgcagacctgtcaccaggagacaagctgcgcatggagtacctctccctgatgcatgctatagtccgcaccacaccctacctgcagcaccgccaccggctacccgacctgcaggccatactgcgacgcatcctgaatgaggaggagacctcaccccagtgccagatggaccgcatgattgtccgagagatgtgcaaggaattcctggtgctgggggaggctcccagctagcaccttgctgtcctcccttccctgcagctccagtcagtgtgcaggggactcaggggcttggccctaagaatgttttgcactgacagtgggaggggataaggtggcagaagaaacctgagcaggacccccacctgaagtagaacttaagagaggggccaagtgtaggattggggaccatggtctgggagctgttctgcggcagggggaatatgcaagctaaagcccctctataccctggtaggcttcctcttcagcatgcccccctcttcaccccacacccatgtgtacactcagagtcctgctgccgctccaggctggaccagacccccatccccacccctcctggtctgtatcctgggcctcagcaagccatgcccctggggtgaggggaggcatctcccaccagctctattctttgccttagctttgcagtgagtgctgctcatgtcctcccctccacccgcacatgggggtcgctgcccttcactcctacccccagaggccttggccaagctgctgctttgaaagcgggatcttggagacaggccatccatcctggagcctcatggaacaggatgatggcactgagaaagccaatgaccgaatctcttttctctgtaaaaatgtagactgaaaagccatgtgtattttcctatgtgctgtagctctcctttggaaataaatcacaggcatctggaaacaggcc

SEQ ID NO: 350719 - DNA, 848 bp, Homo Sapiens
agtcgcgtgtgctgtggctcatgtttgaagatgcgcacagggtcatcccctctgttcaggagcaacaacagcttctcggagaagatcttgacattggcgtgtttgctcagggcagccatgatgacattctggtcagcagctaaggaaggacatgggtatagacagggtgctgagcctgagagccaccatgtgctcagccaccgcccagccaggccccaccccacctggcaggtgcaggttgagagccagaagcaggttcacgcagaggtccggcagctgctctgtggtgtccaaggcagcccatcctcgacgatgttcagtaggaactgggcgaaaggcgtgcccaggtgctcctgcgtgtctgtctgcatgtccctcgccagctctacaggcagcacggatgacacaagcgtggagatgatggctgcatccaggctgcacatggcgccaaagcacttgaggagcagcagccgcagtgatgctcggtgttccatttggtaataggccaccaaggccaggacagactcgaactcgtttctcttgcacattttcttgcaaacttcagggtctgcatcagtcagaatatgcagcagctcctctaggtagcagcggatgacaccctcatcctcatatagtgcccaactgcgctgctgggcgtcgtccttccggcgagccaggtctgcaaagatcacctccagcctctgctggtcgtggcagacctgccctgagggcagagccatgctgaggtccttgccctctacgagtgagaggaggacctgctccatgattggtgagctggccggcaccgaggcctggctagacccaggagagtatgcttggtggctaga

SEQ ID NO: 350720 - DNA, 1459 bp, Homo Sapiens
agtcgccctggctgcgaagcttgaatgatgcttgttctgttcattcttgcattacattcaggtccgggtttctgggggatccccaaagcctgaagctgtatccattagggtgggactctggggcttcgggggtaaccgcttcatggggtggtgctctccacacagggagctgacggcttccaggaagagttttctgaaggaggaggacacggcgttgtagagaagaggagtcacagctgagctgacgtagaaaagtgtgttggtcaccatgtagaagtagtggtagaaattgtacagtgggtcagtccacgcgtcatcaggtacgtagcagtacatgagcctgcgggcatggtacggcagccagcagatgacatacatgaccacgatggctctgagaacctggacgctgcgctggaggctgcggatccggcgcacgtctttatgtctcaccaggctgacctggcctccctggataaaaggtcttcttcccatacgatgaagctgaggagaccctcctcactcagcagctccaggcggctgggggtggagctgcccggggtagaagtggacggcacttgggagcagagggccagcaggtggctcactgtgaccccattcaggaaagcagttagtgccaaggggagcacgaaggacaccagcacattcacctggataaagacttggagcgcggtgcggctcaccagcaccgtgcacactcgcgaggcgggctccggctccccgtccgccgtctcgagttcgtgcttctgccccatgatgacggccatgggcagggcgaggccgagcgaggcggcccacgagagcgccaccagccaccgggtccggcgtggcgtcagcaggctgcgggcacgcaggggctggcacacggctaggcagcgctcggcgctcaggcctgccacgctcagcaccgtggcgtaggcgcacagctcgtgcacgaagtagtagccgcggcagcccaggtcgccgaagacccaggggtagtggaaccacacgaagctgtagagctccaccggcacgccgaccagcagcagcagcaggcccgcgagcgccaggctgagcacgtggtggcgcaggcgccccgcgcgcccggcccgcgccttcagcaccacgtgcacggacagcgcattgcccgccgcgcccagcgcccagatgagtgcgtagagcgcggtgaacagcaccttggcccagaggcgagtgtccacgcccagccgggcgtccaggctcagccccgggttggagctgggccgcgggggccgcgggctgctggtttccatcccgctcccgcggccggcgctccctccctctcactgcccggagtctgggcgagctgcctggttagtgagcacctcctcttctctgggaacctctagaactgggagacacgcccccgaaagggtgtcctgagccacgtgggaccgcgagtgccagcccgttagcgtcg

SEQ ID NO: 350721 - DNA, 900 bp, Homo Sapiens
  misc_feature (53)..(89): n is a, c, g, or t
ggagtgatacgatcactataggggaaccggatttccaccgcggtggcggccgnnnnnnnnnnnnnnnnnnnnnnnnnnnnnnnnnnnnnatcaggccaaatcggccgagctcgaattcgtcgagagcggacttaccaggcagctcgcccagactccgggcagtgagagggagggagcgccggccgcgggagcgggatggaaaccagcagcccgcggccaccgcggcccagctcaaacccggggctgagcctggacgcccggctgggcgtggacactcgcctctgggccaaggtgctgttcaccgcgctctacgcactcatctgggcgctgggcgcggcgggcaatgcgctgtccgtgcacgtggtgctgaaggcgcgggccgggcgagcggggcgcctgcgccaccacgtgctcagcctggcgctcgcgggcctgctgctgctgctggtcggcgtgccggtggagctctacagcttcgtgtggttccactacccctgggtcttcggcgacctgggctgcctagccgtgtgccagcccctgtgtgcccgcagcctgctgacgccacgccggacccggtgggctggtggcgctcttcgtgggccgcctcgctcggcctcgccctgcccatggccgtcatcatgggggcagaagcacgaactcgagacggcggacggggagccggagcccgcctcgcgagtgtgcacgggtgctggtgagccgcaccgcgctccaagtctttatccaggtgaatgtgcctggtgtcctttcgtgctccccttggcactaactgctttcctgaatggggtcacagtgagccacctgctggccctctgctcccaagtgccgtccacttctaacccgggcagctccaccccaagcgctgagctgtgagtgacgaag

SEQ ID NO: 350722 - DNA, 2014 bp, Homo Sapiens
  misc_feature (1980)..(1980): n is a, c, g, or t
aaagcaggctggtaccggtccggaattcccgggatccgtggcggagacagcggtgcgctcagctcccgggagcggcccgagcagccgagcgcccagggctgcccttcccgggccggcgggctccccgggctccccgccgccgccccgtgcgcccacgggagggcccggcatgctgcgccagctgctgctcgccgcgctctgcctggcgggtcccccagcgcccgcgcgcgcctgccagctgccctccgagtggaggcccctgagcgagggctgccgcgccgagctggccgagaccatcgtgtacgccagggtgctggcgctgcaccccgaggcgcccggcctctacaaccacctgccctggcagtaccacgccggccaggggggcctcttctactcggccgaggtcgagatgctgtgcgaccaggcgtggggcagcatgctggaggtgcccgccggctccaggctcaacctcaccggcctgggctacttctcgtgccactcccacaccgtggtccaggactactcctatttcttcttcctcaggatggatgaaaattataacctcttgcctcacggagtcaatttccaagatgccatcttcccagacactcaagaacagaaggatgttttctagccttttccagttttcaaactgttcgcaagggcagcagctggcgactttctccagtgactgggaaatccaggaagacagtaggctcatgtgctcctcggtgcagaaggccttgtttgaggaggaggaccacgtcaagaaactgcagcagaaagtggccaccctgggagaagcgcaaccggcagctccgggagcgagtgaagaaggtcaagaggtccttgcggcaggcgcgttagaagggccgccacctggtgctggcgaaccagaaactcagtgagaagctggcggcgggcgcgctgccgcacatcaacgcccgggggcccgtgcgccccccctacctgcgggggtaacgggcctgggggctgccaggtgtgcagggccaatcctggcggtaattgagaatgagtgaggtttcgtacatgcagctatttcaagggttgtaagagtttttgtttttaatcacgcatttggtagagtctaaatggataaaatgcaaggcttgctttccccttgggtgctggcctcaatgtcagaccccacgcgctgccccttcctggcctgaccccagacgcagtgcctggcagtccagaggcagtgggatccctgagtgctgaatgctcgcctgcagagcagcccagaaagagccctgactggggagagaacattttagaatctctagtgtaaaagacatcaacgtgcttagcctttatttcagaaaaaaatcagggtggttcccagctccccagtccaggacaaccattagtcctgatgagtgagctgacgctggtgctggaacctgctggcacctcactggccacatctttggaaggggatggtggccttgcatccaagatgcctgaaaatcagcacgtgcagggcctccctatccagccagcattttccttccagctgaggcaggtgaagacttcataagctcatcacaggggagggaattaggagcagggcagcaggtaattaaacaagataaattatacctgatttccaacaccagctacaaagagttgaagatgatacctatgggtcgcgttaacacagggggcaactgccttgatcggcctgccatgggtcatcagactgcttcctaaattgagagaaactgaggcaatctctcagccactgctatagtctaacttcttgtttgctgagtaattgtttctaatgtctctgaactcaaagtgaggtgctccaagacgctgtgaacttctgcaaagacacctccttacctactgggatcacgtgacctgacctcactcccagccaggctcccaaagggctcattccagccattccaatctcttcttctttatgcaaacactttttccccacancaagccttgtttgttcgatagagtacgtgtacgt

SEQ ID NO: 350723 - DNA, 1235 bp, Homo Sapiens
  misc_feature (2)..(2): n is a, c, g, or t
  misc_feature (6)..(7): n is a, c, g, or t
  misc_feature (16)..(16): n is a, c, g, or t
  misc_feature (30)..(30): n is a, c, g, or t
  misc_feature (32)..(32): n is a, c, g, or t
  misc_feature (38)..(38): n is a, c, g, or t
  misc_feature (41)..(41): n is a, c, g, or t
  misc_feature (43)..(43): n is a, c, g, or t
  misc_feature (54)..(54): n is a, c, g, or t
  misc_feature (57)..(58): n is a, c, g, or t
  misc_feature (63)..(64): n is a, c, g, or t
  misc_feature (68)..(68): n is a, c, g, or t
  misc_feature (80)..(82): n is a, c, g, or t
  misc_feature (85)..(86): n is a, c, g, or t
  misc_feature (88)..(88): n is a, c, g, or t
  misc_feature (91)..(91): n is a, c, g, or t
  misc_feature (93)..(93): n is a, c, g, or t
  misc_feature (96)..(96): n is a, c, g, or t
  misc_feature (104)..(105): n is a, c, g, or t
  misc_feature (109)..(110): n is a, c, g, or t
  misc_feature (116)..(116): n is a, c, g, or t
  misc_feature (120)..(120): n is a, c, g, or t
  misc_feature (122)..(123): n is a, c, g, or t
  misc_feature (127)..(128): n is a, c, g, or t
  misc_feature (131)..(132): n is a, c, g, or t
  misc_feature (134)..(134): n is a, c, g, or t
  misc_feature (136)..(136): n is a, c, g, or t
  misc_feature (141)..(141): n is a, c, g, or t
  misc_feature (158)..(158): n is a, c, g, or t
  misc_feature (160)..(160): n is a, c, g, or t
  misc_feature (162)..(162): n is a, c, g, or t
  misc_feature (164)..(164): n is a, c, g, or t
  misc_feature (175)..(175): n is a, c, g, or t
  misc_feature (179)..(179): n is a, c, g, or t
  misc_feature (190)..(190): n is a, c, g, or t
  misc_feature (193)..(193): n is a, c, g, or t
  misc_feature (217)..(217): n is a, c, g, or t
  misc_feature (223)..(223): n is a, c, g, or t
cncccnnattcccccncgcgaggaggaaancntataanccnancacgggggggnatnnggggnnggcngcaggaataaannnagnnanttntnctnatttccannccanncaaaanagantnnaagnnatnncntnggttngcttaacacagggggcnantncnttgatcggccngccntgggtcatcanacngcttcctaaattgagagaaactgngcaatntctcagcccactgctatagtctaacttcttgtttgctgagtaattgtttctaatgtctctgaactcaaagtgaggtgctccaagacgctgtgaacttctgcaaagacacctccttacctactgggatcacgtgacctgacctcactcccagccaggctcccaaagggctcattccagccattccaatctcttcttctttatgcaaacacttttcccccacaacaagccttgtttgttccgataggaatacgtgtacgtcagtgcacttgtccttacgtcagttccttacaccaccaaagcacttcacctttctggaaataaaacttttaagacactactataagtaaaaatgagagtattcactagacttattgctcaggcacatttgagtgggtcccagctgtgtgattaagaagtcaactgggtggccttttctgggttatcttctgatcatggcctttcaacccaacaagggcccttccctgctcttccaccagtaaaggctcctggcctctcatcaggatctgccccccagagacccccccagacactgcagggcctggtgatgctgtcctctgtaccggaaatggcaggcactgtcagatttccactcttctgcctttaggaaggctgggtgcttcttgctctgacagccagtctggggagatgactcttacgttgcttgagtcttggtggcaggctgctgtccacgggggagaagtctctgctctggactggacagaagagagacttttaccctggggcactcacacggccaagcttctgccaccacttcattagctgtattctccatagtatggtgaaatagcaggtgcgtcttctagtttattcctcctggggacatttcctcaaagcagttttgcgcccccgcaagggaatggtcagcctaagggtaatgtacagcccgtgcttggagaaccatggaagctacacccctacaggtgcatactgttctgcttttccaataaatacgagcggcgatttcaaccac

SEQ ID NO: 350724 - DNA, 648 bp, Homo Sapiens
agagtgaaactccattcttggcaatttccccgtggtcctgcagcagctgaacgttcaccgagaagggagacccttgggccacttccatcacctccggacccaagatcacgatcctcgtagcttgttctgctgggtggccattgatccacaacccataataggtgacccctgagcagtgggccatgctgcccagtccactgaagacgtcgctgtgccactgtcccttgtaggtggagccgtcggcgcagcgcagcaccccgtgtccctgacgccggtcccggacccagtcgccgtcgtacttgtcaccgttctgaaagagcatctgcccagggccgtgcctcttgttgtcatggaaggagccctggtacacttgtccatcccggtccaccagaaacccatgtccttcccgcatgccgtgggagacctccccttcataacatccgccggctttgtactccatgacgccgtagccttgaggctctcccagaacaaactgtccagagaaggtgtctcctgaccaggcccagtgccggcggccttctcccgtgatctctccgtccacaaacgccccttcgtaataactgccatctttaaataacaacttcccgtgaccgtgcttcctccctgctttccattctccttcatatc

SEQ ID NO: 350725 - DNA, 2081 bp, Homo Sapiens
ggcctgggtggcgaattcggcacgaggccggaagtggccggtccagagctgtggggtggcctccgcgcggtctctggcggagtcggggaatcggatcaaggcgagaggatccggcagggaaggagcttcggggccgggggttgggccgcacatttacgtgcgcgaagcggagtggaccgggagctggtgacgatggcggggccgcagcccctggcgctgcaactggaacagttgttgaacccgcgaccaagcgaggcggaccctgaagcggaccccgaggaagccactgctgccagggtgattgacaggtttgatgaaggggaagatggggaaggtgatttcctagtagtgggtagcattagaaaactggcatcagcctccctcttggacacggacaaaaggtattgcggcaaaaccacctctagaaaagcatggaatgaagaccattgggagcagactctgccaggatcgtctgatgaggaaatatctgatgaggaagggtctggagatgaagattcagagggactgggtctggaggaatatgatgaggacgacctgggtgctgctgaggaacaggagtgtggtgatcacagggagagcaagaagagcagaagccactctgcaaaaacaccgggcttcagtgtccagagtatcagtgactttgagaaatttaccaagggaatggatgaccttgggagcagtgaggaggaggaagacgaagagagtggcatggaagaaggggatgacgcggaagactcccaaggcgagagtgaggaagacagggctggagatagaaacagtgaggatgatggtgtggtgatgaccttctctagtgtcaaagtttctgaggaagtggagaaaggaagagccgtgaagaaccagatagcactgtgggaccagctcttggaaggaaggatcaaactacaaaaagctctgttgaccaccaaccagcttcctcaaccagatgttttcccattgttcaaggacaaaggtggcccagaattttccagtgccctgaaaaatagtcacaaggcacttaaagcattgttgaggtcattggtaggtcttcaggaagagttgcttttccagtacccagacactagatatctagtagatgggacaaagcccaatgcgggaagtgaggagatttctagtgaagatgatgagctggtagaagagaagaagcagcaacgaagaagggtccctgcaaagaggaagctggagatggaggactatcccagcttcatggcaaagcgctttgccgactttacagtctacaggaaccgcacacttcagaaatggcacgataagaccaaactggcttctggaaaactggggaagggtttggtgcctttgaacgctcaatcttgactcagatcgaccatattctgatggacaaagagagattacttcgaaggacacagaccaagcgctccgtctatcgagttcttggcaaacctgagccagcagctcagcctgtcccagagagtttgccaggggaaccggagatccttcctcaagcccctgctaatgctcatctgaaggacttggatgaagaaatctttgatgatgatgacttttaccaccagctccttcgagaactcatagaacggaagaccagctccttggatcccaacgatcaggtggccatgggaaggcagtggcttgcaatccagaagttacgaagcaaaatccacaaaaaagtagataggaaagccagcaaaggcaggaaacttcggtttcatgtccttagcaagctactgagtttcatggcacctattgaccatactacaatgaatgatgatgccaggacagaactgtaccgctctctttttggccagctccaccctcccgacgaaggccacggggattgacatcgcccacctccgacacccagtgggcgccttggctggtgcggctgctggtccagatggaggaaaccagtgactttatggggctgagctagtagggaagcccctggaaagatgctgcgttccgaacctgtgcctaatacacgcaagggcgctgtcccgcccaaccccgcctttaaacgccacaaataaagaatatatgttaccgcc

SEQ ID NO: 350726 - DNA, 1754 bp, Homo Sapiens
  misc_feature (1295)..(1313): n is a, c, g, or t
  misc_feature (1322)..(1360): n is a, c, g, or t
  misc_feature (1408)..(1480): n is a, c, g, or t
aggtagcgaggcctgggtggcgaattcggcacgagggcttggaaagatggcgtcccgcaaggaaggtaccggctctactgccacctcttccagctccaccgccggcgcagcagggaaaggcaaaggcaaaggcggctcgggagattcagccgtgaagcaagtgcagatagatggccttgtggtattaaagataatcaaacattatcaagaagaaggacaaggaactgaagttgttcaaggagtgcttttgggtctggttgtagaagatcggcttgaaattaccaactgctttcctttccctcagcacacagaggatgatgctgactttgatgaagtccaatatcagatggaaatgatgcggagccttcgccatgtaaacattgatcatcttcacgtgggctggtatcagtccacatactatggctcattcgttacccgggcactcctggactctcagtttagttaccagcatgccattgaagaatctgtcgttctcatttatgatcccataaaaactgcccaaggatctctctcactaaaggcatacagactgactcctaaactgatggaagtttgtaaagaaaaggatttttcccctgaagcattgaaaaaagcaaatatcacctttgagtacatgtttgaagaagtgccgattgtaattaaaaattcacatctgatcaatgtcctaatgtgggaacttgaaaagaagtcagctgttgcagataaacatgaattgctcagccttgccagcagcaatcatttggggaagaatctacagttgctgatggacagagtggatgaaatgagccaagatatagttaaatacaacacatacatgaggaatactagtaaacaacagcagcagaaacatcagtatcagcagcgtcgccagcaggagaatatgcagcgccagagccgaggagaacccccgctccctgaggaggacctgtccaaactcttcaaaccaccacagccgcctgccaggatggactcgctgctcattgcaggccagataaacacttactgccagaacatcaaggagttcactgcccaaaacttaggcaagctcttcatggcccaggctcttcaagaatacaacaactaagaaaaggaagtttccagaaaagaagttaacatgaactcttgaagtcacaccagggcaactcttggaagaaatatatttgcatattgaaaagcacagaggatttctttagtgtcattgccgattttggctataacagtgtctttctagccataataaaataaaacaaaatcttgactgcttgctcatttgnnnnnnnnnnnnnnnnnnnctcgaggcnnnnnnnnnnnnnnnnnnnnnnnnnnnnnnnnnnnnnnncatggtcatagctggttcctgacccagctttcttgtacaaagtgggtnnnnnnnnnnnnnnnnnnnnnnnnnnnnnnnnnnnnnnnnnnnnnnnnnnnnnnnnnnnnnnnnnnnnnnnnntgccgaacccgggaatttaacccgcctaatgagggggcttttttttggggaaccaaggaacttccttgaaatcctttttttccggcaacaatctgctggttgcaaaccaaaaaacccccgcttaccaagggggggtttggtttgccggggaccaaagcccccaactcctttttcccgaagggaaccgtgcttccgccaaaaggccaaaataccaaaaacggggtcctttctaaggggaacccgcaatttcggcgccccccctttaaggaaccct

SEQ ID NO: 350727 - DNA, 472 bp, Homo Sapiens
  misc_feature (19)..(19): n is a, c, g, or t
  misc_feature (58)..(58): n is a, c, g, or t
ggaatactagtaaaccacnggcagcagaaacatccggtttcaggcagcgttgcccagncaggagaaatatgccagcgcccagagcccgaggagaaccccccgctcccctgaggaggaccctgtcccaaactccttcaaacccacccacagccgccctgcccaggatggactcgctgcctcattgccaggcccagataaacacttactgcccagaacatcaaggagttcactgccccaaaacttaggcaagctcttcatggcccaggctcttcaagaatacaacaactaagaaaaggaagtttccagaaaagaagttaacatgaactcttgaagtcacaccagggcaactcttggaagaaatatatttgcatattgaaaagcacagaggatttctttagtgtcattgccgattttggctataacagtgtctttctagccataataaaataaaacaaaatcttgactgcttgct

SEQ ID NO: 350728 - DNA, 888 bp, Homo Sapiens
  misc_feature (42)..(95): n is a, c, g, or t
attgctcccagcgccaagctctgtgtcgccgccgtcgcctannnnnnnnnnnnnnnnnnnnnnnnnnnnnnnnnnnnnnnnnnnnnnnnnnnnnnagcctctgttttgtctccttctctccctgtggagcggctcgggctgctggggaggccccggctccctccggacgctcggccaacggcggcggctagtccgcggccctgctgatagggaaaaggacgccgcggtcttcccaggcgtcgcggagagcagttccaaagaactactggttcacattttaactcttcccaagttgtgaaaatagtgaaagatgcttagactacttaacatacaaactgctttctggttaatcatctttagcaagactggatttctggatatctactccactccatctctattgacttttaaaacatgataatgcaaacctataacactggcaaccatcagtgaacctttaatttcattgattaatagcgtttgaagcttcctcagggaataacaatgacatcagcagtggttgacagtggaggtactattttggcagctcttccagccaactggcagtagaaaatcaagaggttaggcattcaatgaattacatttctattttcttcatagcaaatttgtgcatgaactaatttcgaaattaataggaaacatattcgacgagtaaaaatgtacaaagcatgaaattatacatgtacatgtcgcgtatccttatactaatcttcaggtacatagaaggtcaacggaaggtcatcgcacggcctcacgtgacatgctcggaacatacatatattacgaactgaacttgcgacgcgcaggaccggacctggccaagaacactatacgtcatcagtcgagagctcacactccaactccctc

SEQ ID NO: 350729 - DNA, 213 bp, Homo Sapiens
gctttgcattgcaggaggcagagtccagctccagttatctcaagtagagggcgtttctggtcgtcaggatacatgcggggcggaagggagacagaaagacataatacacaagaacagaaagcagcagacagccaggacccttggcccggaactagatctaggatggcctctgagactcagcagtctggagtctgtagatattcagctgagttg

SEQ ID NO: 350730 - DNA, 1521 bp, Homo Sapiens
  misc_feature (874)..(951): n is a, c, g, or t
  misc_feature (1267)..(1281): n is a, c, g, or t
aagaaccagaacataaacccaataccccccaccccactcttttgggaacatcccaacattagaagagtgggatatccagtcattttttccaagctggagcaggcagtgtagccaggattgaggaaggagaagccacagaataaacatggcacatgttctcagagcatcaattttactccagaatttgggaagaaaggattatattattagtgtattcaaaccagtatggatagcacaaatgcagatatcctataaattttgaggctaactccagcaggttgtagactgatttaggctacctccttccagactcccaggggtacaaacaccttcacagtcccctgcgggagtacatcagtggaaatatttggggaatgaggctagaaggcaggagatacattcagtttacttatccccctggtttcttttccccactccttacctgccccacatccctagtgggtgggaaggcatcagaagacagttggctacaatatcagctttctctgctactttggggaatttagaaggaaatcagtacttggcaacctggtatttttagctgccaggccaaaactccagacataaaccccttccctttaattgaatgatgtttatatataaaggaatagatctccccaagaaagaaccccagaacactggttccattccagtgtgggggctgcttgggcagcagtgacacctgtgcattagatgcaatagacacttcaattcctgcaaaaatgtcggccaactaagtgctcctttaccaactgcggaggcccagactcacaccatggtcccacagactcaaggtttagaatctatgtgagtctattttggttaacacacaggctcctccttccaatcattnnnnnnnnnnnnnnnnnnnnnnnnnnnnnnnnnnnnnnnnnnnnnnnnnnnnnnnnnnnnnnnnnnnnnnnnnnnnnnaacacacacatctaatgattccaacctcgaatactccccaggcccatggggatgcccaagtaccctaagcaaatcactgtgacactgagggggtcattaactggggctccgagcagctgaaacccaccctggtggtctctagattgttgttctgagaaatcataaacaccaaatcctccaatccctttgaatttgagtttgtcattttaacctttaacagccttttcaggtaaaaataacaaagaccaatttattgactttgtagctacaatgagcttgaaaaagcgcttacttaaaagaaagactggaaggaagnnnnnnnnnnnnnnntggagtacatactcctcagacgatgcacactttaattagctaaaataaaaataaaaatgtacagaggaagggagaggaaaaaccaacttctctgatcctttcatggcactgtagctcaaagactggaatctctgcttgttaaccattgttaactagtatttttagtcctggttgcttttagcctctgtatagttccttttttaaacacattttctatacgttaataaaagatcctgaaag

SEQ ID NO: 350731 - DNA, 445 bp, Homo Sapiens
  misc_feature (14)..(14): n is a, c, g, or t
  misc_feature (46)..(46): n is a, c, g, or t
  misc_feature (198)..(207): n is a, c, g, or t
  misc_feature (209)..(209): n is a, c, g, or t
  misc_feature (213)..(213): n is a, c, g, or t
ctcctaaatgttgnccctgagaaatccataaaacccccaaaccccncccaaccccctttgaaatttgagtttgtccattttaaccctttaacagcccttttcgggtaaaaataaccaaagacccaatttattgacctttgtagcctacaatgagccttgaaaaagcgccttaccttaaaagaaagactggaaggaagnnnnnnnnnngnaaantggagtacatactcctcagacgatgcacactttaattagctaaaataaaaataaaaatgtacagaggaagggagaggaaaaaccaacttctctgatcctttcatggcactgtagctcaaagactggaatctctgcttgttaaccattgttaactagtatttttagtcctggttgcttttagcctctgtatagttccttttttaaacacattttctatacgttaaaaaaaaga

SEQ ID NO: 350732 - DNA, 2094 bp, Homo Sapiens
  misc_feature (1598)..(1693): n is a, c, g, or t
aggtagcgaggcctgggtggcgaattcggcacgaggctggctctgactcccgtcctgcgatgggttgcgacgggggaacaatccccaagaggcatgaactggtgaaggggccgaagaaggttgagaaggtcgacaaagatgctgaattagtggcccaatggaactattgtactctaagtcaggaaatattaagacgaccaatagttgcctgtgaacttggcagactttataacaaagatgccgtcattgaatttctcttggacaaatctgcagaaaaggctcttgggaaggcagcatctcacattaaaagcattaagaatgtgacagagctgaagctttctgataatcctgcctgggaaggggataaaggaaacactaaaggtgacaagcacgatgacctccagcgggcgcgtttcatctgccccgttgtgggcctggagatgaacggccgacacaggttctgcttccttcggtgctgcggctgtgtgttttctgagcgagccttgaaagagataaaagcggaagtttgccacacgtgtggggctgccttccaggaggatgatgtcatcgtgctcaatggcaccaaggaggatgtggacgtgctgaagacaaggatggaggagagaaggctgagagcgaagctggaaaagaaaacaaagaaacccaaggcagcagagtctgtttcaaaaccagatgtcagtgaagaagccccagggccatcaaaagttaagacagggaagcctgaagaagccagccttgattctagagagaagaaaaccaacttggctcccaaaagcacagcaatgaatgagagctcttctggaaaagctgggaagcctccgtgtggagccacaaagaggtccatcgctgacagtgaagaatcggaggcctacaagtccctctttaccactcacagctccgccaagcgctccaaggaggagtctgcccactgggtcacccacacgtcctactgcttctgaagcccgcactgccaccgctcctgccccagaaggttgtttagtttccacgtaggcaggtcgctttgtgcctctgagtgcgctgctgtgtgttctctctatagttctgtgtcataaagctgtcctggccagccttcaagctggtgtggccactcttgatgtgaggcgtgtcggttccaggggggacatgggaggggctgcacagtggcccgaggtcatgcttgcttccacctgcaggtgcatttggtcctttccatggccaggaagccctgtgggctgcactttttatgcttgcagtaacaagagactccagagtcctcaccggtgcagagttggcacatattaattaactaaaattctaatgatcttgctaccagcaataaatcaagtaggccaagtgaaactgggctttaaaaaggatggatttcaaatacactgtgcccactagaagcttcgaagggcctcgtccctctgctacagccctgggaggagccaggatccttgttggtctagctaaatactgttaggggagtgtgccccatctcatcatttcgaagatagcagagtcatagttgggcacccagtgattgggttcaaaaataaagctggtctgcctcttcnnnnnnnnnnnnnnnnnnnnnnnnnnnnnnnnnnnnnnnnnnnnnnnnnnnnnnnnnnnnnnnnnnnnnnnnnnnnnnnnnnnnnnnnnnnnnnnntaaacgaaggagaggccaccagcaacagaacggcacccagagcaatcggaatacacgagccaaccctatcatgaccagggcgatcagacgagacatacattgatactagcaagcgcgggaacgctagagcacacactgacgctgactgaatgtgttgctcgacaaacaggtaaaagaaactaagccaacaacaatcaacccataaagagaaacaacagataaacttactaacatcaaaatggcttgaaagtaaaaataaaatatagctgatactccattagaacatacaaaacaaaaactaaactccattaccaactcctccgcgcatcaatactaatacacaaataagcagcaaagcacaacattaatataccagaaaaaaacatacacctatcgtccac

SEQ ID NO: 350733 - DNA, 776 bp, Homo Sapiens
gggccggaagtgacagctttgggggtttgctgctggctctgactcccgtcctgcgatgggttgcgacgggggaacaatccccaagaggcatgaactggtgaaggggccgaagaaggttgagaaggtcgacaaagatgctgaattagtggcccaatggaactattgtactctaagtcaggaaatattaagacgaccaatagttgcctgtgaacttggcagactttataacaaagatgccgtcattgaatttctcttggacaaatctgcagaaaaggctcttgggaaggcagcatctcacattaaaagcattaagaatgtgacagagctgaagctttctgataatccttctgggaaggggataaaggaaacactaaaggtgacaagcacgatgacctccagcgggcgcgtttcatctgccccgttgtgggcctggagatgaacggccgacacaggttctgcttccttcggtgctgcggctgtgtgttttctgagcgagccttgaaagagataaaagcggaagtttgccacacgtgtggggctgccttccaggaggatgatgtcatcgtgctcaatggcaccaaggaggatgtggaacggctgaagacaaggatgggagaaagaaggctgaaagcgaaactgggaaagaaaccaagaaacccaagtcagcagagtctggtttcaaacccagatgtccagggaaaaagccccagggccatcaaaaggttaaggacggggaaagcctgaagaaacccacgcccttgatttcaacagaaaga

SEQ ID NO: 350734 - DNA, 1196 bp, Homo Sapiens
  misc_feature (1136)..(1146): n is a, c, g, or t
agcgggggatttcgccggaaatcccggaagtgacagctttgggggtttgctgctggctctgactcccgtcctgcgatgggttgcgacgggggaacaatccccaagaggcatgaactggtgaaggggccgaagaaggttgagaaggtcgacaaagatgctgaattagtggcccaatggaactattgtactctaagtcaggaaatattaagacgaccaatagttgcctgtgaacttggcagactttataacaaagatgccgtcattgaatttctcttggacaaatctgcagaaaaggctcttgggaaggcagcatctcacattaaaagcattaagaatgtgacagagctgaagctttctgataatcctgcctgggaaggggataaaggaaacactaaaggtgacaagcacgatgacctccagcgggcgcgtttcatctgccccgttgtgggcctggagatgaacggccgacacaggttctgcttccttcggtgctgcggctgtgtgttttctgagcgagccttgaaagagataaaagcggaagtttgccacacgtgtggggctgccttccaggaggatgatgtcatcgtgctcaatggcaccaaggaggatgtggacgtgctgaagacaaggatggaggagagaaggctgagagcgaagctggaaaagaagccccagggccatcaaaagtttaagacagggaagcctgaaggaagccagcctttgattccttagagaagaagaagaaccaacttggctccccaaaagccacaggcaatggaattgagagctcttcttggaaaagctgggaaggcctccgtgtggagccacaaagaggtccatcgctgacagtgaagaatcggaggcctaccagtccctctttaccactcacagctccgccaagggctcccaagaggagtctgcccactggggtcacccacaccgtcctactggtttctgaaacccggcactggccacgttccctggccccaagaaaggtttgttttaattttccacgtagggcaagggccccttttgtggcctcggaatgggcccccgctgggcggtccccccccacaaaaaccgcgggcgccacaaaaacttggacccgggcccacaccttcaaagcgtgtgggggnnnnnnnnnnngaatgtcgcaccccacttccccccctatatcggggggcaccccatgtccg

SEQ ID NO: 350735 - DNA, 231 bp, Homo Sapiens
attaggtcgacaaagatgctgaattagtggcccaatggaacaattgtactctaagtcaggaaatattaagacgaccaatagttgcctgtgaacttggcaggtatggtttttacacttaatcaagatgagtttgttaagtgattttgaggagaattttgatgtgtaaatgcagttttccattcatcaagcgtggattatcccaagcaaatttgtgaggcataggctgtcgtt

SEQ ID NO: 350736 - DNA, 463 bp, Homo Sapiens
  misc_feature (127)..(127): n is a, c, g, or t
gggggaacaaggggaggggctgcaacaatggccccgaaggtccatgccttgccttcccaccctgccaggtgccatttggtccctttccccatggcccaggaaacctgtgggctgcactttttatgcntgcagtaacaagagactcccagagtccctcaccggtgccagagttggcacatattaattaactaaaattcctaatgatccttgctaccagcaataaatcaagtaggcccaagtgaaactgggctttaaaaaggatggatttcaaatacactgtgcccactagaagcttcgaagggcctcgtccctctgctacagccctgggaggagccaggatccttgttggtctagctaaatactgttaggggagtgtgccccatctcatcatttcgaagatagcagagtcatagttgggcacccagtgattgggttcaaaaataaagctggtctgcctcttctc

SEQ ID NO: 350737 - DNA, 560 bp, Homo Sapiens
  misc_feature (411)..(464): n is a, c, g, or t
tgtccggcttttaaaaactccccagctctggtcactactccaccgagatttctcaaaaagtcgccctcggagagtgatcccggggggtgctttgcgaagagggtgcagaaaatgaacggaggagcagctggcttgagggctgggaacactcgcgtgtgtgagagatttaggatgagtttgggaagaaagtgggggcccgaggattctagagagagcacagcccaagctgaggaggggaaagcgcggtggtccggaaatttgagcggctggggaaccaccttcgtgtctcctcagaggggcgggcgctgtcgcctaactggtccccaacggcgtcggagcagaggcaagatccaggggcactggcctcgccgcggtaccgggcgggtacccagcgggctcggctctaaagannnnnnnnnnnnnnnnnnnnnnnnnnnnnnnnnnnnnnnnnnnnnnnnnnnnnnggccaaaccatccttcagacacccgcgccgccgcctcacaacatgtccgccgctgccgctgccgctgccgctgctggaacggcgacggccgcctgg

SEQ ID NO: 350738 - DNA, 1237 bp, Homo Sapiens
  misc_feature (828)..(1001): n is a, c, g, or t
ggccgcttctcggggggcccaatgagcagctcggcgatgggcgtggtcgcgccacggtgttcctgtccacgcggtggtgctcaaaggcccgcgacatgctcttgagcttctggaaggtgcccaggatcttcttgtaccggcagaggaccccgtcggcgtccttcactcgctgcctctcccgggccttgggcttcccaaagcgcctccgactagcacctcccttctgcttctgccgcctcctctcactggcgctgccttcttcggacgctccgctgagggaggaggctgctgactcagggtccgaggcctcgcccccagccccaccacggctgtccccctccatccgcctgggcccaggcttcatccggcagtggtcctctgcctccatccgagcagaagagatgaatttgtccagctggcaccgcaggaagtccctctcttcctccaggtcctcgatgcgcttctgcagccaggagttcctctccagagccatgtgcagctgggtcttgacgctgttcatcagagccagggcggaggacgcagcctccggaggctcctcgaagtttctccgagaggggctcagactgtaaaagatctgtgggtctaggtggggtgcctcatcgaagggaatggagatctcgaaggtctcatcgtccttcattgtccgcctccgactgctccggtcattcatggcgcggcttcctgcggaccccagcagccgagggcctcaggggcactggacagaaacggcagccacaaatggagagacgcagatggactggagggtccatcctgggggaggtgaagtgagacaggagggaccttctnnnnnnnnnnnnnnnnnnnnnnnnnnnnnnnnnnnnnnnnnnnnnnnnnnnnnnnnnnnnnnnnnnnnnnnnnnnnnnnnnnnnnnnnnnnnnnnnnnnnnnnnnnnnnnnnnnnnnnnnnnnnnnnnnnnnnnnnnnnnnnnnnnnnnnnnnnnnnnnnnnnnnnnnnnnnnnaagctgaagccctaaattgctgggtgccccaaggggtcgcctgaccagggacacctagcctgaaggggaaggaccctctctcatcgcgggccactgccaggcctaaggaagaggcaggtgcagggggaaactgccccaacttcccagggtaggaggaggtccagcccgtgcgcgctgcctcctctaccttcggggcccccacacccctcccccgcactcgcgtgggcgggcggacc

SEQ ID NO: 350739 - DNA, 988 bp, Homo Sapiens
  misc_feature (232)..(424): n is a, c, g, or t
  misc_feature (973)..(973): n is a, c, g, or t
cgcccgcccacgcgagtgcgggggaggggtgtgggggccccgaagtagaggaggcagcgcgcacgggctggacctcctcctaccctgggaagttggggcagtttccccctgcacctgcctcttccttaggcctggcagtggcccgcgatgagagagggtccttccccttcaggctaggtgtccctggtcaggcgaccccttggggcacccagcaatttagggcttcagcttnnnnnnnnnnnnnnnnnnnnnnnnnnnnnnnnnnnnnnnnnnnnnnnnnnnnnnnnnnnnnnnnnnnnnnnnnnnnnnnnnnnnnnnnnnnnnnnnnnnnnnnnnnnnnnnnnnnnnnnnnnnnnnnnnnnnnnnnnnnnnnnnnnnnnnnnnnnnnnnnnnnnnnnnnnnnnnnnnnnnnnnnnnnnnnnnncttcacctcccccaggatggaccctccagtccatctgcgtctctccatttgtggctgccgtttctgtccaatgcccctgaggccctcggctgctggggtccgcaggaagccgcgccatgaatgaccggagcagtcggaggcggacaatgaaggacaatgagaccttcgagatctccattcccttcgatgaggcaccccacctagacccacagatcttttacagtctgagcccctctcggagaaacttcgaggagcctccggaggctgcgtcctccgccctggctctgatgaacagcgtcaagacccagctgcacatggctctggagaggaactcctggctgcagaagcgcatcgaggacctggaggaagagagggacttcctgcggtgccagctggacaaattcatctcttctgctcggatggaggcagaggaccactgccggatgaagcctgggcccaggcggatggagggggacagccgtggtggggctgggggcgaggctcggaccctgagtcagcagcctcctcctcagcggagttccgaagaangcagtgcagtgagag

SEQ ID NO: 350740 - DNA, 1106 bp, Homo Sapiens
  misc_feature (461)..(653): n is a, c, g, or t
  misc_feature (954)..(972): n is a, c, g, or t
gggcccggcttcatccggcagtggtcgttggcctccagtccgagcagaagagatgaattggtccagctggcaccgcaggaagtccctgtgtgcctccaggtcctcgatgcgcttctgcagccaggagtttccctctccagagccatgtgcagctgggtcttgacgctggtcatcagagccagggcggaggacgcagcctccggaggctcctcgaagtttctccgagaggggctcagactgtaaaagatctgtgggtctaggtggggtgcctcatcgaagggaatggagatctcgaaggtctcatcgtccttcattgtccgcctccgactgctccggtcattcatggcgcggcttcctgcggaccccagcagccgagggcctcaggggcactggacagaaacggcagccacaaatggagagacgcagatggactggagggtccatcctgggggaggtgaagnnnnnnnnnnnnnnnnnnnnnnnnnnnnnnnnnnnnnnnnnnnnnnnnnnnnnnnnnnnnnnnnnnnnnnnnnnnnnnnnnnnnnnnnnnnnnnnnnnnnnnnnnnnnnnnnnnnnnnnnnnnnnnnnnnnnnnnnnnnnnnnnnnnnnnnnnnnnnnnnnnnnnnnnnnnnnnnnnnnnnnnnnnnnnnnnnaagctgaagccctaaattgctgggtgccacaaggggtcgcctgaccagggacacctagcatgaaggggaaggaccctctctcatcgcgggccactgccaggcctaagaaagaggcaggtgcagggggaaactgccccaacttcccagggtaggaggaggtccagcccgtgcgcgctgcctcctctaccttcggggcccccacacccctcccccgcactcgcgtgggcggcggacccgtccccccggtggtgggggctgggcgcgtgcgcagtacggggaaaggtcacgcgtgggggtgcgnnnnnnnnnnnnnnnnnnntttgtcccgcgggtgggagggggagcggtcgtggaacgattccagcgggaacatgcactagggcgggggtgcaaacgcggccaccatcccccgcccgcgggtgcccggggtccgaggggccgaggccccccgcg

SEQ ID NO: 350741 - DNA, 1658 bp, Homo Sapiens
  misc_feature (1506)..(1506): n is a, c, g, or t
cgcgcgctcgcccctagcgtgggcggggagctaaagtgcataacaacccacctcccccccaatccaccaacttaccctccccatttcgttcccggtccggcattcccgggatcggcgggcctcacctggacccggggactcttcaacgaggggcgctagcctggcccgactgggcgagtccccgcgtccctgcccgttccgtcgctcagttccacgacacgctcccctgccgccccgcctgttcgcgggtgggtgggcgcttccctcggctccccgtgacactttgcagacgctccccggcgccgggcatgggcgccgccgccgtcggtccccgagccggattccgcgagcggtgcccctgaggccctcggctgctggggtccgcaggaagccgcgccatgaatgaccggagcagtcggaggcggacaatgaaggacgatgagaccttcgagatctccattcccttcgatgaggcaccccacctagacccacagatcttttacagtctgagcccctctcggagaaacttcgaggagcctccggaggctgcgtcctccgccctggctctgatgaacagcgtcaagacccagctgcacatggctctggagaggaactcctggctgcagaagcgcatcgaggacctggaggaagagagggacttcctgcggtgccagctggacaaattcatctcttctgctcggatggaggcagaggaccactgccggatgaagcctgggcccaggcggatggagggggacagccgtggtggggctgggggcgaggcctcggaccctgagtcagcagcctcctccctcagcggagcgtccgaagaaggcagcgccagtgagaggaggcggcagaagcagaagggaggtgctagtcggaggcgctttgggaagcccaaggcccgggagaggcagcgagtgaaggacgccgacggggtcctctgccggtacaagaagatcctgggcaccttccagaagctcaagagcatgtcgcgggccttcgagcaccaccgcgtggacaggaacaccgtggcgctgaccacgcccatcgccgagctgctcattgtggcccccgagaagctggccgaggtgggcgagttcgacccctccaaggagcgcctgctcgagtactcccgccgctgctttctggccctggacgacgagacgctcaaaaaggtgcaggcgctcaagaagagcaagctgctgctgcccatcacctaccgcttcaagcggtgatcgcaccacgcctccgcgcctccacccgggccttcctcccccgtggaccccggtggatgacctgcccctctccccgccgcgcccctgcccctcctcctcgctccctgggttgggggctcccttagccgggcccccaagcgcgacggccccggaccggccgcggccccttcccgaacgccggcacccccttccgcttgggctgcccagccctgtcctcgccgggccccttcctcctggaaaaccaggcaggcgggtgccccccccntcgagtgggggactgtacagaccccgtctccgccctggccccgcggaggagctgcccacctgattcccggacagacctccccaactccgcgtgagacagagaattattcagataatttaaattaaaaaacgacgtgaaaatttggaaaaaaa

SEQ ID NO: 350742 - DNA, 939 bp, Homo Sapiens
  misc_feature (27)..(27): n is a, c, g, or t
  misc_feature (75)..(75): n is a, c, g, or t
  misc_feature (80)..(80): n is a, c, g, or t
  misc_feature (90)..(90): n is a, c, g, or t
  misc_feature (362)..(362): n is a, c, g, or t
  misc_feature (461)..(461): n is a, c, g, or t
  misc_feature (469)..(469): n is a, c, g, or t
  misc_feature (471)..(471): n is a, c, g, or t
  misc_feature (476)..(493): n is a, c, g, or t
  misc_feature (612)..(668): n is a, c, g, or t
  misc_feature (691)..(691): n is a, c, g, or t
  misc_feature (729)..(729): n is a, c, g, or t
  misc_feature (781)..(781): n is a, c, g, or t
  misc_feature (783)..(783): n is a, c, g, or t
gggccctgactcgtcacactccccttncctaagcctctgagggtggagatccccctaggagcgcttggccagctnggaangcagcgcccngctgcacttgttgttgatacagcataagtgaatcatgggcatttccctgagagcagtgggagaggccctctgagttggaagttgagctccacctcctttccaagcgagcactcagtgttgaatcacagttacaacccactggggctggtgggagatgcgttgtatgggactggaagcaagaggttcattcaaagagaaactcatgggatttgtaaccagatgaatcatgatttctaagacttctgatcaaaaatactgtgaaataaagaatnttaatcaacggtggaccgggagatgattggcctgtcggaacataagagagcgccaaagccccaaatgccggggcgggggaagccacagagtggacctcncggagggncnacggnnnnnnnnnnnnnnnnnnagcgacaaacccggccccagggccctcgcatgtgctgttccctcggccgagaacactctctcccaagtatatgtcgggtcccccgacccacgttatccaagccccggcccaggtgtcannnnnnnnnnnnnnnnnnnnnnnnnnnnnnnnnnnnnnnnnnnnnnnnnnnnnnnnnaccccctgactctgctaaatttnccccttaatagttaggacacggtataactgattgtctnattatcttcttctccctctagaatataaatttatgaaaaaacaaatgttatngntttaactgctgtaactccagttcctagaacaatttccagcacatagcaagtgttcagtaaatatttgctgcttgaatctgctccagaattaacaagaaagccatctcttcctctgatctggggtctgttttgttcattactttgttcactccttct

SEQ ID NO: 350743 - DNA, 2698 bp, Homo Sapiens
  misc_feature (1689)..(1689): n is a, c, g, or t
agcttctggagaagtcagcagagagagcacccaaataattctgcagcactgacaggcgagtggagtctcggtgaacttctctacccgtctctgccctggaggactggagtcagcactgggcattgctcttaatttacagacaaggtgacagactggtgggtccagaggaagatgctgatttgcggggagctttgcggaatcacacatcttatggaggaatcggggctgtctgtatggattggtgggcagctgcaccccctggagaatgtgccccccgccctggctgtgctgctcatcactgtggtcatcgccttcttcactgagtttgccagcaacacggcgaccatcatcatcttcctgccggtcctggcagagctggccatccgcctgagagtgcaccccctgtatctgatgattccgggcacagtcggctgctcctttgccttcatgctcccggtctcaacgccccccaactccatcgccttcgcctctggacacttgctggtcaaagacatggtgcggacaggcctcctgatgaacctgatgggtgtcctgctgctcagtttggctatgaatacctgggcacagaccatcttccagctgggcaccttcccggactgggctgatatgtactcggtcaatgtcacagcattgccacccaccttggccaatgacacatttcggaccctctgagtccccctggaggactcccttgaggctgaaccctctcaaagggctgtcaccatcacctgctgctaggacactacaaaacaatcaaataattcttttctgtaatccaatatgcagcaagcaagggtgacctccagtggcccactcaagtccatgagccattatctaggatactttctctctctttcatgcagttcaaagcccaggtatctctcagatctgctgcctgagaaataagctcctttatcagttagctgttttatcattaggatacaagacagcccagtgtcatcaacagtgagcaaatctggcatggtgtttgtctcgtacagttgggataggaggccattcattcccatgggcacagctaacattatcccccagtgattactttcgattacactgaagagaccaccttgtctttaaagatcactttcctgggctgcaatgttccaacccagttgttccagctgttcacaaccagtgtgtgattttgcttagttggtgcccattctgcaccagttgttttacccctgccgataaccagcagtcagagattcttttttaatccttggagacagggaaagggacagatagctttccaaggacatgagactgtgcaaagcctctttgctgtttctctgggctcctgagcataccaggggaagttctagaaaccgcagctgacatctcgacccaagagatttaggattctcctgtttcatctgggtcagtttggccataattctggggtcaggccaggcctgggtcctgccctcccatggggtgactcatgacccctccagccaggactctcctacatgtggcccccataggcctctgtggctgcaaggcggtcagttgctgcttgtcccagcaggtggccttgatctctccatgccccaccttaagtggtaagcatgtttaattatcaaaggccccatttgtcaggggtgagagaaaagtcaaaagataaattggggccttgtaaaagcaagnggtaaaatgtctcaggcaagcaaaagattgtccccttctgcatatgggtaaaactgagacgtccccgtgagccccgaggtggaagtggtgtctgccttcaagggttaatccctctttgttccaagcagaagcattctggcatcccagtgaagagctcagtccctcaggaagtgtctgctgaatggaatggcccagcattagcccagtattggaaaagacaccagcccaggggccctgactcgtcacacttccctttcctaagcctctgagggtggagattcccctaggagcgcttggccagctgggaaggcagcgcccagctgcacttgttgttgatacagcataagtgaatcatgggcatttccctgagagcagtgggagaggccctctgagttggaagttgagctccacctcctttccaagcgagcactcagtgttgaatcacagttacaacccactggggctggtgggagatgcgttgtatgggactggaagcaagaggttcattcaaagagaaactcatgggatttgtaaccagatgaatcatgatttctaagacttctgatcaaaaatactgtgaaataaagaatgttaatcaactttggacctggagatgatttgcctttctgaacataagagagcttcaaagccccaaattcctgggctggggattccacagagttgacctctctgattttctactgctcttccctcccctctccagctacatactctgcctcaggggccttcgcatgtgctgttccctctgcctagaacactctctcccaagtatatgtctggttccccgactcactttattcaagtccctgctcaggtgtcaccttcccctgagagagcttccctgacctcctgtctaaaatgtcaccctcattactctccacccccttactctgctatattttctccttaatagttaggacactgtataacttattttcttataatcttcttctccctctagaatataaatttatgaaaatacaaatgt

SEQ ID NO: 350744 - DNA, 466 bp, Homo Sapiens
  misc_feature (19)..(19): n is a, c, g, or t
  misc_feature (287)..(287): n is a, c, g, or t
atgtcctgcctgaaaaggnaatggcccccaacaattagcccccaataatgggaaaaaaaacaccccaaccccagggcccctgaactccgtccacaccttcccctttcccctaagccctcctgaagggtggagattcccccctaggaaccgccttggcccagctgggaaaggcagcgccccagcctgcaccttgttgttgatacagccataagtgaatccatgggcatttcccctgagagcagtgggagaggccctctgagttggaagttgagctcccacctcctttnccaagcgagcactcagtgttgaatcacagttacaacccactggggctggtgggagatgcgttgtatgggactggaagcaagaggttcattcaaagagaaactcatgggatttgtaaccagatgaatcatgatttctaagacttctgatcaaaaatactgtgaaataaagaatgttaatc

SEQ ID NO: 350745 - DNA, 1311 bp, Homo Sapiens
agacgcggacagcgccgggactcgccgccccgggactcgcgcagcccgcagcgctccggctcctcctctcgcgaccgccctccgcagcgatggacggagacggtgacccagagagcgtgggccagcccgaggaggcaagcccggaggagcagccagaggaggcgagtgctgaggaggagcggccggaggaccagcaggaggaggaggcggcggccgccgccgcgtacctggacgagctgcccgagccgctgctgctgcgcgtgctggccgcactgccggccgccgagctggtgcaggcctgccgcctggtgtgcctgcgctggaaggagctggtggacggcgccccgctgtggctgctcaagtgccagcaggaggggctggtgcccgagggcggcgtggaggaggagcgcgaccactggcagcagttctacttcctgagcaagcggcgccgcaaccttctgcgtaacccgtgtggggaagaggacttggaaggctggtgtgacgtggagcatggtggggacggctggagggtggaggagctgcctggagacagtggggtggagttcacccacgatgagagcgtcaagaagtacttcgcctcctcctttgagtggtgtcgcaaagcacaggtcattgacctgcaggctgagggctactgggaggagctgctggacacgactcagccggccatcgtggtgaaggactggtactcgggccgcagcgacgctggttgcctctacgagctcaccgttaagctactgtccgagcacgagaacgtgctggctgagttcagcagcgggcaggtggcagtgccccaagacagtgacggcgggggctggatggagatctcccacaccttcaccgactacgggccgggcgtccgcttcgtccgcttcgagcacggggggcaggactccgtctactggaagggctggttcggggcccgggtgaccaacagcagcgtgtgggtagaaccctgagcgaccctgcctccgctctcccccagctgcctggaggggcaaaggtcgagggtagataggccttaacttagtccatagcgtcctcaccttccccaagccacacatcctcctcccatcccttgctccgatcccagcccctgagcagggagagagaagttttgttggcataggtttgcttaggtagccggcttctagaatgtagatccgtgagggcgtgagcttggactggacccactgctgattccctgcacctagcacagtgcttgccacaaagtgggctctcaataaatattatttgtccaaggaaggaatgaatgaaaaaatggataaa

SEQ ID NO: 350746 - DNA, 1825 bp, Homo Sapiens
cgggctggtaccggtccggaatgttgggatatcgtcgacccacgcgctcgcgcttcccaggcaagcgcaggtccaggcggtgcagcttgggcggcccagcggatcgtgccgcggcggccgagcgcagctacaggagggtgtccagaagccacaagccatggctgtggggaacatcaacgagctgcccgagaacatcctgctggagctgttcacgcacgtgcccgcccgccagctgctgctgaactgccgcctggtctgcagcctctggcgggacctcatcgacctcgtgaccctctggaaacgcaagtgcctgcgagagggcttcatcactgaggactgggaccagcccgtggccgactggaagatcttctacttcttacggagcctgcacaggaacctcctgcacaacccgtgcgctgaagaggggttcgagttctggagcctggatgtgaatggaggcgatgagtggaaggtggaggatctctctcgagaccagaggaaggaattccccaatgaccaggttcgcagccaggccagattgcgggtccaagtaccagctgtgcgttcagctcctgtcgtccgcgcacgcgcctctggggaccttccagccagacccggcgaccatccagcagaagagcgatgccaagtggagggaggtctcccacacattctccaactacccgcccggcgtccgctacatctggtttcagcacggcggcgtggacactcattactgggccggctggtacggcccgagggtcaccaacagcagcatcaccatcgggcccccgctgccctgacaccccctgagcccccatctgctgaaccctgactggtaaacaactgctgtcagaaaagggctgggcttgggaaggggaggtggaggccaggtgtccccagacctctaacccttgcccctagcagcctcttctttgtggagcctctcagtgtgggcagccctcgcatgctggggtcgggccagctctccccgaaaggtcttgacctgaatgatggccggggaagcctgcgtgtgcccctttcagagacggagcacctgagatgtgggaggtgcagcatgttcccctgggcccctcagaaagtcgagcttggaggccagcctggatctgtctctcccttcccctcctgggaccattctacctgtgttctttgaccctcggagcaaggacagggcaagacaactggcaagctttgcagctgccctgatggtgcaggtgcagggaggtgaccatgtaactctgaccaatctgggaagtggagggtgggctcatgggccgtgctctgcccctgtctgctgctcccagtctctcgctctgcctgcctgctcagaagaggtggctttggcccagaggctcaggccgggactgagatggacagacccaggtggggtggggtcccaggtcgggtgtggactgtcctcactgtcagtggagccccagaagctagatgggtaccaggtggggttaggttcccagaggactgagggaatcctgtacaggatgtcccagggtagatggggagcaggattgggacctgctctgacagctggacacatgagccctggatgagtatggtagggggtttgaagaatcccctgtccacctcccaaatccaggcccggccccctctggcttggagagcattccaagcccccaccccacccctagaactgccattcccaagacctctgtctcccagccaaccacccttggaacttgcctcttgtcctgctggaaagatagcagtgttctcctgacttcgccctactgcatgcagccaaataaaaggtgtgcccagtctaaaaaaa

SEQ ID NO: 350747 - DNA, 1067 bp, Homo Sapiens
ggtccggaattcccgggatggcctcgcttcccaggcaagcgcaggtccaggcggtgcagcttgggcggcccagcggatcgtgccgcggcggccgagcgcagctacaggagggtgtccagaagccacaagccatggctgtggggaacatcaacgagctgcccgagaacatcctgctggagctgttcacgcacgtgcccgcccgccagctgctgctgaactgccgcctggtctgcagcctctggcgggacctcatcgacctcgtgaccctctggaaacgcaagtgcctgcgagagggcttcatcactgaggactgggaccagcccgtggccgactggaagatcttctacttcttacggagcctgcacaggaacctcctgcacaacccgtgcgctgaagaggggttcgagttctggagcctggatgtgaatggaggcgatgagtggaaggtggaggatctctctcgagaccagaggaaggaattccccaatgaccagcacctgcctcaagtcccaggtggtggacctcaaggccgaagggtattgggaggagctgatggataccacacggccggacatcgaggtcaaggactggttcgcagccaggccagattgcgggtccaagtaccagctgtgcgttcagctcctgtcgtccgcgcacgcgcctctggggaccttccagccagacccggcgaccatccagcagaagagcgatgccaagtggagggaggtctcccacacattctccaactacccgcccggcgtccgctacatctggtttcagcacggcggcgtggacactcattactgggccggctggtaccggccccaagggtcaccaacagcagcatcacccatcggggcccccgctgccctgacaccccctgagcccccatctgctgaaaccctgactgggaaacaaatggctgtccaaaaaaggccggggcttggggaaaaaggaagggggaaagccccaggggtccccccaaaacccttaacccctggccccaaaaaggcctcctttcttgggggaagccctcttacatggggggaagcccctcaaaatgctag

SEQ ID NO: 350748 - DNA, 829 bp, Homo Sapiens
tgggattcgttcctctggtctgcgagagagatcctccaccttccactcatcgcctccattcacagccaggctccagaacttcgaacccctcttcagcgcacggtttgtgcaggaggttcctgtgcagggctccgtaagaagtagaagatcttccagtcggccacggcctggtcccagtcctcagtgatgaagccctctcggcaggcacttgcgtttccagagggtcacgaggtcgatgaggtcccgccaagaggctgcagaccaggcggcagttcagcagcagctggcgggcgggcacgtgcgtgaacagctgccagcaggatgttctcgggcagctcgttgatgttccccacagccatggcttgtggcttctggacaccctcctgtagctccaggggtcactggggcggtccaaggagcttgggacacatcaggtactttaataaaaggtgagctctgatttttttctctggcctctcacaatagaggtggaaggcactgcccaaggtcaaaaataagggcagagggggaagaagcccggatcttctttgattccagggccagcctttttcagtaggccagtctttaatggggatataatgcgcagccgggcagagcaccccaggcctccggtgccgtcaccatcctctctcccatcctcagaacatgatgggaggaggaggctaattatcactgcctcccgcggaggtccaaagggctccagccaccttctcaagatctcagaggacatgatctcctgcctgcgctcggccgccgcggcacgatccgctgggccgcccaagctgcaccgcctggacctgcgcttgcc

SEQ ID NO: 350749 - DNA, 840 bp, Homo Sapiens
gcttgggcggccagcggatcgtgccgcggcggccgagcgcagctccttggaccgccccagtgacccctggagctacaggagggtgtccagaagccacaagccatggctgtggggaacatcaacgagctgcccgagaacatcctgctggagctgttcacgcacgtgcccgcccgccagctgctgctgaactgccgcctggtctgcagcctctggcggggacctcatcgacctcgtgaccctctggaaacgcaagtgcctgcgagagggcttcatcactgaggactgggaccagcccgtggccgactggaacgatcttctacttcttacggagcctgcacaggaacctcctgcacaacccgtgcgctgaagaggggttcgagttctggagcctggatgtgaatggaggcgatgagtggaaggtggaggatctctctcgagaccagaggcaaggaattccccaattgaccaggttcgcagccaggccagattgcgggtccaagtaccagctgtgcgttcagctcctgtcgtccgcgcacgcgcctctggggaccttccagccagacccggcgaccatccagcagaagagcgattgccaagtggagggaggtctcccacgacattctccaactacccgcccggcgtccgctacatcttggtttcagcacggcggccgtgggaccactcattactgggcccggctggtacggcgccgagggtcaccaacagcaagcatcaccatcggggcccccgcttgccctgacaccccctgagcccccaatcagctggaaccctgaactggtaaaccaactgctgtcagaaaagggctggggttgggacggg

SEQ ID NO: 350750 - DNA, 1243 bp, Homo Sapiens
  misc_feature (1000)..(1009): n is a, c, g, or t
  misc_feature (1127)..(1130): n is a, c, g, or t
  misc_feature (1132)..(1132): n is a, c, g, or t
  misc_feature (1134)..(1134): n is a, c, g, or t
  misc_feature (1136)..(1136): n is a, c, g, or t
  misc_feature (1143)..(1143): n is a, c, g, or t
  misc_feature (1158)..(1158): n is a, c, g, or t
  misc_feature (1162)..(1162): n is a, c, g, or t
  misc_feature (1167)..(1167): n is a, c, g, or t
gtaaactaagaaaagagaacggaccggaattctttccatccggggcgggggtggggaccgtttcgcagcgcgtgacgcggcggcggggcccagcgacaacgaagccgaggccgtaggctcgggccgacctggagctccgccgctgcgcccaggccatggatgctccccactccaaagcagccctggacagcattaacgagctgcccgagaacatcctgctggagctgttcacgcacgtgcccgcccgccagctgctgctgaactgccgcctggtctgcagcctctggcgggacctcatcgacctcatgaccctctggaaacgcaagtgcctgcgagagggcttcatcaccaaggactgggaccagcccgtggccgactggaaaatcttctacttcctacggagcctgcataggaacctcctgcgcaacccgtgtgctgaagaggatatgtttgcatggcaaattgatttcaatggtggggaccgctggaaggtggagagcctccctggagcccacgggacagattttcctgaccccaaagtcaagaagtattttgtcacatcctacgagtttgctgccagagccgactgtggctgcacctaccaactcaaagtgcagctggcctcggctgactacttcgtgttggcctccttcgagcccccacctgtgaccatccaacagtggaacaatgccacatggacagaggtctcctacaccttctcagactacccccggggtgtccgctacatcctcttccagcatgggggcagggacacccagtactgggcaggctggtatgggccccgagtcaccaacagcagcattgtcgtcagccccaagatgaccaggaaccaggcctcctccgaggctcagcctgggcagaagcatggacaggaggaggctgcccaatcgccctaccgagctgttgtccagattttctgacagctgtccatcctgtgtctgggtcagccagaggttcctccaggcaggagctaaccatnnnnnnnnnncagtgaagtccctgtaccagcgactcctgccccggttcaaccctacccagctgtgggtaacttactgtcacatagctccggacgttttggtgtaataaatggttttcaggccgggccnnnnanancnccacccnaaaccacaccatatnaacntcccnaagggcggcccgctctaaagtattcccccaggggcccaacttacccgtacccactttctttgaaaaaaaggggccc

SEQ ID NO: 350751 - DNA, 1166 bp, Homo Sapiens
agcgagaggtccaggcggtgcagcttgggcggcccagcggatcgtgccgcggcggccgagcgcagctacaggagggtgtccagaagccacaagccatggctgtggggaacatcaacgagctgcccgagaacatcctgctggagctgttcacgcacgtgcccgcccgccagctgctgctgaactgccgcctggtctgcagcctctggcgggacctcatcgacctcgtgaccctctggaaacgcaagtgcctgcgagagggcttcatcactgaggactgggaccagcccgtggccgactggaagatcttctacttcttacggagcctgcacaggaacctcctgcacaacccgtgcgctgaagaggggttcgagttctggagcctggatgtgaatggaggcgatgagtggaaggtggaggatctctctcgagaccagaggaacggaattccccaatgaccaggtcaagaaatacttcgttacttcatattacacctgcctcaagtcccaggtggtggacctcaaggccgaagggtattgggaggagctgatggataccacacggccggacatcgaggtcaaggactggttcgcagccaggccagattgcgggtccaagtaccagctgtgcgttcagctcctgtcgtccgcgcacgcgcctctggggaccttccagccagacccggcgaccatccagcagaagagcgatgccaagtggagggaggtctcccacacattctccaactacccgcccggcgtccgctacatctggtttcagcacggcggcgtggacactcattactgggccggctggtacggcccgagggtcaccaacagcagcatcaccatcgggcccccgcgtgccctgacaccccctgagcccccatctgctgagacccatgactgtgtaaatcaacgtgactgtgcagtaccagggctgggcttggtgaaggggaggtggaggccaggtgtgcccagacctctaaccgcattgacccatagcagcctcttgcttgtggaggcctctcagggtgggcaggccctcgagatgcatggggtcgggccagctgctccccgaaaggtcttgacctgaatgatggccgaggaagcctgcgtgtgcacctttcagagacggagcacctgagatgtgggaggtgcagcatgtcaccc

SEQ ID NO: 350752 - DNA, 1034 bp, Homo Sapiens
  misc_feature (137)..(158): n is a, c, g, or t
  misc_feature (829)..(829): n is a, c, g, or t
cggctggaccggtccggattcctgcgatcattactggaatacagaaaatatttcattttattaaactgtgttttttaaaaaaggatttttacatgtaagagatctatcttacatagtttctttacctgtctatttcnnnnnnnnnnnnnnnnnnnnnngcagatcacaacagtatcaggaaatgagttccttctacagtcagatattgacttcatcatattggattggttccacgctatcaaaaatgcaattgacagattgccaaaggattcaagttgtccatcaagaaacctggaattattcaaaatccaaagatcctctagcactgaattgctaagtcactacgacagtgatataaaagaacagaaaccagagcacagaaaatctttaatgttcagactgcatcacagtgcttccgatacaagcgacaaaaatcgagttaaaagcagattaaagaagtttattacccgaagaccttccctgaaaactctgcaagaaaaaggacttattaaagatcaaatttttggctctcatctgcacaaagtgtgtgaacgtgaaaattccacagttccgtggtttgtaaagcaatgcattgaagctgttgagaaaagaggtctagatgttgatggaatatatcgagttagtggcaatctggcaacaatacagaagttaagatttattgtcaaccaagaagagaagctgaatttggacgacagccagtgggaggacatccacgttgtcaccggagcactgaagatgttttttccgggagctgcctgaaccgctcttcccttacagtttcctttgagcagtttggtggaagcgatcnaaaaagcaagaccaccacccccagaattgaaggctggtaaaattctcttgtaacaaaaacttccttccggcccaatcggtgacacccatggaaagttccttctttgggaaatcttaactaagaaatatggcccaaaagccttccaagaaaccttcatggtcaccccaaaaagcttggggggattggtaatttggaacccttcccc

SEQ ID NO: 350753 - DNA, 1050 bp, Homo Sapiens
  misc_feature (50)..(86): n is a, c, g, or t
  misc_feature (446)..(498): n is a, c, g, or t
  misc_feature (671)..(733): n is a, c, g, or t
gggtgtatcgactactatagggcgaacctggagttacgcggtggcggcgnnnnnnnnnnnnnnnnnnnnnnnnnnnnnnnnnnnnnatcaggccaaatcggccgagctcgaattcgtcgagagcgggccgcgccccgcgcagcgctgggccagtgacgcacccccaccgcgtcgtaggaaaattacctggtgtggggggtggggcggaaggcacctcctataccccgactccgcctgggccacccgcccctcaccctcggcctgacccagcctctccgtgcctcccctagccgcctcctcccagcagtcccccaggagcgagctgcgagatgccccaaatcggacccctccccagttggaaaaaaaacgactcctgacctttcccagcctcctcggtccgctgaggaacccgcagcccggggcctcgagcagactgctgggactgnnnnnnnnnnnnnnnnnnnnnnnnnnnnnnnnnnnnnnnnnnnnnnnnnnnnncctttaagaggcgcggtcgccgggaccgacacagacgcggacagcgccgggactcgccgccccgggactcgcgcagcccgcagcgctccggctcctcctctcgcgaccgcctccgcagcgatggacggagacggtgacccagagagcgtgggccagcccgaggaggcaagccnnnnnnnnnnnnnnnnnnnnnnnnnnnnnnnnnnnnnnnnnnnnnnnnnnnnnnnnnnnnnnnggcggggccggcgcagcgtacctggacgagctgcgcgagccgtgtgcttgcgcgtgctgggcgcactgccggccgccgagctggtgcagggctgccgctggtgtgcctgcgctggaagagctgggacgggcccgtgtggtgccagtgcgcggagggtgtcccccagggggtgaggggagccaccgggcgggtcattcgcgaggggccgacttggttcccggtggagcctcggcggtcgctgcctctcggacctggcgccccggaagggtgcccgaaggaacccctcggggacgcgccccgctgcgcccccgcagccc

SEQ ID NO: 350754 - DNA, 815 bp, Homo Sapiens
agcgggaggtgcagcttgggcggcccagcggatcgtgccgcggcggccgagcgcagctacaggagggtgttccagaagccacaagccatggctgtggggaacatcaacgagctgcccgagaacatcctgctggagctgttcacgcacgtgcccgcccgccagctgctgctgaactgccgcctggtctgcagcctctggcgggacctcatcgacctcgtgaccctctggaaacgcaagtgcctgcgagagggcttcatcactgaggactgggaccagcccgtggccaactggaagatcttctacttcttacggagcctgcacaggaacctcctgcacaacccgtgcgctgaagaggggttcgagttctggagcctggatgtgaatggaggcgatgagctggaaggtggaggatctctctcgagaccagaggaaggaattccccaatgaccaggtcaagaaatacttcgttacttcatattagtaagatccggggcactcgcgggtaggggaaagcccaaatcaatttaccctggcggctctctcccaccctagaaggcgcagtcctagcccatcactgcctagtggtgagcccagccctccaccctctgctggcccaggactgctcaagtcccaggtggtggacctcaaaggccgaagggtattggggaggagctgatggataccacacggccggacatcggaggtcaaagaactggatccgcaggccaggccagattgcgggtacaagtaacaagacgtgcgttcagatacctgtacgtcggagcacgcgccctggaaaccttcaaacgaaaccg

SEQ ID NO: 350755 - DNA, 740 bp, Homo Sapiens
  misc_feature (274)..(327): n is a, c, g, or t
  misc_feature (513)..(571): n is a, c, g, or t
agcgggggaaattacctggtgtggggggtggggcggaaggcacctcctatactccgactccgcctgggccacccgcccctcaccctcggcctgacccagcctctccgtgcctcccctagccgcctcctcccagcagtcccccaggagcgagctgcgagatgccccaaatcggacccctccccagttggaaaaaaaacgactcctgacctttcccagcctcctcggtccgctgaggaacccgcagcccggggcctcgagcagactgctgggactnnnnnnnnnnnnnnnnnnnnnnnnnnnnnnnnnnnnnnnnnnnnnnnnnnnnnncctttaagaggcgcggtcgccgggaccgacacagacgcggacagcgccgggactcgccgccccgggactcgcgcagcccgcagcgctccggctcctcctctcgcgaccgccctccgcagcgatggacggagacggtgacccagagagcgtgggccagcccgaggaggcaagcccggaggagcagcnnnnnnnnnnnnnnnnnnnnnnnnnnnnnnnnnnnnnnnnnnnnnnnnnnnnnnnnnnngccgccgcagcgtacctggacgagctgcccgagccgctgctgctgcgcgtgctggccgcactgccggccgccgagctggtgcaggcctgccgcctggtgtgcctgcgctggaaggagctggtggacggcgccccgctgtggctgctcaagtgccagcaggaggggctgg

SEQ ID NO: 350756 - DNA, 1404 bp, Homo Sapiens
cgtttttgttgaaagagtcattaacagttaggagttgatggcagtttcaataacaggtcattgccgagaaaaggatagcactataatatgcagaaatctacaaattctgatacttccgtggaaacactgaattctacccgccaaggcacaggagctgtgcaaatgagaatcaaaaatgccaacagccaccatgacaggctcagccaaagtaaatccatgatcctcaccgatgtcgggaaggtcactgaacctatatccagacacagaaggaatcattcacagcatatcttgaaagatgtcattcctccattggaacaactgatggttgaaaaagaaggttatctgcaaaaagctaaaattgcagatggaggaaagaaactaaggaaaaactggtctacttcctggattgttctttctagtcgaagaattgaattttacaaagaatccaagcaacaggctctgtccaatatgaaaactgggcacaaaccagaaagtgtggatttgtgtggagcacacattgaatgggccaaggaaaaatcgagcagaaagaatgtctttcagatcacaacagtatcaggaaatgagttccttctacagtcagatattgacttcatcatatcggattggttccacgctatcaaaaatgcaattgacagatggccaaaggattcaagttgtccatcaagaaacctggaattattcaaaatccaaagatcctctagcactgaatgctaagtcactacgacagtgatataaaaagaacagaaaccaggagcacagaaaatctttaatgttcagactgcatcacagttgcttcccgatacaagcgacaaaaatcgagttaaaagcagattaaagaagtttattacccgaagaccttccctgaaaactctgcaagaaaaaggacttattaaagatcaaatttttggctctcatctgcacaaagtgtgtgaacgtgaaaattccacagttccgtggtttgtaaagcaatgcattgaagctgttgagaaaagaggtctagatgttgatggaatatatcgagttagtggcaatctggcaacaatacagaagttaagatttattgtcaaccaagaagagaagctgaatttggacgacagccagtgggaggacatccacgttgtcaccggagcactgaagatgtttttccgggagctgcctgagccgctcttcccttacagtttctttgagcagtttgtggaagcgatcaaaaagcaagaacacaacacaagaattgaagctgtaaaatctcttgtacaaaaactcccatcccttgctccgatcccagcccctgagcagggagagagaagttttgttggcataggtttgcttaggtagccggcttctagaatgtagatccgtgagggcgtgagcttggactggacc

SEQ ID NO: 350757 - DNA, 410 bp, Homo Sapiens
tttctagtaagattcaacattatgaaaatattttgaattaagcaatgacacatgaggctggaaaaactggtctacttcctggattgttctttctagtcgaagaattgaattttacaaagaatccaagcaacaggctctgtccaatatgaaaactgggcacaaaccagaaagtgtggatttgtgtggagcacacattgaatgggccaaggaaaaatcgagcagaaagaatgtctttcagatcacaacagtatcaggaaatgagttccttctacagtcagatattgacttcatcatattgggattggttccacgctatccaaaaatgccaattgacagattgccaaaggattccaagttgtccattcaaggaaacctgggaattatttcaaattccaaaggttcctctaggc

SEQ ID NO: 350758 - DNA, 2233 bp, Homo Sapiens
  misc_feature (21)..(21): n is a, c, g, or t
ggtccggaattcccgggatanacagcaggctggcacaaaggccttatctgtgcaggagcattccagagccaagttcccagatgccagcctagggcagcgctgtaacaagcccttctgaagctaggtctgctttgttaactctgtcttgtacagttgtgttgcttcattgtagttttctcatatgatctactctaacactgtattctttatttcagtttgagccccagctacatagatctgactgagtgtccctacatgtggccctactgctcccagcccatctactatggaggaatgccgacagttgttaatgtcaccatcctcaacggcatgggagtcacaggaagaattgtagataagcctgactggcagccctatttgccacagaacggagacaacattgaagttgccttctcctactcctcggtcttatggccttggtcgggctacctggccatctccatttctgtgaccaagaaagcggcttcctgggaaggcattgctcagggccatgtcatgatcactgtggcttccccagcagagacagagtcaaaaaatggtgcagaacagacttcaacagtaaagctccccattaaggtgaagataattcctactcccccgcgaagcaagagagttctctgggatcagtaccacaacctccgctatccacctggctatttccccagggataatttaaggatgaagaatgaccctttagactggaatggtgatcacatccacaccaatttcagggatatgtaccagcatctgagaagcatgggctactttgtagaggtcctcggggcccccttcacgtgttttgatgccagtcagtatggcactttgctgatggtggacagtgaggaggagtacttccctgaagagatcgccaagctccggagggacgtggacaacggcctctcgctcgtcatcttcagtgactggtacaacacttctgttatgagaaaagtgaagttttatgatgaaaacacaaggcagtggtggatgccggataccggaggagctaacatcccagctctgaatgagctgctgtctgtgtggaacatggggttcagcgatggcctgtatgaaggggagttcaccctggccaaccatgacatgtattatgcgtcagggtgcagcatcgcgaagtttccagaagatggcgtcgtgataacacagactttcaaggaccaaggattggaggttttaaagcaggaaacagcagttgttgaaaacgtccccattttgggactttatcagattccagctgagggtggaggccggattgtactgtatggggactccaattgcttggatgacagtcaccgacagaaggactgcttttggcttctggatgccctcctccagtacacatcgtatggggtgacaccgcctagcctcagtcactctgggaaccgccagcgccctcccagtggagcaggctcagtcactccagagaggatggaaggaaaccatcttcatcggtactccaaggttctggaggcccatttgggagacccaaaacctcggcctctaccagcctgtccacgcttgtcttgggccaagccacagcctttaaacgagacggcgcccagtaacctttggaaacatcagaagctactctccattgacctggacaaggtggtgttacccaactttcgatcgaatcgccctcaagtgaggcccttgtcccctggagagagcggcgcctgggacattcctggagggatcatgcctggccgctacaaccaggaggtgggccagaccattcctgtctttgccttcctgggagccatggtggtcctggccttctttgtggtacaaatcaacaaggccaagagcaggccgaagcggaggaagcccagggtgaagcgcccgcagctcatgcagcaggttcacccgccaaagaccccttcggtgtgaccggcagcctggctgaccgtgagggccagagagagccttcacggacggcgctggtgggtgagccgagctgtggtggcggctggtttaaaagggatccagtttccagctgcaggtttgttagagtctgttctacatgggcctgccctcctgtgatgggcagaggctcctggtacatagggcagggacgtcctgctgaggggacacctggcccccagcgccctgcatgcaccaagcagcggaggtctggggtagacctgctatgcacagggtctggaaggggggcgtttcagggctcagagggcgactg

SEQ ID NO: 350759 - DNA, 610 bp, Homo Sapiens
atgaagctggaaaaggagatgggttccttggaaatggggtcagattccaccaagagaaccgaccgccataaggaagggatccgagttcacacccagtggctggcctgtgttcagaacaggacccccctgtggtcccagggaaccgtcgagccgtcctcgaggtggcagcggagcacgagtccaaggagttggccgctctctagggaaaatccgaggttctttcatactttcttggggacgctggtgataatgggcttgggccgggttttgaaaaggatcttgtctttgatgagtgctgtcaccaggtaccgggtgccagtctcgcggccaagctcatcacagtcctgatccccaggagtgtgtttgacaaggactgcaaaaggtttctccaggtggatgattttcccatacaggatatgatgccccacgatcagcacagggatcccctggaaataacaatttgcaccatgagctttctgtctttaaaaagcaagtgaaaacaagctgcaatggcggccgccgagcgcggcgccgcgcggccaacgggcgacaaccgaacctcccgccgccgtcgccgccgccgcgagcactgcctgcgcactcccccgct

SEQ ID NO: 350760 - DNA, 2855 bp, Homo Sapiens
agcgggggctgtgctcgcggcggcggcgacggcggcgggaggttcggttgtcgcccgttggccgcgcggcgccgcgctcggcggccgccgttgcagtgcgagggctggaggcctggcagaatgggtgctgatggagctacagggggagatcgaggctcgctacagcactggattagctggaaacctcctgggagacctacattacaccactgagggaatccctgtgctgatcgtggggcatcatatcctgtatgggaaaatcatccacctggagaaaccttttgcagtccttgtcaaacacactcctggggatcaggactgtgatgagcttggccgcgagactggcacccggtacctggtgacagcactcatcaaagacaagatccttttcaaaacccgccccaagcccattatcaccagcgtccccaagaaagtatgaaagaacctcggattttccctggagagcggccaactccttggactcgtgctccgctgccacctcgaggacggctcgacggttccctgggaccacaggggggtcctgttctgaacacaggccacccactgggtgtgaactcggatcccttccttatggcggccggttctcttggtggaaatctgaccccatttccaaggaacccatctccttttccagcttcatcaggctcattggcttcaaatccagcacctttcccggctggtgctcgtgacccaagtatggcttcttttccaagagggatgaatcccactggcacaggtgcagtttctttcccaaggcctggtggcctcttggggccaggcccaggcccaggccccaccctaaaccctaggacaggggctctgccaggcccagggcctctgtctaaccccaggttagggggtctcccaggaccaggtcctatgtccaacccaagggcaggtggtctcctgggagcaggtcctgaccccagaggtggtggtcccatgggccctggatctggacctaacctgagagccggtgttctgttaacctctgggaatggtcctcccaatcctaggccagttggcctgggcccaggaccaaaccccaatctgagatcaggctttttagggacaaaccctgcccccaggtcaggtgtgtttccaggcccaggccttgggcccaacccaagaccaagtggcctgggcccaggccctaatctagatgccagagcaggtggcctcttgggcacaggatctggtcttaacttaagaatggctggacctcaaggcctcgatcttgcccccattctaagagcagcaggtcttttaggagcaaattcagcttctttctcacaggcttctggaaacatgggcacaagcccatcctccatggcaagagtacctggccccatgggcccaaactcgggtcctagctctcggggaattggccttccagggccaaatccatctcccatgtcaagggctcctggccccataggccctaattcagctcatttctcaaggccagttggccccatgggggtaaatgccaatccctttcccaggggagcaggttcatctgccttttctcagtcttctggcacattggcatcaaacccagctaccttccaaaggtccgctggcctccagggctcaaatccaaccattttcccaagagcctctgggccacttggccccaacccagctaacttcccaagggccactggcctgcagggtccaagtccaactaccttcccaaggtctactggcccattaggccctggtcaagttactttccccaggccagctgccgggcatctgggcccttctccagctggccctgtgggtatcaacccagctcctttcacaaggccaactgggaccctgggtctcaacccagcttcctttccaaggatgaatggccctgcaggcaagagtttcgtcccatttcctagagtggggagcctccctggcacaaacccagctgctttccccagaccagggggtccaatggctgcaatgtacccaaatggaatgttgcccccttaaacaccattttccctccaggaccaccttggtttctaggcactgtggttcttggcaggggctgtcttaggtaaaagggtagttgtggagctacagtctgaagaacatagcttgggctcaagttcaaatgagccatctttttcctttgcgtttttcttgactgaaggtgagatgttatttgtggcatgtgaactgtggcaggtgggaataatctctgcccttgagagaaaggatctccagcctcccagaagcctgctgtgctttcgtcccacagctttctgcacattgtatcttactagtttcttgaattgttcttgtggacttttcctcagggatacattggcctgcaggtcccagttcacatgtagtcccctgctcaccattggagaatcagctcactgctctctagaaacgtggcgttggtgaacggaccatgcttccgtagctctgacctgggcagcttggacctggtcatcctctactgccatacctttccctgggggcttgaacacagaacagggagatggacaaccacttcaaagaaagacccaccgaatgcagtttctgcttgactgactgggcctgcagctcccttctcctgggacttagaggtggccagatttaaggcccctctactcatccaactccctcttcactggtactcccaatcaatcaaagaacctcaaaatttaaactgatgtggatgggaatatgggaattagggtgggggtgggggatgaagggaagaaatcactgtgctttgttcggcctggtgtgcaaggatggttggtggttttcctgcattgtatcttttcttactgtttctttaataaatgggatgagagggc

SEQ ID NO: 350761 - DNA, 1013 bp, Homo Sapiens
agtgctcgcggcggcggcgacggcggcgggaggttcggttgtcgcccgttggccgcgcggcgccgcgctcggcggccgccattgcagcttgttttcacttgctttttaaagacagaaagctcatggtgcaaattgttatttccagtgcgagggctggaggcctggcagaatgggtgctgatggagctacagggggagatcgaggctcgctacagcactggattagctggaaacctcctgggagacctacattacaccactgagggaatccctgtgctgatcgtggggcatcatatcctgtatgggaaaatcatccacctggagaaaccttttgcagtccttgtcaaacacactcctggggatcaggactgtgatgagcttggccgcgagactggcacccggtacctggtgacagcactcatcaaagacaagatccttttcaaaacccgccccaagcccattatcaccagcgtccccaagaaagtatgaaagaacctcggattttccctagagagcggccaactccttggactcgtgctccgctgccacctcgaggacggctcgacggttccctgggaccacaggggggtcctgttctgaacacaggccacccactgggtgtgaactcggatcccttccttatggcggccggttctcttggtggaaatctgaccccatttccaaggaacccatctccttttccagcttcatcaggctcattggcttcaaatccagcaccttcccggctggtgctcgtgacccaagtatggcttcttttccacagagggcatgatcccactggcacaggtgcagtttctttcccaaaggcctggtggcctcttggggccaggcccaaggcccaaggcccccaccctaaaccctaaggacaggggctcttgccacgcacaaggacctactgccataaccccaagataaacggggtcacccaggaaccaggtcctatttccaaacccaagccaaggtggcctctggagagcaggtcccgacacacag

SEQ ID NO: 350762 - DNA, 1951 bp, Homo Sapiens
  misc_feature (13)..(13): n is a, c, g, or t
ctctcgtccccgngcccccaacaaccccacccacccagtaaaaacaagaacaccgctggtaccggtccggaattcccgggatcacgactgttgtcagggccgcgccccacaaaagcggatggggggcccaggcacccccagagccccactccgcctggctctgcccggcctccctgcggccttggagggccggccggaggaggaggaggaggacagtgaggacagcgacgagtctgacgaggagctccgctgctacagcgtccaggagcctagcgaggacagcgaagaggaggcgccggcggcgcccgtggtggtggctgagagccagagcgcgcgcaacctgcgcagcctgctcaagatgcccagcctgctgtccgagaccttctgcgaggacctggaacgcaagaagaaggccgtgcccttcttcgacgacgccaccgtctacctctttgaccaggaaagccccacccgggagctcggggagcccttcccgggcgccaaggaatcgccccctacgtcccttagggggagccccggctctcccaacgcccccaaccggccgcagcaggctgatggctccccaaatggctccacagcggaagagggtggtgggttcgcgtgggacgacgacttcccgctgatgacggccaaggcagccttcgccatggccctagacccggccgcacccgccccggctgcgcccacgcccacgcccgctcccttctcgcgcttcacggtgtcgcccgcgcccacgtcccgcttctccatcacgcacgtgtctgactcggacgccgagtccaagagaggacctgaagctggtgccgggggtgagagtaaagaggcttgagacctgggcagctcctgcccctcaaggctggcgtcaccggagcccctgccaggcagcagcgaggatggtgaccgagaaggtggggaccacgtcctggtggctgttggcagcagattcaggtgcctctgccccacgcggtgtcctggagaagcccgtgggatgagaggccctggatggtagatcggccatgctccgccccagaggcagaattcgtctgggcttttaggcttgctgctagcccctgggggcgcctggagccacagtgggtgtctgtacacacatacacactcaaaaggggccagtgcccctgggcacggcggcccccaccctctgccctgcctgcctggcctcggaggacccgcatgccccatccggcagctcctccggtgtgctcacaggacacttaaaccaggacgaggcatggccccgagacactggcaggtttgtgagcctcttcccaccccctgtgcccccacccttgcctgggttcctggtggctcagggcaaggagtggccctgggcgcccgtgtcggtcctgtttccgctgcccttatctcaaagtccgtggctgtttccccttcactgactcagctagacccgtaagcccacccttcccacagggaacaggctgctcccacctgggtcccgctgtggccacggtgggcagcccaaaagatcaggggtggaggggcttccaggctgtactcctgccccgtgggccccgttctagaggtgcccttggcaggaccgtgcaggcagctcccctctgtggggcagtatctggtcctgtgccccagctgcaaaaggagagtgggggccatgccccgcagtcagtgttggggggctcctgcctacagggagagggatggtggggaaggggtggagctgggggcagggcagcacagggaatatttttgtaactaactaactgctgtggttggagcgaatggaagttgggtgattttaagttattgttgccaaagagatgtaaagtttattgttcttcgcagggggatttgttttgtgttttgtttgaggcttagaacgctggtgcaatgttttcttgttccttgttttttaagagaaatgaagctaagaaaaaag

SEQ ID NO: 350763 - DNA, 996 bp, Homo Sapiens
  misc_feature (712)..(833): n is a, c, g, or t
  misc_feature (842)..(842): n is a, c, g, or t
  misc_feature (873)..(873): n is a, c, g, or t
  misc_feature (882)..(882): n is a, c, g, or t
  misc_feature (901)..(901): n is a, c, g, or t
  misc_feature (906)..(906): n is a, c, g, or t
  misc_feature (915)..(915): n is a, c, g, or t
  misc_feature (920)..(920): n is a, c, g, or t
  misc_feature (926)..(926): n is a, c, g, or t
  misc_feature (945)..(945): n is a, c, g, or t
  misc_feature (967)..(967): n is a, c, g, or t
  misc_feature (976)..(976): n is a, c, g, or t
ggggcgaccagaggattcttcccggaaggcattcctgccgcgctccccggggcacccctcaattgtgtactacgtccttgtttagtgtgtatccgtgcccacgtagatgatgtctgtaacgtagttttgtttgaaatatgagaatatgcggcttaaactttgatctgtaaggagcggggccgtggccgtttggagcacgctgtagacaccgttcctcatgctgccgggtgggttttgcagaagctcccttagtgatttcatgtttaacaggcagcatccattttcagaatttcctggcattgatttatattttgaagcatacaggaaacttctcgtttcctcgtttagccccacccagatcaggtgaaagggcagctttaatggtggtttttatggaccacattatcagagagcactgtgcaagccaaatggttcaataatgaatgaaaattctgggtgtaaagagtaaatatgccctggctctttctaccaatgtttgctcctggttggaaagaaaccaaagatttaagacgggctgctcttccagactggctgtgcctgcctgtgcccagcaacctgtgcagccggcagtgtgcctggtgtcacgccaggaggctgtggctgctgtgggcccctctggaattggtgctcctcacaaagtttccccaaaaggttcttctaagcctttattgtcccgggtaaatgtttcccnnnnnnnnnnnnnnnnnnnnnnnnnnnnnnnnnnnnnnnnnnnnnnnnnnnnnnnnnnnnnnnnnnnnnnnnnnnnnnnnnnnnnnnnnnnnnnnnnnnnnnnnnnnnnnnnnnnnnnnnnntattaaaantacacaatttaggccatcttgttgggcgcancttgtcaantttcagttattaggggaanttganggaggagantcgtntgaaanccaagaggttgaagtttcngttaccaaggattgcggcattnatttcagcnggggaaacaaagggagattc

SEQ ID NO: 350764 - DNA, 640 bp, Homo Sapiens
  misc_feature (194)..(205): n is a, c, g, or t
  misc_feature (222)..(292): n is a, c, g, or t
tgtaaatgtagaaactttatttgtgtgtggcaacaggtctagagtgtataccaactctagggagttggaggtgctagagaagggagggcttcaatttcttgctttatgtttcagattatttgaagttttttcaacaaatatatttcacttttagattatagaaaatgtttatgttacagaaaatatttaatacnnnnnnnnnnnnaagacatggggacttgnnnnnnnnnnnnnnnnnnnnnnnnnnnnnnnnnnnnnnnnnnnnnnnnnnnnnnnnnnnnnnnnnnnnnnncaggcatgcaccaatgatatttaatactttgacatcaaagagacttaggttcataaagaagatatattgaggacctcaactaatgtagacagtggtaaaatggacatcaaacgatggtctgtcaagttaaaatattgcaaagttaaaaaatgagcctgctgggcacggtggacatatccaatgtcttagcaaaagttgattttacctaaaatattaatattgtatttatgcaggaataaaaaattcttttgaacagaaacatattactcagactaaatctacaaatgcaactaattcaaagtcaaagacgttggagctgaagacccagcagagatgtctaatatgtgt

SEQ ID NO: 350765 - DNA, 911 bp, Homo Sapiens
caacaagcacatacgaagcgaggcctgggtggcgatttcggcacgagggggggttccccgcgccgcagccatggagcagcttcgcgccgccgcccgtctgcagattgttctgggccacctcggccgcccctcggccggggctgtcgtagctcatcccacttcagggactatttcctctgccagtttccatcctcaacaattccagtatactctggataataatgttctaaccctggaacagagaaaattttatgaagaaaatgggtttctagtaatcaaaaatcttgtacctgatgccgatattcaacgctttcggaatgagtttgaaaaaatctgcagaaaggaggtgaaaccattaggattaacagtaatgagagatgtgaccatttcgaaatccgaatatgctccaagtgagaagatgatcacgaaggtccaggatttccaggaagataaggagctcttcagatactgcactctccccgagattctgaaatatgtggagtgcttcactggacctaatattatggccatgcacacaatgttgataaacaaacctccagattctggcaagaagacgtcccgtcaccccctgcaccaggacctgcactatttccccttcaggcccagcgatctcatcgtttgcgcctggacggcgatggagcacatcagccggaacaacggctgtctggttgtgctcccaggcacacacaagggctccctgaagccccacgattaccccaagtggggaggggggagttaacaaaatgttccacggggatccaggactacgaggaaaacaaggcccgggtgcacctggttgatggagaagggcgacactgttttcttccatcctttgctcatccacgggatctggtcagaataaaacccagggattccgggaagcaatttcc

SEQ ID NO: 350766 - DNA, 913 bp, Homo Sapiens
  misc_feature (693)..(730): n is a, c, g, or t
cttgatttggcttagctagaaagtgcgtgttgagacacttgacaaagtaggcagttcttttgctaaatgttggcttcgtttgtaactggaagagctttatctctctgttttcagatccatgagctttatagcatagaaaatctgctgagaaaaatcatcatctaattggacatgtttttccagcatttatagctccataccatgacctgtatgattattatacagagctcctacatgaaattaaatgaaatggaccaaggcagacactggtcttcccttgcaaagctaggtctttgctgctggtctcctctctctctggacattacacaggctccggcctccatggaataattttgcacttctgctgcaagtagaacaagtcagccaagtggctgtgttcatagaggcagcattagactatcacagacagtccacagagattctgcaggagctgcagagcaagctacagatgcggtaagcacctccacgtttcttacaagccaagggctgcggaggtaacatctattgaaatccatctgtctgtctctccatctctccatctcccccttcccctgcctcattctgttttgaattttctttcactggctttcatggttggatgtgggatgggactgagataataagtactggctttggccagtaggatagaactgggaaaagggacctggcagnnnnnnnnnnnnnnnnnnnnnnnnnnnnnnnnnnnnnngtgacccgtgtttagggcaactaaccaagttgctctcccacctgggacatcaacccctacagaactaccctggcttcattgctgatttgatgagagtttaactccccattcacaaagggatggaaaacatccagagctatggaaaaaagtgagatgctgtatggaaaatatgtaaatatctgt

SEQ ID NO: 350767 - DNA, 1195 bp, Homo Sapiens
  misc_feature (653)..(665): n is a, c, g, or t
  misc_feature (879)..(889): n is a, c, g, or t
  misc_feature (913)..(921): n is a, c, g, or t
gaaaaccaaggagaattaggatttaaatgaatggtggacatcattacatttaaccaatcataactagatgaaaactggtatgaaggaatgatacacggagaatcgggattcttccccattaattacgtggaagtgatcgtgcctttacctcagtaaatgtgtaacacaaactctggacatactttcgtaactgaaatgaattcacaccagtgtgctctcagtgcggtgttctgtgacatcctttgctctctgaccaacttaatgacttttgtatgtgtgctctctttataatgtattttatatcactttaatttgtataaatgattttcttgtccttgctacatgaaaatattgttttcttttttgcttcctgtcctaaaagtcattggttaaatgtatttgcttcctgtggctaaaaataagtctcacccattgcagttatgtcaacgaatggcctatattcctcagctgcaatgaaatggtaacatttgaaactaagaaatgctaaatattttgtttctcgacattcctgatgacgtctggtcttttcttttcattgtattttaagcttacctgtgaatagcccaataaacatgacacactgtgttggcacttaccacgccccacccccttccattaaaccccctatccgnnnnnnnnnnnnngccgtcttaccccaaatggggcggcggttcccaaaaaattccccctagggggcccaactttttcgcggtccccctctttttttggaaaaaaaggggtcccttttaggagcccgctttttatacccccggccatcgcccgtcctttctcccccctcctgattggggaaaacccgtcacctggggaattctttgcgaaggaaaaccttaattttcnnnnnnnnnnnaacccaacgtggaaaccacgctannnnnnnnnaaatttctcaaccgtttatagggcgaacaaacaaatactttttataggggtataaagggggttaacaccacaatgtcccataacccttgtgtgcctcgaaaaaatttcttccttcttcgacgcgcgctctttgtaaaactattctttatccgggacgcctcggcgatcccattgggcggggggggttttttacatttcccaaaccccccgggcgttcctttctttcgcgcccctactttcccccacacgagtggttttgccgatcaacatcgca

SEQ ID NO: 350768 - DNA, 1458 bp, Homo Sapiens
  misc_feature (828)..(828): n is a, c, g, or t
agcgggtgcgtgtacgagtgtgacagcggctgtggctgtggccgtggccgtgggaggcgggcccggcggagcccagccgcggggggaccggcccgggctcccgctccccgagcgcgtcgcggccgcgtggcccagccgagccttgagaccaccccgcccctgccggtcgcagtcgcgatgtcggtggccgggctgaagaagcagttccacaaagccagccagctatttagtgaaaaaataagtggtgctgaaggaactaaactagacgatgaatttcttgacatggaaaggaaaatagatgttaccaataaagttgttgcagaaattctttcaaaaaccactgaatatcttcagccaaatccagcatacagagctaagctaggaatgctgaacactgtgtcgaagatccgagggcaggtgaagaccacaggatacccgcagacggaaggcttgctgggggactgtatgctgaaatacgggaaggagctcggggaagactccacctttggcaatgcattgatagaagttggtgaatccatgaagctaatggctgaggtgaaagactctcttgatattaatgtaaagcaaacttttattgatccacttcagttactacaagataaagatttaaaagagatcgggcatcacctgaaaaagctggaaggccgccgcctggattacgattataaaaagaaacgagtaggtaagataccagacgaagaagtcagacaagcggtagaaaaatttgaagagtcaaaggagttggctgaaagaagcatgtttaactttttagaaaatgatgtagaacaagtcagccagttggctgtngttcatagaggcagcattagactatcacagacagtccacagagattctgcaggagctgcagagcaagctacagatgcgaatatcagctgcatccagtgtccccagacgagaatacaagccaaggcctgtgaaaaggagttctagtgagctcaatggagtttccaccactctgtagtgaagacgacaggttctaacatttcccattagaacaggccttgttgtcggtggtctctatgaactttgaggccaggaaaaccaaggaggaattacggatttaaacgaaggggacatcacttacgattaaccacatcaaatacgatgaaaactggctatgaacggaatgatacacggagcaatcggggattcttccccaattaatttacggtggaacgtgattcgtgcactttaccttcagtaaaatgtgttaccacagaactcttggacataactttctgtaacttgaaattgaattcacaaccagtgtggctctcagatgcgagtgtttcttgtgacatcctttgggtctctgaccaacttaatgactttcgtatgtgtgctctctttataatgtattttataccactttaatttggtttaatgaatttcttgtccgtgctacatgaaaatatg

SEQ ID NO: 350769 - DNA, 408 bp, Homo Sapiens
  misc_feature (12)..(12): n is a, c, g, or t
  misc_feature (389)..(389): n is a, c, g, or t
ggtcgcagtcgnattgtcggtggccgggctgaagaagcagttccacaaagccagccagctatttagtgaaaaaataagtggtgctgaaggaactaaactagacgatgaatttcttgacatggaaaggaaaatagatgttaccaataaagttgttgcagaaattctttcaaaaaccactgaatatcttcagccaaatccagagctaagctagggaatgctgaacactgtgtcgaagatccgaggggcaggtgaagaccacagggataccccgcagacgggaaggctttgctgggggggactgtatgcttgaaatacgggggaagggagctccgggggaagacttccaccttttggggcattgcatttgatagggagtttgggtgattccnttgaaggcttattgggctt

SEQ ID NO: 350770 - DNA, 954 bp, Homo Sapiens
gaacgcagaggaccataacaaagaattgggatcaaaagaaccccgcagggggtttttttgttaaaaacacggaacacgggaaccacgtaactataacggtctaaggtcgcgaggcctgggtggcgaattcggcacgaggcacgcgtgacagttaccggctggagagccggaggtgggaccgggagcaggtgaccgtagaaccgggccgcgctcctcccctcctagagttcgtggaggcgcagcagagggccgtccctcttccggatgtcggactaagcgaacagcgcccccactgccggccggatagcagccggaagtgccagaccggaggtgcgtcattcaccggcgacgccgatacggttcctccaccgaggcccatgcgaagctttccactatggcttccagcactgtcccggtgagcgctgctggctcggctaatgaaactcccgaaataccggacaacgtgggagattggcttcggggcgtctaccgctttgccactgataggaatgacttccggaggaacttgatactaaatttgggactctttgctgcgggagtttggctggccaggaacttgagtgacattgacctcatggcacctcagccaggggtgtagccaagtagacaaatggaatcctgtgctgaacccgaatcttccaaaaaacagcctacaatctgtgaccaccacaagatgtgccctgatggcagctgaagtttgattcagatgggcacttttcttccccttccctgcctagtttccttttgttccttgagtccacgcagaattccattctctggtcagcagacaggcttaagctaaagtattgcctctattctgtaaagttctgtacatagttcccaagcttctgcagggggtgatttttgctcttgtcctgagaaataacagtgctgttttaaaaaacatttgaaataaataccgcacacaaaggc

SEQ ID NO: 350771 - DNA, 501 bp, Homo Sapiens
aacaaccccggacaacgtgggagattggcttcggggcgtctaccgctttgccactgataggaatgacttccggaggaacttgatactaaatttgggactctttgctgcgggagtttggctggccaggaacttgagtgacattgacctcatggcacctcagccaggggtgtagccaagtagttctaatgccacctgtcgtcttatcatctgattgcagacaaatggaatcctgtgctgaacccgaatcttccaaaaaaacagcctacaatctgtgaccaccacaagatgtgccctgatggcagctgaagtttgattcagatgggcacttttcttccccttccctgcctagtttccttttgttccttgagtccacgcagaattccattctctggtcagcagacaggcttaagctaaagtattgcctctattctgtaaagttctgtacatagttcccagttctgcggggtgattttgctctgtccggatgttggtaccgagccc

SEQ ID NO: 350772 - DNA, 894 bp, Homo Sapiens
  misc_feature (48)..(84): n is a, c, g, or t
tgtatacactcatatagggcgaacctggagctcacgcggtggcggcgnnnnnnnnnnnnnnnnnnnnnnnnnnnnnnnnnnnnnatcaggccaaatcggccgagctcgaattcgtcgagagcggtcctccaccgaggcccatgcgaagctttccactatggcttccagcactgtcccggtgagcgctgctggctcggctaatgaaactcccgaaataccggacaacgtgggagattggcttcggggcgtctaccgctttgccactgataggaatgacttccggaggaacttgatactaaatttgggactctttgctgcgggagtttggctggccaggaacttgagtgacattgacctcatggcacctcagccaggggtgtagccaagtagttctaatgccacctgtcgtcttatcatctgattgcagacaaatggaatcctgtgctgaacccgaatcttccaaaaaacagcctacaatctgtgaccaccacaagatgtgccctgatggcagctgaagtttgattcagatgggcacttttcttccccttccctgcctagtttccttttgttccttgagtccacgcagaattccattctctggtcagcagacaggcttaagctaaagtattgcctctattctgtaaagttctgtacatagttcccaagcttctgcagggggtgatttttgctcttgtcctgagaaataacagtgctgttttaaaaaacatttgaaataaataccgcacacaaaggcagtcattttattcttttaataagaaacttttgcttacaaaaacaaggtgtaaaaagatttacaaaaatcataaaaacatgatttatatttcacacttgagagacaaaaacaagccccaaaacatggattttatggaggtg

SEQ ID NO: 350773 - DNA, 983 bp, Homo Sapiens
caggggctggacgggccgggagctgggcctcaccccccactagctgcggtgtaggtccagctccgcggctctgagaccagcgtttccgacccggcccggaacaggggagactggactcgaccgaactgaaggaagggaccaaacctcggtgaactctgcaaccctctcccgaacactccttcgctgctgccggcggttccagcctgcaaactcagagggggctgcctggatccagtccccagcaggagaaccgacctggggacaaagcggaggcacccaaagggcaggagcaatgccgcctggagactattcgtgatcccaaggacacccctttctccacctgctcctcctcctctgactcggaacctgaaggatttttcttaggcgagcgccttccccagtcctggaagacccccggaagcctccaagcagaggacagcaacgcctctaagacgcactgcaccatgtgctagtggcgcagctcagagaggggatgtgagtgggaggaaaggggtctgtaaagcgggagaacaaggctagcctccccctaacaatcctagactgagacgcagtcaggcgcacgcccgcaagaggcggcgaggtgacaagtttggagtgcgcccccttcagtactgcgcgttctaagacttttggcggagactttcttggcaaaacccattccccaaagctacgccttcccctgctgagatagcccctacccccacctccacaggctgggacagccccgtccccaccatcctcctcccaagccaattaaatgatcacagcacgcgtgacagttaccggctggagagccggaggtgggaccgggagcaggggaccgtagaaacgggccgcgctcctcccctcctagagttcgtggaggcgcagcagaggggccgtccctcttccggatgtcgggactaaacggacagcgccccccactgcccggcccggtagcaacccgggaagtgccaagaccg

SEQ ID NO: 350774 - DNA, 1676 bp, Homo Sapiens
gtaagagggaactgtgcagcagacagcttttggactggaactgcagtataggctcttctctgagtcttcagcctgcctggcctaccctgcagattttggacttgccagcctccgtaactgcatgaggtacttccttaaactaaacctctcctctccatatactcaccctattggttctgtttctctagggaatcctaacacatgcccatattctttctctgtcatgcttaaatgtgttgcttgacaggtttagtgaataaatacataggaaaagatttgagaaatcaattgcttctaaataagagcttgggtgtttatggacaatgaaggggcatggacagtgctccttgactggagatgtgtgggaggactaagaatttcaggctgctgtgtgagcactgaactgcctctaacacagacacttcagaaaggtgctggtgaagagagcaatccctccgtctcaggatggaatgtccttcacccagaggctgaacatcgggattttggggagaatctcatagtgacttccctgcttcagtccccctcttctcagtctctctttccctctttcctggtggtttgaacatgtgtttggaatttcagagagctcaaactgaagacactgggtttggatacaacgaaaatggtttttgctaagtaatttgtttcagatgcttaaattgagaccatccttctgtattaagtgagatggaagctagcagcctgagaaggaaaaaaaccctaaagatgaaacctcttaggccagcaatgtcagaaaggctaggctttctagctgtccacacgcagttctagggtgggcccgcagagctgcctctcacaccctcaagggcccactggaggtctgtctgaggctggatcagcttcacctgcttcttttatcattcaagttctgctcagagaaaggccctgtcctgctgctgggccttgaggaagccaaggtgagctgctggtaagtccaattaggctagtctcccatctgtggtcacaactgcggacgctgcctgggagaggcattcttctcacagagccacggtgagtaatccggggaagctgctatttgggctgcctcagccaggattatgtgtgtcagggaggatggggagtggtgggcacccctgagtcaggttgagggaggtctagggctgcttggggttctctgtcagaagcaccacaaagggacaggtgctcttttgggggatctaaagattctgcggttggcactgacttgaaggtggcctagatgacttcctgcaaggcttgcttaggcatcttctgctgggatttctcctaaaagggggttcaggcaccttaaccacacctctagttccttcagtttgcagagcaggagcctgaggcctggagaaggttcctaacctcatcctggtgatttagcaacagaatggcagtaacatcccggtgaggggcagagtaatgcccacgtcaacaagagcctgcattcatcgatggtttgaaacagagtattaaaccagtggggtgaatccgcgctgtgctctctgccctgccattgtttagctgcaggaccttggaccagtcagcttccctgcctctcaatttcctcatctatgttatcatttactatatcctaagcatcactgttctaagaattggacatacaatcccgagaattccggacc

SEQ ID NO: 350775 - DNA, 1946 bp, Homo Sapiens
  misc_feature (983)..(983): n is a, c, g, or t
  misc_feature (1843)..(1859): n is a, c, g, or t
aattttctaaaatttctggctcctgtagatgaaaataacacctctgattttatgaacacaaaaagggactttgaatccaaagcaaaccatcttggtgattctggtgggactcctgtgaagacccggaggcattcctggaggcagcagatattcctccgagtagccaccccgcagaaggcgtgcgattcttccagcagatatgaagattattcagagctgggagagcttcccccacgatctcctttagaaccagtttgtgaagatgggccctttggccccccaccagaggaaaagaaaaggacatctcgtgagctccgagagctgtggcaaaaggctattcttcaacagatactgctgcttagaatggagaaggaaaatcagaagctccaagcctctgaaaatgatttgctgaacaagcgcctgaagctcgattatgaagaaattactccctgtcttaaagaagtaactacagtgtgggaaaagatgcttagcactccaggaagatcaaaaattaagtttgacatggaaaaaatgcactcggctgttgggcaaggtgtgccacgtcatcaccgaggtgaaatctggaaatttctagctgagcaattccaccttaaacaccagtttcccagcaaacagcagccaaaggatgtgccatacaaagaactcttaaagcagctgacttcccagcagcatgcgattcttattgaccttgggcgaacctttcctacacacccatacttctctgcccagcttggagcaggacagctatcgctttacaacattttgaaggcctactcacttctagaccaggaagtgggatattgccaaggtctcagctttgtagcaggcattttgcttcttcatatgagtgaggaagaggcgtttaaaatgctcaagtttctgatgttgacatggggctgcggaaacagtatcggccagacatgattattttacagatccagatgtaccacctctcgaggtgncttcatgattaccacagagacctcaacaatcacctggaggagcacgagatcggccccagcctctacgctgcccccctggttcctcaccatgtttgcctcacagttcccgctgggattcgtagccagagtctttgatatgatttttcttcagggaacagaggtcatatttaaagtggcggtaagtctgttgggaagccataagcccgtgattctgcagcatgaaaacctagaaagccagagttgactttataaaaagcacgctacccaaccttggcgtggtacagatggaaaagaccatcaatcaggtatttgaaatggacatcgctaaacagttacaagcttatgaagttgagtaccacgtccttcaagaagaacttatcgattcctctcctttcagtgacaaccaaagaatggataaattagagaaaaccaacagcagcttacgcaaacagaaccttgacctccttgaacagttgcaggtggcaaatggtaggatccaaagccttgaggccaccattgagaagctcctgagcagtgagagcaagctgaagcaggccatgcttaccttagaactggagcggtcggccctgctgcacacggtggaggagctgcggcggcggagcgcagagcccagcgaccgggagcctgagtgcacgcagcccgagcccacgggcgactgacagctctgcaggagagattgcaacaccatcccacactgtccaggccttaactagaagggacagaagacgctggaaggagagaaggaagcgggaagtgtgcttctcagggaggaaaccggcttgccagcaagtagattcttacgaactccaacttgcaattcagggggcatgtcccagtgnnnnnnnnnnnnnnnnnagatactaaatcgtcccttctccagtcctgattactgtacacagtagctttagatggcgtggacgtgaataaatgcaacttatgttt

SEQ ID NO: 350776 - DNA, 628 bp, Homo Sapiens
cgcaaagctcattaagaggcaacatggcggaatttacctggtgcatgacgttcctctaggaatgctagacttcatagctgctggaagaatcgcacgccttctgcggggtggctactcggaggaatatctgctgcctccaggaatgcctccgggtcttcacaggagtcccaccagaatcaccaagatggtttgctttggattcaaagtccctttttgtgttcataaaatcagaggtgttattttcatctacaggagccagaaattttagaaaatttggcacagaggaagaagaatgaagttttttccgcagggcattacggtaggagatgctctttggcacagcattcccactttgttctccactggaattatgttttaggtacttaaaaaagtttggcgaggaggcggaggggttaagacgaggtggaggagcaggagctgaagactgacctgggcggtgcttagactcacccacaggtgaaggatccacatttcgttcatgaggcgtctctgtgctcactaagtgatacctcataagtttcctttgcgaaaaccccggggaaccacgggcaggttgtggaggttctggcatcgatggggaagtgctcaggatgttgctcgcctctga

SEQ ID NO: 350777 - DNA, 1929 bp, Homo Sapiens
  misc_feature (1904)..(1904): n is a, c, g, or t
aagggaaacattcccagatcctcaaactatcgaagctcactccaggcctgtatgaattcaaagtgattgtagagggtcaaaatgcccatggggaaggctatgtgaacgtgacagtcaagccagagccccgtaagaatcggccccccattgctattgtgtcacctcagttccaggagatctctttgccaaccacttctacagtcattgatggcagtcaaagcactgatgatgataaaatcgttcagtaccattgggaagaacttaaggggcctctaagagaagagaagatttctgaagatacagccatattaaaactaagtaaactcgtccctgggaactacactttcagcttgactgtagtagactctgatggagctaccaactctactactgcaaacctgacagtgaacaaagctgtggattacccccctgtggccaacgcaggccccaaccaagtgatcaccctgccccaaaactccatcaccctctttgggaaccagagcactgatgatcatggcatcaccagctatgagtggtcactcagcccaagcagcaaagggaaagtggtggagatgcagggtgttagaacaccaaccttacagctctctgcgatgcaagaaggagactacacttaccagctcacagtgactgacacaataggacagcaggccactgctcaagtgactgttattgtgcaacctgaaaacaataagcctcctcaggcagatgcaggcccagataaagagctgacccttcctgtggatagcacaaccctggatggcagcaagagctcagatgatcagaaaattatctcatatctctgggaaaaaacacagggacctgatggggtgcagctcgagaatgctaacagcagtgttgctactgtgactgggctgcaagtggggacctatgtgttcaccttgactgtcaaagatgagaggaacctgcaaagccagagctctgtgaatgtcattgtcaaagaagaaataaacaaaccacctatagccaagataactgggaatgtggtgattaccctacccacgagcacagcagagctggatggctctaagtcctcagatgacaagggaatagtcagctacctctggactcgagatgaggggagcccagcagcaggggaggtgttaaatcactctgaccatcaccctatcctttttctttcaaacctggttgagggaacctacacttttcacctgaaagtgaccgatgcaaagggtgagagtgacacagaccggaccactgtggaggtgaaacctgatcccaggaaaaacaacctggtggagatcatcttggatatcaacgtcagtcagctaactgagaggctgaaggggatgttcatccgccagattggggtcctcctgggggtgctggattccgacatcattgtgcaaaagattcagccgtacacggagcagagcaccaaaatggtattttttgttcaaaacgagcctccccaccagatcttcaaaggccatgaggtggcagcgatgctcaagagtgagctgcggaagcaaaaggcagactttttgatattcagagccttggaagtcaacactgtcacatgtcagctgaactgttccgaccatggccactgtgactcgttcaccaaacgctgtatctgtgaccctttttggatggagaatttcatcaaggtgcagctgagggatggagacagcaactgtggcaaaaagggaaaacccaagaggcaaagcaagtacaagatcctggatgccacggatcaagaaaagcctggagctgaagccaacctcccgcagcaggcatcaaacaggaaaagccctttttgctaagtaccagccctgatgcactccgaagtcaaagctgggacagcggacaatgccatcctttacctggccagaaccgaaagnaaaggccaaacttcctccatgggca

SEQ ID NO: 350778 - DNA, 653 bp, Homo Sapiens
  misc_feature (425)..(553): n is a, c, g, or t
caagggctaaatttagattttaaaaagaccactctgtccttggtgtggaaaccagagatggagaggtcaaagtagaggcaggaagaccactttgacactgttttaagcatccaagtgaaacagagtaactttaatccaccctgaaagcctaaagtaatgagacaattgggcagatatgggggatatcaagtagacttgcttaaaaactggttttgaagggaggacaatgtaatgattttcatattttctatttgagacaataaagaggtagaaaacaaggaagaacagcaagagtgggcagagggcagagagggatgagttcaggtttggttgttttgacagaggtgctttagggggtcatttctaatgtgggttgaaaacatacatggggatcccggatcccacatggtaaattgattttgttnnnnnnnnnnnnnnnnnnnnnnnnnnnnnnnnnnnnnnnnnnnnnnnnnnnnnnnnnnnnnnnnnnnnnnnnnnnnnnnnnnnnnnnnnnnnnnnnnnnnnnnnnnnnnnnnnnnnnnnnnnnnnnnnnaggaggatcactggatcacttgagcccaaaaggtcaagagtacagtgagctatgatggtgccactgactccagcccgggagacagagtgaagctttgtct

SEQ ID NO: 350779 - DNA, 1290 bp, Homo Sapiens
aatctgtatctagaagtgctctgttcgagcagcagctgaccaaggagagcacccctgggcccaaggagcccccagtcctgcccagttctacatgtagctccaagcctggtcctgtggaaccagcctcttcccagccagaggaggcagcccccacacctgtccctagactgtcggagtcagctaatcctcctgcccagagaccagacccagctcatccaggaggtccaaaaccccagaaaacagaggaggaggttttggagacagagggagaccaggaggtgtccttaggtaccccacaggaggtggtggaggccccggagaccccaggagagccaccactttctcctgggttctgaacacagcccaggtgggaacaatgctgcccctcatgatgaagtggcctgtgtggcttgagcgccccatagtccccagtcagagcagagtggtgtccccagatgacttcagaccccatagctgggcaagatgcgcttgtataggactctgcgctgagcagaaccagctcccccaactccagcagagcttgacctccgccctgtgccctttccctgctgctggctctctgctgcatccctgcccgtcttctgggagtgccgtctcacccaggcctgctcccacgagggggtcgttgtgtagatcaactctcagcagatagttgcatcatctttgtcaccgtccacccccataaaacaccccccttggtgtcttccacactggctgggactgaactgggtctgccacgtctgccctgttgggacctcgttcctgtatggggtaactgtgtctgtacccctagccccagcctctctgctccctgtgacttctgtcccagctggaatgtgaggaaggctgcctggaggaagtggccactttgattctgggggatgagtgggatagcatcttggcaaagaatgatgtttcctgtgggattaccagcagttctgggcagctggaaggttcggatgcaggaaggtgggatgcaagccccttgcccaggctcaggctgcaagcattcgccctttgtgtgttaacactgtagctctaatcgtgccctggtgttctgaagcaggctcctcttccctgctgctgtgctgccatcccctgctcactccggactcgcatgcattgcggattcagcaccttaagccctaggtgtgtaacatgaccttggatctccctcctggcagactgtgaacctcaggcacaggggctctggccttagtcagcactgaggcctggtacacaaatgggtgctcattaaacacgtataaa

SEQ ID NO: 350780 - DNA, 2034 bp, Homo Sapiens
cactgtggtcgggagtaggcagcggcgccgcgtccgctctcgcccgctctcgcccgctcgccagccggctctcctcccgccgcaggacccgcgcgccgcgctcgggggccatgcagcgcctggccatggacctgcggatgttgtcccgggagctctccctctacctggaacaccaagtccgggtggggttcttcggctcgggggtgggcttatcccttatcctgggcttcagcgtcgcttatgccttctactacctgagcagcattgccaagaaaccccagttagtgaccgggggtgagagtttcagccgcttccttcaagaccactgtcccgtggttacagaaacgtactacccgacggtctggtgctgggagggtcgaggacagaccctgcttagacctttcatcacttcgaagcccccggtgcagtacaggaatgaacttattaaaactgcagatggaggacagatttcactggactggtttgataatgataacagtacgtgttatatggatgccagcaccagacctactatcttattgttgcctggcctcacgggaacaagcaaggagtcatatatccttcatatgatccatcttagtgaagaattaggatacagatgtgtggtttttaacaacagaggagtggcgggggagaatctcttgacgccaaggacttactgttgtgctaacactgaagacttggagacagttattcaccatgtacacagcctgtacccttctgctcctttcctggcagcaggggtttcaatgggaggaatgctgcttctaaattacttgggcaaaattgggtccaaaacgcctttgatggcagctgcaactttttccgttggttggaacaccttcgcttgctcagagtcattggaaaaaccactgaactggctactttttaattactatttgacaacctgccttcagtcttcagttaataagcaccgacatatgtttgtaaaacaagttgatatggatcatgtcatgaaggctaaatccatcagagagtttgataagcgattcacttcagtcatgtttggataccaaacaattgatgattattatactgatgccagtccgagtcctagactgaagtcagtaggaattccagtattgtgtctaaattctgtggatgatgttttctcacccagtcatgctattccaatagaaactgctaagcaaaatcctaatgttgctttggtccttacttcttatggaggccatattggttttctggagggaatctggccaagacagtccacttacatggatcgtgtcttcaagcaatttgtgcaagccatggttgagcatggacatgaactctcttaacatgtagttctttgggtgcattttgtctgaaccacaattgtgaaggcagctcagcttagtgcacaaattttaactgttgtatataaagcaaataagccagcagatgggtgaagaggtccagaatgatatgcaaaaactactttttagagaaacaaaacaactttgtagcaacaaattaaatatagtattagattgttacttacgtagattttatttttactatgccttaccaagtacatccttaaacaaagtagtatgtacatgaaattgcacttaaccaaaactattgtgtaaaacaaattttaattcctcagggttttaatttaaactagtatttttttagattatttgttttaggtgatttaatggtactttaataactactaagaaatattggctatttcaatgtaagttataaggtggtacattcctaagggtatttatagttgatgataacatgaaaactgaaataagataaaatacaacgtgctaaatcttttatgtattctaactttaaaagacaagtgcaacaaagttagactgacttctatatgtgctcttttactctgataatattaaattaggactaacttatgttttataatgattataatttacatgcttatttttaaaatagtatatgtggacacatatatatcattatattaaaataaattctaccattttaaattgg

SEQ ID NO: 350781 - DNA, 1144 bp, Homo Sapiens
cggcacagggcttgcggctcgggtggctgagcgcgcggggaaatggccacggggacagaccaggtggtgggactcggcctcgtcgccgttagcctgatcatcttcacctactacaccgcctgggtgattctcttggtatgtcattctccccgtccgctgctcaccttccccgagccctggcaccgccagagcaactactatataggctctaggcacggcgctggcttcattgcctgcctcatctcttgaactctccagaacaactctatgaggaagatgccagtggtaccgcattttatagatgagatagctgaggctaggggagaaggatctggcccaagattgcatccttagccgctacacttataactctgtttccggcttgctttgacttttgggggagttctgttccttctgggttagcctgctgactcttaggcatggcaaacgccagtgatatttgtgaaggcctttaggatatttttttcttgtgggaaaacttgttggttattgcttaagaagtgcagtgtgtctggaagtgcagaacttggtatcctttagagaaaaaatattagtgaagaagccctggaggcccaggttgggagtcagtcgaggattcctcaagtaccatttgctaggctgtgaggtgccttagggcaggtctcttgtgccctgttctcttgtccccaccaccaacctatagcaggcaccaaagcaagtgcccggtaaataccaataagaaattaaggaaagaaacaaaccacgaaacccaaatgccgtaatcttaaagaaaagcaatgcagtcccagtcctctgaatggggtcaagcccttagatgggaggaacgttggcaacggtttggggcttggggggcttcggggaggcccagcaagaacaccaccaggaggcttctttccgcgtggaatgccagccattcattcagccggctcgcgatgttcatccaccacagtttttacttgcccccggagcctttgctgtcgcgccactccccctgggtgtgagggcgcccgtgaaccccggtgggggagacagtgatcattcctacgggtgctgcatacacgaatatgtgccgacagcgtcggtgaggcccgcgggttaagcgctccgcctctctttggtccca

SEQ ID NO: 350782 - DNA, 1355 bp, Homo Sapiens
  misc_feature (1158)..(1169): n is a, c, g, or t
  misc_feature (1254)..(1264): n is a, c, g, or t
gctggtaccggtccggaattcctgcgatcacgcggggaaatggtgagattggcaccgtgtgccggagataggggcgtctgggggtggggtcccgggtctgctcaggagctggggcatgggcacttggaacggggattgctctcccgcccccactattgtacggacgacaacgcggaggcctagcattctctcccagcctagaaactgatccctagtcagccctctaccatctgttgaatgggaagcttagaccgtgatcgggccgcgacgccccgcttccattagtgcgccgaaatagagggtcacttcgtcagctgagacctcccttttctccaggccacggggacagaccaggtggtgggactcggcctcgtcgccgttagcctgatcatcttcacctactacaccgcctgggtgattctcttggtatgtcattctccccgtccgctgctcaccttccccgagccctggcaccgccagagcaactactatataggctctaggcacggcgctggcttcattgcctgcctcatctcttgaactctccagaacaactctatgaggaagatgccagtggtaccgcattttatagatgagatagctgaggctaggggagaaggatctggcccaagattgcatccttagccgctacacttataactctgtttccggcttgctttgacttttgggggagttctgttccttctgggttagcctgctgactcttaggcatggcaaacgccagtgatatttgtgaaggcctttaggatatttttttcttgtgggaaaacttgttggttattgcttaagaagtgcagtgtgtctggaagtgcagaacttggtatcctttagagaaaaaatattagtgaagaagccctggaggcccaggttgggagtcagtcgaggattcctcaagtaccaatttgctaagctgtgaagtgccttagggcaggtctcttgtgccctgttctcttggcccccaccaccaaccctattagcaggcacccaaagcaaaggggcccgggaaaataaccattaagaaaattaaagggaaaagaaaccaaacccaccgacacccccaaatgggccggtcattcctcttatagaaaaaaggcaaaatgggccggccccccagagtccctcccgaaaagggggggnnnnnnnnnnnnttaaaaatggggaaggaaaggtgggtggaaaccttctcggcgcccctgagcggggtcttccggtaaaaggggcaacccaaagaannnnnnnnnnngagggcttcctttccccctccaatgggcacaaaccaatttccactcgcaacaaggccacaccctgggcacttcacccaccaatggaatact

SEQ ID NO: 350783 - DNA, 1214 bp, Homo Sapiens
aggtagcgaggcctgggtggcgaattcggcacgagggtgagattggcaccgtgtgccggagataggggcgtctgggggtggggtcccgggtctgctcaggagctggggcatgggcacttggaacggggattgctctcccgcccccactattgtacggacgacaacgcggaggcctagcattctctcccagcctagaaactgatccctagtcagccttctaccatctgttgaatgggaagcttagaccgtgatcgggccgcgacgccccgcttccattagtgcgccgaaatagagggtcacttcgtcagctgagacctcccttttctccaggccacggggacagaccaggtggtgggactcggcctcgtcgccgttagcctgatcatcttcacctactacaccgcctgggtgattctcttgccattcatcgacagtcagcatgtcatccacaagtatttcctgccccgagcctatgctgtcgccatcccactggctgcaggcctcctgctgctcctgtttgtgggactgttcatctcctacgtgatgctgaagagcaagagagtgaccaagaaggctcagtgaaggtcccgcagggatgaggctgccagccccttctctgcttcccctccagcacagggaccaagtgggggagcctgcagaacctgtccaggcacagtggctcctcaagcctgcctgtcctgcagagtccccatggcatggagcttacacctgactgactggagccccctccccgactcccacttccagaagctaggagggagggatacctggaagactccggtcacctccttcttgctcagggcctaaaagatgctggtcctcccaacctcactctcagactccctgccaccttttcccctgggttctgccgtcttgcctcacttcccctcctgtcacatgctgacgttggacttagcaggttctaaggccacatgtgtgacctctctgacttctcttcctccaccaaggcagctttccttaccctgacacagccccagaccccacaaagccttctggacctggaaagcctggggaaggactgacagaccccaggaccagccctggggctcagggcagccaccccgggccgctgaccgactgacctctcctcacggaggcccagccccaaaaccccagggctggcccgtttgggacagctgaccaataaacactgatggtgtgtttgtcaaaaa

SEQ ID NO: 350784 - DNA, 719 bp, Homo Sapiens
  misc_feature (70)..(131): n is a, c, g, or t
aacatgcacgtgcacacccacatgcatgcatacacacatgaacacgtgctcaacatatacatacatgtannnnnnnnnnnnnnnnnnnnnnnnnnnnnnnnnnnnnnnnnnnnnnnnnnnnnnnnnnnnnngacatactctccccacgagagagagagtgactatgcacggtgttctacattgctggtttttatttaataatatattaactcattcattcgcaagcattcattgagcacctactgtgtgccagacactgctagagccagaagatgcgaggcccacagcggatgcaaatcctgtcctcacaaagcttgtaccctgttgggggaagacttaagtggggagcaggtttggggtgggaagtcagttggattctctgggggtaagtacactgctgtgcacatgtgcatctgcagaagcgtctgtgagatgggatgctgaagacatgggattgggggtcccactccagaccttaatgtggtcggaatgtgggtgttttgtcccccctttctcacctgccaggtcttgtggggaggggatcagcctcccacctgggtgaaagcttgggagagggccagactggtccatgtgcccagcttggatctttgcacacaatttctcccctgagcctcaggctcctttttgtaaatcgggtgtagtgtgtccccttggagagttgccttgaggcgatggacgaggtcagagtggagtgggtg

SEQ ID NO: 350785 - DNA, 467 bp, Homo Sapiens
aggcaaggccagggcagttggggcctgtgaagggggcgtggccaaagcagacaaagggggagagggcaggccttgcaaagggggtgaggccagagcaggtggggcctgtggaggaggcgtggctatggaagagggcgtctccggagggggcgtggccaatggcgaaggtggtgcttgcagagggcatggggctggacaaggtggagtctccagatggggtgtggtcaggggagcagaagctgtctgcagaggaggcggggctagagaaggtaggttctccagagggggtgtggtcagggaagcaggaggtgcctgcagagagggtggggctagggaagattgggtctccagagggggcatgatcagggaagagagaggtgcctgaggagagtgggaggccagagaagatagcgcctgcagagggtgtatggtcaggggtgagcttaggggtgagacagcaggagaga

SEQ ID NO: 350786 - DNA, 624 bp, Homo Sapiens
tacagcaacctgaactaagacactatccctctcccctgctttctttttctgttatcaccataattaatgttttacttatatatgatttgttaatgtatgtctcttcccactagaaaccgaattctatgacagcaagggtttttgttttcattattgtcatattacctgtgcctggcatgtgataagccctaagtacttgttgactgaattaacatatgagatctgtgagtctgaaaaaagaagtacatcattccttcacatgtcattttgagccactgttaacagattacataactgttattggaagtgcctcactactccatttggaaagtattcctggaatacacgatgaatgactcaatagaagttctggctatgggggagtgccatcaataaataaaaacaataccattgcctgttggttataagttgctgtcacagactatgaaggtatttgaattgtattttcaggaagagaaacagatatgcaaccaatctgatttggttccacaccctgccacagaagtcccaaaggagaagcaaatgccacttgtagactcagactctggacttcattctcagcaccatctcttaacctactgagtaaatcctatgaacctgact

SEQ ID NO: 350787 - DNA, 1599 bp, Homo Sapiens
attgttcccgtggggcagtcgaggatgtcggtgaattacgcggcggggctgtcgccgtacgcggacaagggcaagtgcggcctcccggagatcttcgaccccccggaggagctggagcggaaggtgtgggaactggcgaggctggtctggcagtcttccaatgtggtgttccacacgggtgccggcatcagcactgcctctggcatccccgacttcaggggtccccacggagtctggaccatggaggagcgaggtctggcccccaagttcgacaccacctttgagagcgcgcggcccacgcagacccacatggcgctggtgcagctggagcgcgtgggcctcctccgcttcctggtcagccagaacgtggacgggctccatgtgcgctcaggcttccccagggacaaactggcagagctccacgggaacatgtttgtggaagaatgtgccaagtgtaagacgcagtacgtccgagacacagtcgtgggcaccatgggcctgaaggccacgggccggctctgcaccgtggctaaggcaagggggctgcgagcctgcaggggagagctgagggacaccatcctagactgggaggactccctgcccgaccgggacctggcactcgccgatgaggccagcaggaacgccgacctgtccatcacgctgggtacatcgctgcagatccggcccagcgggaacctgccgctggctaccaagcgccggggaggccgcctggtcatcgtcaacctgcagcccaccaagcacgaccgccatgctgacctccgcatccatggctacgttgacgaggtcatgacccggctcatgaagcacctggggctggagatccccgcctgggacggcccccgtgtgctggagagggcgctgccacccctgccccgcccgcccacccccaagctggagcccaaggaggaatctcccacccggatcaacggctctatccccgccggccccaagcaggagccctgcgcccagcacaacggctcagagcccgccagccccaaacgggagcggcccaccagccctgccccccacagaccccccaaaagggtgaaggccaaggcggtccccagctgaccagggtgcttggggagggtggggctttttgtagaaactgtggattctttttctctcgtggtctcactttgttacttgtttctgtccccgggagcctcagggctctgagagctgtgctccaggccaggggttacacctgccctccgtggtccctccctgggctccaggggcctctggtgcggttccgggaagaagccacaccccagaggtgacagctgagcccctgccacaccccagcctctgacttgctgtgttgtccagaggtgaggctgggccctccctggtctccagcttaaacaggagtgaactccctctgtccccagggcctcccttctgggccccctacagcccaccctacccctcctccatgggccctgcaggaggggagacccaccttgaagtgggggatcagtagaggcttgcactgcctttggggctggagggagacgtgggtccaccaggcttctggaaaagtcctcaatgcaataaaaacaatttctttcttgc

SEQ ID NO: 350788 - DNA, 972 bp, Homo Sapiens
  misc_feature (547)..(547): n is a, c, g, or t
agtgatggactaagtgtgatccggcctgacccgcctccggccggcgtgagaaggggcatgtgtcgggctacgctcgggcttcccctgccgcccattgtgatccagcccgctaggcgctccctgccgcccattgtgacgcctgccagccgcaggctgggtccccgaggcgggcggcatttaggctcggtctccacagccatggccgcgacgcaggagctgctgctgcagttgcagaaggataaccgagatggtcgccagcggaagcaggagctagagaagctgatgcgcgggctcgaggccgagagcgagagcctcaaccagcgcctgcaggacctgagcgagcgggagcggagcctgctgcggaggcgaagccaggcagcgcagcctctgcaaggggaggcgcgcgaggcggcgcgggagcgcgcggagcgggtgcgcagaagactggaggaggcggagcgccacaaggaggacttggtgaggaagagtcctagaatggggctggacccaggtggggtggggcagggcgggcggaagggggcggggntgaggtaggaccggcggagaggtcggcaccgccccaggaccccgtccgcaggagcagcacagcaggcagctgcaggagcagtgggaggagctgtcgagtcagctcttctactacggaggggaactgcagagccagaagagcacggagcagcaactcgcagcccaattggtgacgctgcagaatgaactggagctggcggagaccaaatgcgccttgcaggaggagaagctgcaagcagggacgcgctgcagacagcggaggccttgggccatattccagggagcagaccgtagtccttgcaggttgcggccccaatcagacgccaaggttgcctcccgcctctcctcccccagacctggggcggtaagtctcccaacccaccgccaggacgcctcccgaggcctcagtcgcactctcacccgtca

SEQ ID NO: 350789 - DNA, 1036 bp, Homo Sapiens
gcgaagccaggaagcgctgcttctgcaaggggaggtgcgcgaggcggcgcgggagcgcgcgcagcgggtgcgcagaagactgaaggaggcggaccgccacaaggaggacttgaagcccggtaaaccccgtccttacgagccccgcccctagctcttctactacggaggggaactgcagagccagaagagcacggagcagcaactcgcagcccaattggtgacgctgcagaatgaactggagctggcggagaccaaatgcgccttgcaggaggagaagctgcagcaggacgcgctgcagacagcggaggcctgggccatattccaggagcagaccgtagtcctgcaggtgcggccccactcagacgccaaggtgcctcccgcctctcctcccccagacctggggcggtaagttctcccaacccaccgccaggacgcctccccgaggcctcagtccgaactctcacccgctccaggaggtgcaggtgcaaggtgatggaggctgcggaggagctggacgcctggcagagtggccgggaactgtaagggagttgggcttgcgggcgcggcggggcactgtggggccgggccgggctgggctcccaactgcattgcctgtccccgcaggtgtgacgggcagcttcgcagagtgcagtacagcaccgagtcgctcatggaggagatggccagggcggaccgagagacgcggctgttcggcggtcctcgcgcgctggccatcaggcgctgctgacgctgccgctcctcttcctggggctgtcgctgctctggacggtgctgttggaccccggcgccgtctccgcgtggctctggagcctcacctcggagacgacgctgcgccgcctgcgctacacgctgtccccgctgctggagctgcgcgctaacgggctgctgccaacctaagtgcagcgccccgcgcctggctccaggtggactccagggcaccggctttatttctggtgcactcctctcctgagagtgtagaccaaggtcgcctaataaactcctcaagggataaaaa

SEQ ID NO: 350790 - DNA, 598 bp, Homo Sapiens; identical to SEQ ID NO: 48189

SEQ ID NO: 350791 - DNA, 1487 bp, Homo Sapiens
ttttttttcactgaagacaggtttattgacactcctgcttcggatcgagctacatggggtaaggagggacagttgtggagagcaggagggccccggggttctggggagcagcagagagggagacccagggttgctggtgccactgtgagcacaggcctgcaccacacgccttcccaggaaggcctcccctcacccagccaggccctcctgctcccttcccacatgcagggtgggacgggcctgtgcatggcccccagatgaggacccaagctcctgcaggggcgggggccttcagtcaagacagctgggaggcagcagatccgtgattaggctgggacgctggctcccaggctcgggtggtggtgcagcggcctctccagccccagcccccaggacctacttcagcactggctggtgtcatggatgcaggagcacctctgccatggcccagacatgcttggagcttaggcatgggggctcctgggcagtggggaaggggcacagggcacgggggagcctcatacgagtctggctggcacaaaggctgacgcaggagcccggggctcacagtggccgaagacacgagcataagaccaagcccaggtgggcgggcacgcactcagctgctgtggtagatgcggacggcgctgggccatgtcctggcggcacagcgggcaggtgcgcagtggctgccagcactgctggcagcagcagacgtggccacagttgaggaagatcatctgggcctcccgttccaggcacacgacacactctgaggcctgcacctccagctctgcagggggaagcggatggcctcacagactcaggaggctcctgggggggccgtaggggtgacgacctcacccattggtggtttcagctctggctggatcctggctgcatccagcagttccttggactctccggaggatctcgtgctgcaggccagcttctgagacgcccaccttggccaggtcccctgggctcatttggctcagcaggtccagtgagaggcggtggtgcgcaaagatgggcaggtagtgctcagccgacagctcctccaggagggccaccagctggcgctccatcccctcttcttgcagcttcaaggacaagggcttctggttcaaaagccgttgatactgaatcagccagtaattttcctgcctggtttcacttttggcttctaactccgtcaggatttcccggagctcttcctctcgctgctgcttctctttgagcagctgctggagcagggagctgagggcccagcgctgctccgagatcatctcctggagtgactctgtgtccagggacttcctctttaactccagctgtgtcagctgcaataactcagtttctattaacttaatctggctcctgatctgccgatgcatcaggtctttcttcacctggagtgcctcgaacgcagccttctgcatcgcgctctcctgcaggatctggctgatggctttgttctgatccat

SEQ ID NO: 350792 - DNA, 845 bp, Homo Sapiens
ctgctgcaggacaatcagagacaaaagaaaagctccgagatttgaaatcgctggaaaatgaaagaataagaatggaacagttgatgtccataacccaggaggagactgagagcctgcggcgacgtgacgttgcctccgccatgcagcagatgctgactgagagctgtaagaaccggctcatccagatggcctacgaatctcagaggcagaacttggtccagcaggcctgttccagcatggccgaaatggatgaacgattccagcagattctgtcgtggcagcaaatggatcagaacaaagccatcagccagatcctgcaggagagcgcgatgcagaaggctgcgttcgaggcactccaggtgaagaaagacctgatgcatcggcagatcaggagccagattaagttaatagaaactgagttattggcagctgacacagctggagttaaagaggaagtccctggacacagagtcactccaggagatgatctcggagcagcgctgggccctcagctccctgctccagcagctgctcaaagagaagcagcagcgagaggaagagctccgggaaatcctggaagaggggatggagcgccagctggtggccctcctggaggagctgtcggctgagcactacctgcccatctttgcgcaccaacgactctcactggacctgctgagccaaatgagccccagggggacctggccaaggtgggcgtctcagaaagctgggctgcaagcacgagatcctccggaagagtccaggaaccggtggatgcagccaagtattcaagccaagaggctgaaacaccaatgagttgaaggtcggacaccctacggaccacc

SEQ ID NO: 350793 - DNA, 956 bp, Homo Sapiens
  misc_feature (39)..(39): n is a, c, g, or t
  misc_feature (132)..(132): n is a, c, g, or t
gtggaaaaatccctgacccttataaagaaaaaacagccnagatgcccgaggttgcctaaagatctccgggtaaagaaacacagtgccccatctgtgaacattttgaaagagggaagcacgaaagttctgtcnagttttgctgtcacatctcagacttgatcacaggtacgtacaggaaaaaacagcgccctggacaggattcgggactatccgcggcttcggcacctgctggggtctcggagcacaccctggccaggtgagggcgatcactccgtttctctatccagttacctttgtacgttagaaaagcaggagctcaatacacctggctctcatcatccacgatgtatttctagttttttccatctcagaatacagcttcagaatcgtccacgcaaaaaacaaatttactacttagagtacagtatctttcctgtctttcccacctttggtcgacggtcttccccacactcatgatgggtcagagtgcggtgcgagcggagaggcaggcccgacccgggcctgggcactcccgacggcgggtcagagtgcgatgggaagaggccccggcctgggcccgggagctccgtcggcatggtctgttgtgttcccctcacatcctggttcatttactttttgagcatgtgaaaccctctgccatgacagccagaactccacccccaggggtgctcggaggggctcgcggccggctatgcccatcagttccagctcctccttctggatttctcgtttgtagtttcctgtgtccctgcctgtctccacttcacagtaagctcacgccatatagccgcactgcgttggcgagctcatggcacgtggccacaccgcgtcagcgccgactccaccgtggctgcgtcacggctcacgtgcactgtgaggacactggggttgctatagacagtgctggggcaaccctgtgcctacacaaaatattc

SEQ ID NO: 350794 - DNA, 1559 bp, Homo Sapiens
  misc_feature (60)..(60): n is a, c, g, or t
  misc_feature (89)..(89): n is a, c, g, or t
  misc_feature (108)..(108): n is a, c, g, or t
  misc_feature (135)..(135): n is a, c, g, or t
  misc_feature (138)..(138): n is a, c, g, or t
  misc_feature (147)..(147): n is a, c, g, or t
gaggaatagtcgggaggtgctgtgagggatacaccgcccggggcagcgacacagaaagcnttgggggggtctagagatggatggaagtnagggaagggccggggcaangaaggaggcggagaggcaactgtagcntcntccccaganttcagtctcgtggaaaaaaggctctttggtcaaaaaagcaaggaatgccggggagagcagaaacgaagcccttgaaaggcccggccagggatcctgcccctacaccggcacgcctttgtctcggggacgcccggagccgcggggccgcacgggcttcctggggggatttgggcggcggcgacctctcggagcgcggggaagcgggcagccgcgctcgctctgcgtatccgaggactcgtcgatgaaggccaggttctcgctgggataatccagggccgaggccgtgggcggggaaggcggctgagccttctcggggggcgaaggggatcggggcctgcccagcggctgcgctggaaagggcggtggaggcagcagtggctgctccttctccggcggcggggaggcgggcccggctcgctgggtcacgcgcgctgtcactgtgccagtccaactggcagcctgagccgtgaggccgcccatctctgcccgagtgcggcgggacactactcgcagccagttcccgatggtggtgagcactgaggcgaagtaagccaggccgagcaggatccagaaccacaccagcggctgataggccggggagtcctgcctgggggtccgcgccggccacatagtcgccaaagcccacggtggtaagcgtcactatgacaaagtagatggcctccagcttgctccagtcctccatatagcagaacacgaacgtgggcgtgaggacaaagagcaggcagccgatcagcaggaaaagcatcgccgacagcactcttactagctccggtggcacgtgccacttctgcgggatggggcagtaggcaggacccaggagacaccaacaatccccactcccatactccccactcccgcccccaggagcctgtgggagaggcttatggtctttgggggcgcgctcatgtgccagggacatggggaagggtagccggagcccagcacaagggcaggcagggcatggagcagctcaccaagaagatggcttcaatgtgaccgatgccatggcgcagggaggagcccagccggtccccgacccctgccagtaggatcccaaacagcggaatccccaccagcgcataaaagatgcagaagaggcgcccggcatctgtgcgcagggccacattgccatagcctgggcagaggggcgatgcaggaagtctaggggccacctgggacccctccgtctccctgcaccttcccccatgaggaagctccttgccgccccccacatgccaatcccctccctcaccgatggtggtgatgatggtccctgagaaaaagaaggcgctgcccaggtcccaggctgagtggctgctgttgctggtcgagttggtttctgggtccgcaccccctcccagggcatcagccacctctgtcggccccgctgc

SEQ ID NO: 350795 - DNA, 923 bp, Homo Sapiens
cggcgaggccgtgctggaacccgggcctcagccgcagccgcagcgtgggccgacatgacgacagctccccagtgagccccccgcccggcccctccaggcgggcagtggagctggcccggcgcctgggcgcgccatgcgcagcaccactgctcctggccctgctggcgctggtcttgctttacttggtgtctggtgccctggtgttccgggccctggagcagccccacgagcagcaggcccagagggagctgggggaggtccgagagaagttcctgagggcccatccgtgtgtgagcgaccaggagctgggcctcctcatcaaggaggtggctgatgccctgggagggggtgcggacccagaaaccaactcgaccagcaacagcagccactcagcctgggacctgggcagcgccttctttttctcagggaccatcatcaccaccatcggctatggcaatgtggccctgcgcacagatgccgggcgcctcttctgcatcttttatgcgctggtggggattccgctgatctgggatcctactggcaggggtcggggaccggctgggctcctccctgcgccatggcatcggtcacattgaagccatcttcttgtgacgcttaccaccgtgggctttggcgactatgtggccggcgcggaccccaggcaggactccccgggctatcagccgctggtgtggttctggatcctgctcgggcctggcttacttcgcctcagtgctcaccaccaatcgggaactggctgcgagtaggtgtcgcgccgcactcgggccagagatggggcgcgctcacggcttcagggctgccaagctggaactgggcacatgtgacagcgcggcgttgaccagcgagccggggcccgcccggcccggccgccgcacgaaggaccagcactggttgccttcagc

SEQ ID NO: 350796 - DNA, 1211 bp, Homo Sapiens
  misc_feature (673)..(682): n is a, c, g, or t
  misc_feature (706)..(716): n is a, c, g, or t
  misc_feature (826)..(835): n is a, c, g, or t
  misc_feature (889)..(968): n is a, c, g, or t
cgaggcgtcgctgtgcggacgcggggggaggctggtgggagcgagctgcgggcgctgcgcggtggccctgctgtctggctgtgtgcactgctagtgtccacacacgtgtgcgtgggctctggaagccctggcgcggccggcacgcccatgggggccggggatgccggggcgtctgcggagagtgcaggtgggtgacgacagctccccagtgagccccccgcccgtgcccctccaggcgggcagtggagctggcccggcgcctgggcgcgccatgcgcagcaccacgctcctggccctgctggccgctggtcttgctttacttggtgtctggtgccctggtgttccgggccctggagcagacccacgagcagcaggcccagagggagctgggggaggtccgagagaagttcctgagggcccatccgtgtgtgagcgaccaggagctgggcctcctcatcaagaaggtggctgatgccctggggagggggtgcggaaccagaaaaccaaatcgaacagcaacagcagaacactcagcctgggaccatgcgcagcgccttctttatctcagggaccatcatcaccaccatcggctatggcaatgtggccctgcgcacagatgaccgggcgctccttctgcctcttacatgcccctccgcccgacctcgccttccgnnnnnnnnnngtcacgcaccgaccggcgctccgnnnnnnnnnnnaaagctaatggagtcgcccccgcacacagcgctccagctccgcacgcccactggtccaactcggtctcctccgcccagctccgcacgacccaaaaccgcgctcgtcctannnnnnnnnngatccccgcccactccctgcaccaaagaacttccccccttacccaactactctnnnnnnnnnnnnnnnnnnnnnnnnnnnnnnnnnnnnnnnnnnnnnnnnnnnnnnnnnnnnnnnnnnnnnnnnnnnnnnnngatctctcctcgccccggcacgccccccgcacacctaaagcgccccccacactccatcctctctctcactatagtgtataaacaccacgttgacatgcattatgtacgcgtagtacactaccaccgaaccagtacccccgttagtcatggtgatgccctcaacccacaggccatgaccaccacccccccgtatatactcccaacgaggtagcatcgcctcgtgaacgtctccgctcccgggcg

SEQ ID NO: 350797 - DNA, 977 bp, Homo Sapiens
cactcagaaaggccgctgggtgcggggagcgcagaggcggtgcagggcggctggctcgcctcggcgtgcagtgcgcgtgcgtggagctgggagctaggtcctcggagtgggccggagatggcggcggccgacggggctttgccggaggcggcggctttagagcaacccgcggagctgcctgcctcggtgcgggcgagtatcgagcggaagcggcagcgggcactgatgctgcgccaggcccggctggctgcccggccctactcggcgacggcggctgcggctactggaggcatggctaatgtaaaagcagccccaaagataattgacacaggaggaggcttcattttagaagaggaagaagaagaagaacagaaaattggaaaagttgttcatcaaccaggacctgttatggaatttgattatgtaatatgcgaagaatgtgggaaagaatttatggattcttatcttatgaaccactttgatttgccaacttgtgataactgcagagatgctgatgataaacacaagcttataaccaaaacagaggcaaaacaagaatatcttctgaaagactgtgatttagaaaaaagagagccacctcttaaatttattgtgaagaagaatccacatcattcacaatggggtgatatgaaactctacttaaagttacagattgtgaagaggtctcttgaagtttggggtagtcaagaagcattagaagaagcaaaggaagtccgacaggaaaaccgagaaaaaatgaaacagaagaaatttgataaaaaagtaaaagaggttgttcccgccttcctgaataggccacaaagggctgagactggagtagacactgtagagattagacacaagggagcttactgtgcagtttttctccgaagggctcgaaacagagagggaataaaagccaggtctaaaaagtatttttaggttgaaaaaagaaattgggaaccctgggttccctc

SEQ ID NO: 350798 - DNA, 869 bp, Homo Sapiens
tggcggcggccgacggggctttgccggaggcggcggctttagagcaacccgcggagctgcctgcctcggtgcgggcgagtatcgagcggaagcggcagcgggcactgatgctgcgccaggcccggctggctgcccggccctactcggcgacggcggctgcggctactggaggcatggctaatgtaaaagcagccccaaagataattgacacaggaggaggcttcattttagaagaggaagaagaagaagaacagaaaattggaaaagttgttcatcaaccaggtaaagtgagtttttcaaaaataagtatctagattggttattttgagtaacatgcataattccatgcaaagtgatgctaaataatgccattaactactttaatcagtgagtacattatccttataaaagtgataaagtttggcagttttgcctagtagattaaaaaaacaattcaaagaaacagccatgcatatggaaaatgattatttaacttgtggctgatgtacttaggggttgctgctctctgttgctttataataggcagggttagccagtatattgattggtagaataaatactcaaaattatcttgataggctgaaatgaggcaccagaatccaagagataacatttaggacattcttttatttatctgtggagaaagaaagcagcttacaaagtataagatagaccagcataaaaagaaggatgtaactatgatctaaggttagtgctttggtaaatcacttatatgtacacatatcttcacagtgagggtactttcacactctttgggaaaaagatagaaacactttatttgttcataagtttggcagccaacagtgcaatataacagctttttatta

SEQ ID NO: 350799 - DNA, 1309 bp, Homo Sapiens
ggcggccgcaccccccggccgggccgtgcttctgcccctacaaggtttgggccgaggtgggggagggtcctggttgccggccccgcccggtccctccccgccttttaggcgcccgcgtggccgggacgtcccagtcccgctccgtcctcctcgcctgccaccggtgcacccagtccgctcacccagcccagtccgtccggtcctcaccgcctgccggccggcccaccccccaccgcagccatggacgccatcaagaagaagatgcagatgctgaagctggacaaggagaacgccatcgaccgcgccgagcaggccgaagccgacaagaagcaagctgaggaccgctgcaagcagctggaggaggagcagcaggccctccagaagaagctgaaggggacagaggatgaggtggaaaagtattctgaatccgtgaaggaggcccaggagaaactggagcaggccgagaagaaggccactgatgctgaggcagatgtggcctccctgaaccgccgcattcagctggttgaggaggagctggaccgggcccaggagcgcctggctacagccctgcagaagctggaggaggccgagaaggcggctgatgagagcgagagaggaatgaaggtcatcgaaaaccgggccatgaaggatgaggagaagatggaactgcaggagatgcagctgaaggaggccaagcacatcgctgaggattcagaccgcaaatatgaagaggtggccaggaagctggtgatcctggaaggagagctggagcgctcggaggagagggctgaggtggccgagagtaaatgtggggacctagaggaggagctgaaaattgttaccaacaacttgaaatccctggaggcccaggcggacaactgattccaccaaagaagataaatatgaagaggagatcaaactgttggaggagaagctgaaggaggctgagacccgagcagagtttgccgagaggtctgtggcaaagttggagaaaaccatcgatgacctagaagatgaagtctatgcccagaagatgaagtacaaggccattagcgaggaactggacaacgcactcaatgacatcacctccctctgagccccacgccagcgtggccacctcagctctcttctctcctctcctttccattctctctatggggaggggagcaggcaggaggagcagaaattgccaacattgcacagccaggctgggagcagcctagggagagcccccatcatgcccaccacccactctggcactggcttcatcctttacctatcccctaccaccctcctttgctgcttaata

SEQ ID NO: 350800 - DNA, 1045 bp, Homo Sapiens
tctggtactggtctggaatttttgggatcgtcctcctcgcctgccaccggtgcacccagtccgctcacccagcccagtccgtccggtcctcaccgcctgccggccggcccaccccccaccgcagccatggacgccatcaagaagaagatgcagatgctgaagctggacaaggagaacgccatcgaccgcgccgagcaggccgaagccgacaagaagcaagctgaggaccgctgcaagcagctggaggaggagcagcaggccctccagaagaagctgaaggggacagaggatgaggtggaaaagtattctgaatccgtgaaggaggcccaggagaaactggagcaggccgagaagaaggccactgatgctgaggcagatgtggcctccctgaaccgccgcattcagctggttgaggaggagctggaccgggcccaggagcgcctggctacagccctgcagaagctggaggaggccgagaaggcggctgatgagagcgagagaggaatgaaggtcatcgaaaaccgggccatgaaggatgaggagaagatggaactgcaggagatgcagctgaaggaggccaagcacatcgctgaggattcagaccgcaaatatgaagaggtggccaggaagctggtgatcctggaaggagagctggagcgctcggaggagagggctgaggtggccgagagccgagccagacagctggaggaggaacttcgaaccatggaccaggccctcaagtccctgatggcctcagaggaggagtattccaccaaagaagataaatatgaagaggagatcaaactgttggaggagaagctgaaggaggctgagacccgagcagagtttgccgagaggtctgtggcaaagttggagaaaaccatcgatgacctagaagagaccttggccagtgccaaggaggagaacgtcgagattcaccagaccttggaccagaccctgctggaactcaacaacctgtgagggccagccccacccccagccaggctatggttgccaccccaacccaataaaactgatgatacta

SEQ ID NO: 350801 - DNA, 936 bp, Homo Sapiens
  misc_feature (657)..(802): n is a, c, g, or t
  misc_feature (852)..(887): n is a, c, g, or t
gtgtaggaccaaggtgaatgatctaataaccccattccaatcaaagctgtcaagaggaagtattggtgctttagttttctactcccaaaacagcacttaaagggttaaatatcctgatggtactcagctgaccaaaataaactagtaggtcagtgagtattgctttaatggtcaatttacctgggaatattggcgctagagaacagtgatataatttgaggtgtctacaaatgttgtctaaaaaacctctctcctctcatcccatgtttcctctgttctctactcttaaaatctaggtatcactgggaagagtaacgcactaggcccacaggaccttagtattaatataaatgagctttagttttcaaatggtcatttttttctctataactggagaaattccattaataaaagaaccctaggggatagagggtagagggagcgagaggggagtaagggaggacacggacatacttaacactacctagggcacctaaccatcagaaatgcataggcgcttaccaaaatgaattaatgaagataaaagcatcgcttaatggcagtatctgtaatttcccaataagattcacatcagtgctatcttatttaaaaataaacagatttccatccttacacaacattctcccaatattaggnnnnnnnnnnnnnnnnnnnnnnnnnnnnnnnnnnnnnnnnnnnnnnnnnnnnnnnnnnnnnnnnnnnnnnnnnnnnnnnnnnnnnnnnnnnnnnnnnnnnnnnnnnnnnnnnnnnnnnnnnnnnnnnnnnnnnnnnnnnnnnnnnncccggccgtaatggccgaattcccgggcatatgtccggtaccgtcgactnnnnnnnnnnnnnnnnnnnnnnnnnnnnnnnnnnnncggccgcttcctcgctcactactcgctgcgctcgtcgttcggctcggca

SEQ ID NO: 350802 - DNA, 558 bp, Homo Sapiens
  misc_feature (347)..(356): n is a, c, g, or t
gaactgtagtgctttattctcctactgcatggaacattcatgcattaacaagtacaatgaattagctttatgaatagatgattataagtgtatgcaatagaaatttggattttgtaatagaaaatttaccttgtaacagtgtgactacttattatgaaagccctatacacatgttaactagtggaagactacatagatgtttaggctatctagatgtagtttaaaaagaaattcaggaaatttttaatagttcatgaatgaccattaaagaaacagtctggggctgtatccctttgatgcatacggatcacactctgtaaatctgtaaacacatactttgatacgtnnnnnnnnnngtcttcctatgaccggaaaaacagactagtagaggccccgggtattccaccaggcctcctctaaagatatgctaatatggctaaatactatgattataaaaatgagaagtgctgagaaaatgagttccagacggggacttttatggatgaccttggctgacaaatgttttttggaaattgttttattttaaaattaccttcc

SEQ ID NO: 350803 - DNA, 2206 bp, Homo Sapiens
  misc_feature (252)..(260): n is a, c, g, or t
  misc_feature (842)..(906): n is a, c, g, or t
gggcctgtttcctcctctgtaaaataatgtctacttcacaaggctgtttcaaaggttaaaaaagatagcatatgtaaactgtcttagctcagcgcttgacatttcctaagtgtgccataaatattaatctctttccttactcccagctccaatacagcgtaacagtgctttaaaatgtatgtccttcatttctccttcatttctcagtcacctttgtctcttccctagggcatatccccaaattcttaaacnnnnnnnnntgatttttttccccttcatcaaacttttcactggctcccttagcacccagtagaaggtcccaactccttacagagtctgggttttcatgtccctgtttgcttacacagcttaatcttttgccactttccccctcacattgattaaggtagccaagtttaactatttacacaactattcacacaagttattctctgggcctgcagcagaaacatgattaacaattttaatgcccagagtaaacaacagaaatttttcttaaattaaaggaatagtgtgaaaatgctgtaagtacagaaaatgcaaccctccattccagtagaacaattttcctttgccttgtcccttggctctccaaaactgttcattttattgtggggtctttttaaaattttagtgcccctggggacaaagatctaatttccccaccctacttttgactctatcctggactacctttcctcacctctatctctctcaaccagactaactctttattccttagacttgatgatgcatccctctttagagatccaaagacaccccaagcatccccctctctcagcaataatcacatgtatagnnnnnnnnnnnnnnnnnnnnnnnnnnnnnnnnnnnnnnnnnnnnnnnnnnnnnnnnnnnnnnnnngaattgattttgggttcccactcctgacctaaccagaatatctgagaacataggcaggaatttacatttttgacaagctcctcatgattctgatgcaccaaaaattttaatgaataatcatcttccctactagactgaacaccttgagaggaaggactgtgtcttttattgttgttatattgttaatacctggcacagtgcttggaacattagcttggctaatgtttattgaatgaatgtatgaatgaaaaaatgcattatgaaagtttcctcttgtactctcatgttcgtagtgatgtttgttacttcctgggcagaaaagcttggttactactccatttgagctgtattaattctattttgcagagatatcaaggctcctacataataaatgatcattgtcctcctcaaaaactctttggcagttatcttggggaaatgtctttggagcatatggcaccattgttttcagtaacatttcagtcttgtcaaactttgttgtttgaaggtggatttacatttcggttatagccaaaaatcactcaaagctaagcctacttaaaaaagtggggaattaaactgggtttggagtaagcaatgaagtttgactctgaagtcccaaattctgagtcaaacagtgaaaaatgacttctaagatacaacatggtgacaaagtaccttagtgggaggtgcgatgggccccagaatatttacttcagttaacttggcttttatagaatcctggcaatgccatggaccttaagagaagtaattggctacctctagctaaacccagcgtggacaaaggagaataggacttgtatttaacatttacaaagaaggtgactgcataagcttttgttgttgttgctctactcaacctgttctccacaactgtttctaccagaagattattttatgtctgcaatttatgcttgcctccacttttgatatggtcttattgaagaaagcacaaaaataatcaaaaataaagtaaaacctgttttgagagtatgaaagaaattttaatgccacattgaggttctggctacttgtaagtaagagtaactgcatctggatgtgtttttattatacaattctatgtgaatctttagatgcagtgaaattcagatagcagcaaaatcacttatctgttcttttcggctaaaacactctaggtgaattttctaaacttccatggtttacatatttatatatgactaccaagatggagcaatccacggatggacttttgaataaactcaaatatttgatactgcttcctccaaggagggatgag

SEQ ID NO: 350804 - DNA, 941 bp, Homo Sapiens
  misc_feature (31)..(31): n is a, c, g, or t
  misc_feature (329)..(348): n is a, c, g, or t
gggtggcgggtccctaccgggcttagatggntgtccattgcaaaaaaaagagccctgcaaattctgtgtcttgaagaaagcagtggccacgcagtagttccgtgcccaggatctcccagaactagacttggcaaccacagctgggccagccttttttgttagaccattcttcctgactcctgcttaccatcagcacccttaaaatgacgaaatcaggcttaagttgcttttaggttacacagactggagtgtaggccctctcaggccaaacatctttcctcttctgtggtgctaaaattctgcacgaccagacaagtatggtaataggnnnnnnnnnnnnnnnnnnnngtgcaaatgattttgtgtttagtaaaataatggctaaacacatggatccattcaaacgcacaaatgtggaaagtattgacacggaaggaaaggctttgaagaattactgcctcaggaagcagtgccatggatgcgaatttaacacagtctacttcttcctaaaggaatatcatcccaaggaatgtcaaaaattaaaatcaccttttaatgtactggttgttgagtgtttctgctttacctcaagtcattctgaccactctacatcctgcttcaaagtgttctgacacttagatttggaatggctctaatgattctttgtacttgaatgtggtctgtcaagccatgggtgagtgccttgcacatactacacattcccataaataccaaatggaggaaaaactcccaaacacaaaaaatatacctcaagggaatctatggcccgggggcgggagaaaaagcgtaatgaaatgggcgcctggggcataacttggtttccctggacccccccttttcttggtaaaaaaaggggtaaaattctgggcgggggtccccccaatagggggaggccgtatttaaaatttctccaataaagc

SEQ ID NO: 350805 - DNA, 1844 bp, Homo Sapiens
cgtgttgccgcccgctgtgctatgagcagtcagagcgccgtctccacaagagtttacaaatgaaaatggaggaaatgtctttgtctggcctggataacagcaaactagaggccatcgctcaggagatatacgcggacctggtcgaggattcttgtttgggattctgctttgaggtacaccgggctgtcaagtgtgtgctacttcttcttggacgacacggaccctgatagcatgaaggattttgagatcgtggaccagcctgggcttggacatctttggacaggttttcaaccagtggaagagcaaggagtgtgtttgccccaattgcagtcgcagcattgccgcctcccgctttgctccccatctggagaagtgcctgggaatgggtcggaacagcagccgaatcgccaaccgccggattgccaatagcaacaatatgaataacgtcttgagagtgaccaagaagataatgatgacatcaatgacaacgactggtcctatggctcggagaagaaagccaagaagagaaagtcagacaagaaccccaattcccctcgaagatccaagtcattaaaacacaaaaatggggaacttagcaattcggatccttttaagtataacaattcaactgggatcagctatgagaccctggggccggaggagcttcgcagcctgctaaccacgcaatgtggggtgatttctgaacacaccaagaagatgtgcacaaggtccctgcgctgcccacagcacacagatgagcagaggcgaaccgtacggatttattttctcgggccctcggctgtccttccagaggtcgagagctccctggataatgacagctttgacatgactgacagccaggccctgatcagccggcttcagtgggacggctcctctgacctctcaccctctgattcaggctcctccaagacgagtgaaaatcagggatggggtctaggtaccaacagctctgagtcacggaaaaccaagaaaaagaaatcccatctgagcctggtagggactgcctccggcctaggttccaacaagaagaagaagccaaagccaccggcacccccgacgcccagcatctatgatgacatcaaactgacttgggtgcaagggatagcctttggctgagcagagccctctctcctgacccccacccaggtggcatagcctggcaaatggacggctgctgggggttggggcttgggaagcttggtgggccaggcaggcagaaggatccgattatgcgcccctggggggtgtcaaagtcctctgcaatggagcacgactcctcggcgtgcaggactcagacctggacatattatgccttggacataagtttggtggggaggcggttttcctatttattctgtgagttactggatgtccagctaggccaggggcctgacctgggcactgtgccagggcactgcctgccccccaccccaggaactggactaagccctgctgaggggcaatgtggcgacccgggaggctgtgggttggaagctgagcctggagggggcctgcctcggccgccctcagcaatgtgaatgggtccggtgcttggagctgaggggcaaggctgggcatgtcctgtctgtgtgcagaatcttatcaaatgcccccagtcccaggggtaggcaggcacagaagtgctgtctgctggaggtgggcgtccagaactgccgccaccttccctgcccctcacaggggcagccctttcccctcagtccccatgggcctccttggcagcaggagctgtccttttttgttgggtggccaggaaagggcctccagcctctacagcttcaaggaatgggaaagaggaaggtaag

SEQ ID NO: 350806 - DNA, 1172 bp, Homo Sapiens
cttgtgatcccagcgccctgcccacccttggagccaggcacacagtgacgactcggaggccaccagcctgtcctctgtggcctatgcctttctgcccgactcccacagctacaccatgcaggaattcgcccggcgttacttccggaggtcccaggccttgctgggccagactgatggaggtgccgcaggaaaggacacggacagcctggtgcagtacaccaaggctcccatccaggagtcgctcctcagcctcagtgatgatgtgagcaagctggctgtagccagcttcctggccctgatgcggtttatgggtgaccagtccaagccccggggcaaggatgagatggatctgctctatgaactgctgaagctgtgccagcaggagaagctgagggatgagatttactgccaggttatcaagcaggtcacgggacacccccggccggaacactgcactcgaggctggagcttcctcagccttctcacaggcttcttccccccgtcgaccaggctgatgccctacctgaccaagtttctgcaggattcaggccccagccaagagctggcccggagcagccaggagcacctccagcgcacagtcaaatatggggggcgccggcggatgcccccaccgggtgaaatgaaggctttcctgaaaggacaagcgattcgcctgcttcttattcacctgccggggggtgtggattataggacgaatatccagactttcacagtagcagcagaagtgcaggaggagctgtgccggcaaatgggtatcacggagcctcaggaagtgcaggaattcgccctcttcctcatcaaagagaagagccagctggtgcggcccctgcagcccgccgaatacctcaacagcgtggtagtggaccaggacgtgagcctgcacagccggcggctccactgggagaccccactgcacttcgataactccacctacatcagcacccactacagccaggggctgggggactacctcaaggggaagcttgcaagaagggccaaggagagcgcaactcccaagttggcgccttgaaaacctaaaaaggccaaagaaaccccttaggcaggactgtagtttaattgcaaaaactgaaagggagggaaacgctccttaaactatgggtaagaaataacactggagaacaaccccaaaa

SEQ ID NO: 350807 - DNA, 1691 bp, Homo Sapiens
  misc_feature (1511)..(1511): n is a, c, g, or t
  misc_feature (1572)..(1572): n is a, c, g, or t
cggtccggaattcccgggatgtctgtccctagcggaggcgcgggtgccgtgctgagagcgcctgcctgtgcgccccgagcggggctgggactcttccaagatgcccacgttcgcacagagaccccggatcgcggaagctcgcgtctcgaaaggcggtctcacgccctgcccgtcctgggttcacggtttttcatcacctgcggctgtcctgcgatcgaccacagctgtgcaggaggggcaggaggtatctgttgctgcagttaccggaacctttgccaggactagtacaggaccacgggctggtagctcagggatgtctcgtctgtgagttacagctgcacgctctccaggaaagaaggaatttcctcttctctggaaaccccaccacacagctggtttctcattggtgctgcttgcccattccctgagctgtgactgccagaggagtggggttggtggtgcctccagcccatcaggggcaggccctgggaccgcctgggaacaggaggactatggcacaaaccgagtgagtgatgggagcaacccgcagggctctgccacatccctgtcttccttcactgacatgaaacgcagaaaaggcagctttgccacaacacaggagcacgcaccgaatgtggccgcccagggctctgtccttgaccctgttgtccaggactgtttaccaagggctgacaggcactgagtgccccgtgcacctggccagacactgcactcatgcagcggaaaggacagtgaacgagactttgtccctggcctccaaaggcttagggcgtagtggctgtcatgaggcacagtgacaagggccaggagggggacctcttagggggccatgcagtgatggaagccagaaggaatgaaggcctgcagtgaggatggagtggtcggcctgaagccatctctagcaagtggtcaggacgctgattgttctgcgcaggttggaggtaggtggtgagtctgagaaaggggccggaaagactccccagcaactgctggcaaagggtgaagggcacgttcccacaggattcaagccagctgcctttggaggggagacgggcactcagtttaggcgctcctacagcagggctcagcaagacaagcaggttgcggcaagggtctgcgcactgctgtgtaaatgtaggggcatcggggggcacgaaagaccaggggagaagtgtgcatcacccttggggttaagggacagttgtctgctaggtgttgcttcctggagatggctgaaaagccagtccagtctgcagggaccaggccaccacccacctgatgtgggagcatttcccccaatccctgctgggctgctgaatctgggggacatagggaagctgaggctggtgttctgagtagtggcagagctgagccacagggcatgtctgaggtcagccccgagcaaaatggaatagggactcagggtgggtcaggtgactggaaagcgggcactgtgcacgcagcccttgaggggagccagggtgggtggnatcccccactgtgtgcagaaggcagcagccttggaagcagggtgtgctcctcggtgtggtngctcgataccagaaaatgactctaaaaactgaagagtgtttgagtttcattcacacaaaacatggacatcatctttgaggctctgtcccagagagacaggccatccctcatgtctgtta

SEQ ID NO: 350808 - DNA, 1056 bp, Homo Sapiens
  misc_feature (751)..(751): n is a, c, g, or t
  misc_feature (928)..(928): n is a, c, g, or t
  misc_feature (931)..(977): n is a, c, g, or t
gggtccggaattcccgggattgtgttgtggcaaagctgccttttctgcgtttcatgtcagtgaaggaagacagggatgtggcagagccctgcgggttgctcccatcactcactcggtttgtgccatagtcctcctgttcccaggcggtcccagggcctgcccctgatgggctggaggcaccaccaaccccactcctctggcagtcacagctcagggaatgggcaagcagcaccaatgagaaaccagctgtgtggtggggtttccagagaagaggaaattccttctttcctggagagcgtgcagctgtaactcacagacgagacatccctgagctaccagcccgtggtcctgtactagtcctggcaaaggttccggtaactgcagcaacagatacctcctgcccctcctgcacagctgtggtcgatcgcaggacagccgcaggtgatgaaaaaccgtgaacccaggacgggcagggcgtgagaccgcctgcgggaggatcagcgatgtcaagacgttacaaacgcacgaaccccctcgccgtctccctggcgtttgtgaggtcctgtccaagctccttcacacgtagatcaccgggcctcgctcccccgactccttccgtgggcctgaaccttgaggtacttaggcctccccacgctggaggggctctgtagggacgtcgaggccacgtttccagtcatccctccacccgtctctccccaggggcttgagtgttgaaagcaagactttgcangagtctggcgttaatacgcatccccaaagtctggagtcgataaggacctgaagacacgacgccgaccggcggccggggggacaccggggcatgcgcgtctcatcccaggggggaggcccaaacggaaacctctgaaccctgccccgcgcccaggtgtccaaccaatggggggctccnttnnnnnnnnnnnnnnnnnnnnnnnnnnnnnnnnnnnnnnnnnnnnnnngaggcctttttaaaaaaacggaaaccttttccgcagaacccggggggtgtccttgttgaccaaccccttgggcgacccc

SEQ ID NO: 350809 - DNA, 1182 bp, Homo Sapiens
  misc_feature (788)..(788): n is a, c, g, or t
  misc_feature (828)..(828): n is a, c, g, or t
  misc_feature (919)..(919): n is a, c, g, or t
  misc_feature (1015)..(1015): n is a, c, g, or t
ggtccggaattcccgggatcatgtctgtccctagcggaggcgcgggtgccgtgctgagagcgcctgcctgtgcgccccgagcggggctgggactcttccaagatgcccacgttcgcacagagaccccggatcgcggaagctcgcgtctcgaaaggcctgtgggtcaaggggggccatctcggtgggatctggggcgggacgacccccactgctgaaccctgggcgcggggcagggtcagaggctccgctcggcctccccctggatgagacgcgcatgcccggtgtcccccggccgccgtcggcgtcgtgtcttcagtccttatcgactccagactttggggatgcgtattaacgccagactcctgcaaagtcttgccttcaacactcagcccctggggagagacgggtggagggatgactggaaacgtggcctcgacgtccctacagagcccctccagcgtggggaggcctaagtacctcaaggttcaggcccacggaaggagtcgggggagcgaggcccggtgatctacgtgtgaaggagcttggacaggacctcacaaacgccagggagacggcgagggggttcgtgcgtttgtaacgtcttgacatcgctgatcctcccgcaggcggtctcacgccctgcccgtcctgagttcacggtttttcatcacctgcggctgtcctgcgatcgaccacagctgtgcaagaggggcagggaggtatctggttgctgcaggttaccggaacctttgccaggactagtacaggaccacgggctggtagctcanggatgtctcgtctgtgagttacagctgcacgctctccagnaaagaaggaatttcctcttctctggaaaccccaccacacagctggtttctcattggtgctgcttggccattccctgagctgtgactgccanaggaattgggggttggtggtgccctccagccccatcaggggccaggcccctggggaccgcccggggaaccaggaaggactatggcaccaaccccanttgaatgatgggaagccaacccgcaggggttctgccacattccctggccttccttcccgtgacatgaaaccccagaaaaaggcagtttttggcccccaccccgggaaccccccaccggattggtggcccgcccaaggggctctttcccttgaaccccggttggtcca

SEQ ID NO: 350810 - DNA, 1138 bp, Homo Sapiens
gcctgggtggcgaattcggcacgaggcgggtgccgtgctgagagcgcctgcctgtgcgccccgagcggggctgggactcttccaagatgcccacgttcgcacagagaccccggatcgcggaagctcgcgtctcgaaaggcctgcggtctcacgccctgcccgtcctgggttcacggtttttcatcacctgcggctgtcctgcgatcgaccacagctgtgcaggaggggcaggaggtatctgttgctgcagttaccggaacctttgccaggactagtacaggaccacgggctggtagctcagggatgtctcgtctgtgagttacagctgcacgctctccaggaaagaaggaatttcctcttctctggaaaccccaccacacagctggtttctcattggtgctgcttgcccattccctgagctgtgactgccagaggagtgggaggttggtggtgcctccagcccatcaggggcaggccctgggaccgcctgggaacaggaggactatggcacaaaccgagtgagtgatgggagcaacccgcagggctctgccacatccctgtcttccttcactgacatgaaacgcagaaaaggcagctttgccacaacacaggagcacgcaccgaatgtggccgcccagggctctgtccttgaccctgttgtccaggactgtttaccaagggctgacaggcactgagtgccccgtgcacctggccagacactgcactcatgcagcggaaaggacagtgaacgagactttgtccctggcctccaaaggcttaagggcgtagtggctgtcatgaggcacagtgacaaggggccaggagggggacctcttagggggccatgcagtgatgggagccaaaaagaatgaaagcctgcactgaaggatggaatgggtcccccctgaaaccattctctaccaaggggtcagggaccctgaatggttctgccccaggttttggaggtaaagtggtgcactctttaaaaaaagggccccgtaaaaacttttctacgcaatgtgctgtccacaggcgtttaacgggccccttctcccccgggtatctaaagccccgctggcctcttttgcgtaggagagaacgctacttccattcttacgggcccccccacaactcgggg

SEQ ID NO: 350811 - DNA, 1192 bp, Homo Sapiens
  misc_feature (50)..(81): n is a, c, g, or t
  misc_feature (1047)..(1047): n is a, c, g, or t
  misc_feature (1151)..(1151): n is a, c, g, or t
  misc_feature (1177)..(1177): n is a, c, g, or t
tgaacggggttgactatatggggacaccggaggtcacgcggtggcggcgnnnnnnnnnnnnnnnnnnnnnnnnnnnnnnnnatggatcaggccaaatcggccgagctcgaattcgtcgagagcggaagcgctcgtgaccaccatttccgacccgggcaagatggcagcggcgctgcgcgtgcgttgttgagtgttcgggacgccggcctgcaggcgccatggtcttcctcaccgcgcagctctggctgcggaatcgcgtcaccgaccgctactttcggatccaggaggtgctgaagcacgccaggcacttccggggaaggaaaaatcgctgctacaggttggcggtcagaaccgtgattcgagcctttgtgaaatgcaccaaagcccgatacctgaagaaaaagaacatgaggaccctctggattaatcgaattacagctgctagccaggaacatggactgaagtatccagcgctcattgggaatttagttaagtgccaggtggagctcaacaggaaagtcctagcggatctggccatctacgagccaaagactttcaaatctttggctgccttggccagtaggaggcgacacgaaggatttgctgctgccttgggggatgggaaggaacctgaaggcattttttccagagtggtgcagtaccactgaggactgttgctgtattgattaggaaaagagacagagtaatttgcagtttgtttgatttatacttttgtttatctacaacccaataacagacatgagggatggccctgtctctctgggacagagcctcacagatgatgtccatgttttgtgtgaatgaaactcaaacactcttcagtttttagagtcattttctggtatcgagcgaccacaccgaggagcacaccctgcttccaaggctgctgccttctgcacacagtgggggatccccacccaccctgggctcccctcaagggctgcgtgcacagtgcccgctttccagttacctgacccaccctgagtccctattccattttgctcgggggctgacctcaggacatgnccctgtgggcttcagctctgccactacttcaggaaacaccagcctcaggtttcccttatggttcccccaggatttcagtcagcccagcagggattggggggggnaattgtttcccacatcaggtggggtnggttgggtcgggggg

SEQ ID NO: 350812 - DNA, 958 bp, Homo Sapiens
  misc_feature (230)..(288): n is a, c, g, or t
atgttaattaaagctaagttggattcccttcaagatataggcatggaccaccaagctcttctaaaacaatctgatcacctaaaccacctgaatcctgacaagtttgaatccacagatttagatatgctaatcaaagcggcaacaagtgatctggaacactatgacaagactcgtcatgaagaatttaaaaaatatgaaatgatgaaggaacatgaaaggagagaatattnnnnnnnnnnnnnnnnnnnnnnnnnnnnnnnnnnnnnnnnnnnnnnnnnnnnnnnnnnnaaaaagcatgaaaatcaccctaaagttaatcacccaggaagcaaagatcaactaaaagaggtatgggaagagactgatggattggatcctaatgactttgaccccaagacatttttcaaattacatgatgtcaatagtgatggattcctggatgaacaagaattagaagccctatttactaaagagttggagaaagtatatgaccctaaaaatgaagaggatgatatggtagaaatggaagaagaaaggcttagaatgagggaacatgtaatgaatgagacattagatcagcaacagttcttcacagaggaagaactaaaagaatatgaaaatattattgctttacaagaaaatgaacttaagaagaaggcagatgagcttcagaaacaaaaagaagagctacaacgtcagcatgatcaactggaggctcagaagctggaatatcatcaggtcatacagcagatggaacaaaaaaattacaacaaggaattcctccatcagggccagctggagaattgaagtttgagccacacatttaaagtctgaagtccaccagaacttggaagaaagctgttaactcaacatctatttcatctttttagctcccttcctttttctctgctcaataaatattttaaaagcatatttgaaataaagggagatacttttt

SEQ ID NO: 350813 - DNA, 2251 bp, Homo Sapiens
taggtagcgaggcctgggtggcgaattcggcacgaggcaagagagcagaagatgtaaaaggtgaccgggagcttcgaccagggcctcgagatgagccacggtccaatgggcgacgagaggaaaagacagagaagccccggttcatgttcaatatcgccgatggtggcttcacagagcttcacacactgtggcagaatgaggaacgggcagctatttcctcggggaaactcaatgagatctggcacagaagacatgactattggcttctggctgggattgtcctccatggctatgcacggtggcaggacatccagaatgatgctcaatttgccattatcaacgagccatttaaaactgaagccaataaggggaactttctggagatgaaaaataagttcctggcccggaggttcaagctcctggagcaggcgctggtgattgaggagcagctgcggcgggcggcctacctgaacctgtcgcaggagccggcgcaccccgccatggccctccacgcccgcttcgccgaggccgagtgcctggccgagagccaccagcacctctccaaggagtcgctggcggggaacaagccggccaacgccgtcctgcacaagggtaagggccgcggcggccccgcgcgggggagggcccacaacgctgcttctgaaccagctggaggagttgctgagcgacatgaaggcggacgtgacccgcctgccagccacgctgtcccgaataccccccatcgcagcccgccttcagatgtccgagcgcagcatcctcagccggctggccagcaagggcacggagcctcaccccacaccggcctacccgccgggtccctacgctacacctccggggtaccggggcggccttcagcgccgcaacccgtaaggggccctggccgccgcaggcgccaattacagccagatgcctgcagggtccttacatcacagccgacaccaacggccctccagtgcttgtgaagaaggagaaggaaatggtgggggcattggtgtcagacgggctggatcggaaggagccccgagccggggaggtgatctgtatagacgactgactggatcccaggcctgcccttcacccaggccccgtccccgaggccgacccccagctcaagcgctggggcctgctgccagccctccaccttccccaccccttgggccatcactgggctaggaacccctttgcccctctctgcagctcctctcttcaagaacgggccctttgtctttctccactcccacacacctttcccaccaagccttgaagactgtgctggtgagaagaagtctgggtgggagatggctggcagggtcttccaagtaccttcctcccacactgccaagtatacacaacttcccagtaaatggttgtggggaggaaagaggtggagcctccccagccgtttccctgcagaatcagctctgtctcatgtggaagtggagaatcagccttgcctggcctttaggaacttttgtggggaagagagctttgaagagaggagggggactttagagagggatgaaaatgagccctgggagggaggaagggacgaggaggggtggctgcatgttaccgtcccctacctctccccacgtggagggtggagcagttatgagggaggaagtcaactgctgttcagcctcagaataaaggtgccgttcactggctcagttacctcctgtgtaccggcatcttgtgttgggaatgttcccccctccctagggaccaaggaccacccctacaaaaagagtaatggttgggtgatactccctcaagccaaagaggagctccccaacctgttctagggacccaggtaacctagaagggtgggagagaatacaatgggccagatgtggtggaagcccagctctggggctcaggttcctggaagacttctactaccctccctcctcaaggcctggatacagactaaatttgtataagtcaggcaggggacctagtcagggtcttgggagctaccttgtcgttgggaccagagcaaaatagtggagggcaggctagggaaatgtgggcacatcccccctcccaggaggggccggggagagtggcagtttgcatggcgaaccccccacttcctctttgctgccccttcactttcttgctgcccctttcccagtctctcttcacacccactcctggtctgtcctgatcccctcttctgtatcaggtttattggttgtacatataaattatactttcctttcaaaaa

SEQ ID NO: 350814 - DNA, 2731 bp, Homo Sapiens
  misc_feature (1473)..(1473): n is a, c, g, or t
  misc_feature (1843)..(1843): n is a, c, g, or t
tcggctcggcccctttgtctgaccacctggttgtgcggcctgggctgggctccaaggcaggctccatgtccaagcaggagcttgacgacattctcaaatttggcactgaagagctattcaaggatgaaaacgagggggagaacaaggaggaggacagcagtgtgattcattatgacaatgaggccatcgctcggctgttggaccggaaccaggatgcaactgaggacactgacgtgcagaacatgaatgagtatctcagctccttcaaggtggcacagtacgtcgtgcgggaagaagacaagattgaggaaattgagcgagagatcatcaagcaggaggagaatgtggaccctgactactgggagaagctgctgaggcatcactatgagcaacagcaggaagacctagcccggaatctaggcaagggcaagcgggttcgcaagcaagttaactacaatgatgctgctcaggaagaccaagacaaccagtcagagtactcggtgggttcagaggaggaggatgaagacttcgatgaacgtcctgaagggcgtagacagtcaaagaggcagctccggaatgagaaagataagccactgcctccactgctggcccgagtcgggggcaacattgaggtgctgggcttcaacacccgtcagcggaaggctttcctcaatgctgtgatgcgctgggggatgccaccacaggatgccttcaccacacagtggctggtgcgggacctgaggggcaagactgagaaggagtttaaggcctatgtgtctttgttcatgcgccatctgtgtgagcctggggcagacggctctgaaacctttgccgatggggtccctcgggagggactgagtcgccagcaggtgttgacccgcattggagtcatgtctctcgtcaaaaagaaggtgcaggagtttgagcacatcaatgggcgttggtcaatgccggaactgatgcctgaccccagcgccgattctaagcgctcctccagagcctcctctcctaccaaaacgtctcccaccactcctgaggcttctgctaccaacagtccctgcacctctaaacctgctactccagctccaagtgagaaaggagaaggcataaggacacctcttgagaaggaggaagctgaaaaccaggaggaaaagccagagaagaacagcagaattggggagaagatggagacagaggctgatgcccccagcccagccccatcacttggggagcggctggagccaaggaagattcctctagaggatgaggtgccaggggtgcctggagagatggagcctgaacctgggtaccgtggggacagagagaagtcagccacagagtcgacgccaggagaaaggggggaggagaagccgttggatggacaggaacacagggagaggccggagggggaaacaggggatttgggcaagagagaagatgtaaaaggtgaccgggagcttcgaccagggcctngagatgagccaccggccaatgggcgacgagaggaaaagacagagaacccccggttcatgttcatatcggcgatggtggcttcacagagcttcaacactgggccaaatgaagaacgggcagctatttcctcggggaaactcaatgagatctggcacagaaaaaatgactattggcttctggctggaattgtcctccatggctatgcacggtggcaggacatccagaatgatgctcaatttgccattatcaacgagccatttaaaactgaagccaataaggggaactgttctggagatgaaaaataagttcctggcccggaggttcaagctcctggagcaagcgctggtgattgaggagcagctgcggcggngcggcctacctgaacctgtcgcaagagccggcgcaccccgccatggcccttccacgcccgctttcgccgaggccgagtgcctggccgagagccaccagcacctctccaaggagtcgctggcggggaacaagccggccaacgccgtcctgcacaaggttctgaaccaactggaagagttgctgagcgacatgaacgcggacgtgacccgcctgccaaccacgctgtcccgaataccccccatcgcagcccgccttcagatgtccgagcgcagcatcctcagccggctggccagcaagggcacggagcctcacccacaacgggctaaccccgcgggttccctacgcttacaccttccggggttacgggggcgggcctcaacgccgaacccgttaagggggcctgggccggccggaggcgccgccattttcacggccaagaatggcttggcaaggtctcccttcccattcccacaagcagggccaaccaaacggggcctctcccaggtggctggtggaaggagggacgaacggaactggtcgggggggcctatggcttggtcaaagacgggcgctgtaatccgggaagggaaggccccgaagccgggggaaggtggaccctggtattagaacggaactggacttggatccccaggtcctgtgccctttcacccaaggcccccgtcccccgagggccaacccccaagttcaaagcgctgtggggcccgttgctgggcccaggcccttccaaccttttcccccaacccctttgggggcccattcactgtgggcctagggaaccccttttggccccttcctctggcaggttcctcctccttccaagaagcggccctttggtctttctccacttcccacacacccttttccaaca

SEQ ID NO: 350815 - DNA, 649 bp, Homo Sapiens
gccctgtgtaccctcgcagccagacgtgctcttccgtcccgtccttgctcgtcctctcctcacctccttctttcctatcttctgggaagcatcaccatttatgacaagcacaggcacaggcctccttagctcacagcgctttcagagtgttcaattatccactcgatagcagcccaccccttctttgcattggatgatatcgtattggccattaaactttccaaataactaccaaggctaatccccttcacagtgatgatggcttcttgtgtgagcacggtcatttctgggttctctggatgaggtgtgtacaccaacctctcattaactgacaccaaatttgtgagtgtgatattggtagaacaaagttccattttcttttccactggatccaccacagaatgttctcggatgtatgtcaatgtcctactggttcccaaaatcgctctcacgaggctgggcagcccccactcggtgctgagcaggcgcaagctgtgcaggcggccgcggccgtccacgcggcgctgtagcacatccacgcccagcacgctcgggttcatcgggttcgggtacttgcgcatggccgcctggatgaccgtgtcccacgggtggctgcacgcctcggcacctggcagccccttggtttttg

SEQ ID NO: 350816 - DNA, 748 bp, Homo Sapiens
ccggagccgcgcggccgaagcacccggcccggatcgcagagcccgcgccctgcgccggcggcaatgaagatctggagctcggagcacgtgtttggattttgggaaccagtaggacattgacatacatccgagaacattctgtggtggatccagtggaaaagaaaatggaactttgttctaccaatatcacactcacaaatttggtgtcagttaatgagaggttggtgtacacacctcatccagagaacccagaaatgaccgtgctcacacaagaagccatcatcactgtgaaggggattagccttggtagttatttggaaagtttaatggccaatacgatatcatccaatgcaaagaaggggtgggctgctatcgagtggataattgaacactctgaaagcgctgtgagctaaggaggcctgtgcctgtgcttgtcataaatggtgatgcttcccagaagaaaggaaacgaacggaggtgaggagaggacgagcaaggacgggacggaagagcacgtctggctgcgagggcacacagggccggggaggaggattaggctggactgatcgcgggtcgcaggtgaccccgggaccagatgtccctcccctcatgagcgtgcaacagggagcagccccagccagccccaccgccgccgtctgcgtggatggagggctcgaggcccttaggggcggcgccatcgtcctgcctgccgcgggtggcccagccccttctctccctgaggtgaccc

SEQ ID NO: 350817 - DNA, 2252 bp, Homo Sapiens
  misc_feature (803)..(803): n is a, c, g, or t
  misc_feature (932)..(946): n is a, c, g, or t
attaaattagaagttgtcctagtgcctggtgtttgctcagagtttccagaagagagggaagggcaaggtttaaatggcatgcaggacaactggaatgcccccatctctctcgctgacacggatccagtcatacctggggctggacgggatttggaggccctggtcatttgcagagtgaatggtgaagggcgcggaaaaggtttgcttggaggaaagaccggttgcagaggcgaggcggagggaggaggggcggaggcagcaggtctttgtttgtggtaggtcactggcttccatcagggaggaggaaagaggctgtgcccttcctggctcttggctgcaccactgaggacgcaccgagggacagcgtgctcacccatcctttgcacagtgctggccccaagccccacggccttccagctaggattttctgctgggctcatgcagaggcaggggacaggtgcatggaagagccgccccacccgacacaccattgtttgaaaatcactgttctctttactcacttaaaaaagtgtacagggaacacctgttcctggcataatgctccaacctcgcggaaggggccaggtgcccttcatctggctctggctgcttccgacctgggcccacgtcatcgttcacgtcctctgtgaccaccactggtcacggtgctccctggcccagcctccaacccacccagcaccctggcatctcccaggccagtctgctgcacccagcgagcttccagtcagaagccaggctgaacggccctcctgccccatcagcttcgtgtcttcttttttttnaaagaactgaaatagtccccaagaggcctcatggcctgaagactcacaatcatccacctgtaatttatgataaatgtctgggagcatttaccatttgcgtccgtgagtatttatagccctgaatgggcnnnnnnnnnnnnnnntggaggaggccctgcagccaggagctacacacctgtccccactagtgtcccctggttgacagagccccctcagcctccccaaggctgtcactgcggctgtgacagctgaggagtgccgcctttgaaagccagtggacagtcgctccactagggggagaggccctggccctggcgcagaggaggcgttgcgaggcgggacgggggctggaggggctgagcagccttcagggcagggactgggccctgggtcactggagacgttgatattagtccgtctgctgccaaattgctccccaccacatgagccccaggggtttatgtcccaggaaggcgagggtgcccatctgagcggaattgggaggggacggcaccagctcatctccctcagggcctttgcctcctggtgctgccctggtggctgctcctgcaccacagcccctgatggctgctgctagtcctgagttgctgggtttacccccagcccacacttcccacctgggcctgagggtgcggccagtgccctagtcctagccactacaggagtcattctgagacctgcatggaggccatggggtcttcccaggcccctcaatcagctgcttccagggtcagcagggcagggtgctgccagtaaggtcctcagggagcacagcccggccgcccaggctgggggatactggggcagagcttccaggtctgtggggcctgatctctccccaaggctctccaggccttggtgcgccctccacagtgaccttcagagaggctgcaccccctcagaagaacagtgagaaatctctccatcacacgctccctggtccttatgtccctgaggccacccttccccaccccccagtgcctggagaagcgtgagactctggaggggcgccaggaggccaggggtcctcagggctaggcctggagctcggcccaagagctgcttttgcgaagcctgtcttgaatccggattcaccagagaacaagagcctcccagcctttggcgtttctgggcctgtaaagatgtgtgtacctcccaggccactctgatgcaagggcagggaccatgccaggcctgggttgggaatggctctgtgactccagaagctccgtctaaaactccaaagatgcccaaaaggctgtgctgctatgtggaatgtgtattatttgtgagcacgatgcggcttcttcctcattttgcagagcaacctaagcgggcagatgtacaaaccgtgtgttcgaaacccctgagtccatgtgtgtgaaaatgcaggttttctcttagaaataaagtggtgacttgtgctgt

SEQ ID NO: 350818 - DNA, 645 bp, Homo Sapiens
gctataaaacccaggccggcaggatcgctgcacccgcggcggcctcctcggtgcgcgacccccggctcagaggactctttgctgtcccgcaagatgcggatgctgctggcgctcctggccctctccgcggcgcggccatcggccagtgcagagtcacactggtgctacgaggttcaagccgagtcctccaactacccctgcttggtgccagtcaagtggggtggaaactgccagaaggaccgccagtcccccatcaacatcgtcaccaccaaggcaaaggtggacaaaaaactgggacgcttcttcttctctggctacgataagaagcaaacgtggactgtccaaaataacgggcactcagtgatgatgttgctggagaacaaggccagcatttctggaggaggactgcctgccccataccaggccaaacagatgcacctgcactggtccgacttgccatataagggctcggagcacagcctcgatggggagcactatgccatggagatgcacatcatacatgagatagagaatgggacatcgatgaacgcgatagatgcccaggaccctgaagacgacattgtcgtgctggcctttttggggaggctggaacacaggtgaacgatggcttccagccactgtgga

SEQ ID NO: 350819 - DNA, 1457 bp, Homo Sapiens
gtagcgaggcctgggtggcgaattcggcacgagggtggagtcgcatatgagtggcaggtttcgcagccaatagtatggaaagttctgccagcgggtctcggggaggccaatgggcaggggcgtgggcggggcgtggaccagccgcgccgagcggggcctctccgggccgcgtctgtggggtcgagactgcgcggccgttgggcgtgcagcggcgccagtcggcggacgaggggcccccgggagttgctggactgagacatgagcctccaactgtgtggttgggctcggtagcacatcgtgggacttgggtgtgcgcccacagatggtttggccctgcagtgaccagagcagcccaagccgccaccatggtgaaattgctagtggccaaaatcctgtgcatggtgggcgtgttcttcttcatgctgctcggctccctgctccccgtgaagatcatcgagacagattttgagaaggcccatcgctcgaaaaagatcctctctctctgcaacacctttggaggaggggtgtttctggccacgtgcttcaacgctctgctgcccgctgtgagggaaaagctccagaaggtcctgagcctcggccacatcagcaccgactacccgctggccgaaaccatcctcctgctgggcttcttcatgaccgtcttcctggagcagctgatcctgaccttccgcaaggagaagccgtccttcatcgacctggagaccttcaacgccggatcggacgtgggcagcgactcggagtatgagagccccttcatggggggcgcgcggggccacgcgctgtacgtggagccccacggccacggccccagcctgagcgtgcagggcctctcgcgcgccagccccgtgcgcctgctcagcctggccttcgcgctgtcggcccactcggtctttgagggcctggccctgggcctgcaggaggagggggagaaagtggtgagcctgttcgtgggggtggccgtccacgagacactggtggccgtggccctgggcatcagcatggcccggagtgccatgcccctgcgggacgcggccaagctggcggtcaccgtaagcgccatgatccccctgggcatcggcctgggcctgggcattgagagcgcccagggccgtgccgggcagcgtggcgtccgtgctgctgcagggccctggctgggcggcatccttcctcttcatcaccttcctggcagatcctggccaggagctgcagggagaagagtgacctgtctgtcactggtccttctccctggatagatagggctacaccgtccttgtccagtgattgtagcttaccgcaaagatgtataagcagggcaccgccatatgtaccttagcgacggtagaccagacagagaagctcgggccggtacacaaatgctgagtccccagtgacggtagattccacaagaagtatacactgtgtccgtgtgaacaaac

SEQ ID NO: 350820 - DNA, 1456 bp, Homo Sapiens
gcgattgcgtgggttctgcctaaagctgaattcccagcgctttggcttctctgagttggggttgtgtataggggtcttcgaacagttccggaaccagccagcagcctttaattcttgggcggaccacggccggttctgtgttcttggctaagatgagcagccaccataccacctttccttttgaccctgagcggcgagtccggagtacgctgaagaaggtctttgggtttgactcttttaagacgcctttacaggagagtgcgaccatggctgtagtaaaaggtaacaaggacgtctttgtgtgcatgcccacaggggcaggaaaatccctatgctatcagctccctgctctgttggccaaaggcatcaccattgtagtctctcctctcattgctttgattcaggaccaagtggaccacttgctaaccctaaaggtacgagtaagttccctgaactcgaagctctctgcacaggaaaggaaggagctgcttgctgacctggagcgagaaaagccccagaccaagattctgtacatcaccccagagatggcagcttcatcctccttccagcccaccctgaactccctggtgtcccgccacctgctgtcttacttggtggtggatgaagctcattgtgtttcccaatgggggcatgactttcgtcctgactacttgcgtctgggtgccctgcgctcccgcctgggacatgccccttgtgtggctctgaccgccacagccaccccacaggtccaagaggacgtgtttgctgccctgcacctgaagaaaccagttgccatcttcaagactccctgcttccgggccaacctcttctatgatgtgcaattcaaggaactgatttctgatccctatgggaacctgaaggacttctgccttaaggctcttggacaggaggctgataaagggttatctggctgcggcattgtgtactgcaggactagagaggcttgtgaacagctggccatagagctcagctgcaggggtgtgaacgccaaggcttaccatgcagggctgaaggcctctgaaagaacgctggtgcagaacgactggatggaggagaaggtccctgtaattgttgcaaccattagttttgggatgggagtggataaagccaatgtcaggtgagctttggttcttgccctgccctcctggtctgggcctggctcagggtggattgcctagtgctgtgcccaaaggaccaggtgcatgtgctccttcgagggctagaggggaaggaagctccaggagagagtccttagaatacagcctgaatgctgacagctcctgtgcggcctgctcccaggtgactgcacggcatggttctggcaccccccaggatggggcagcatgcagtctgtcaggcttgtcctttaacatagtcctgttcactcacatctcagtaggtggatcctatgaggaggtgggaataaaggaactat

SEQ ID NO: 350821 - DNA, 2093 bp, Homo Sapiens
  misc_feature (1626)..(1626): n is a, c, g, or t
caaccacaggctgggagccaacaagtccaggcgttcatccagtttttcccctaaagggccctaccaatgcttttccaatcaaagatccgggtgttcagtgggttatttctttacccaagagcgcccttccaatctaatgtatcagacaaggtggtaaattttcttggtttcacaaaaggcaatatgatttcctatttgaaattaattcacttttccacaacaagtgacccacaagccaattccagcggcacaagaaaacgaagagagctgcaacaacttcattaggacaatgtgttttgctctggaatatttcattatcaatataaagccaccgggtcccagccccacccccaaacatcccctttgaatattactttgttacatacttaaactaaagaacaacatctcaatacacttcagtgtcagcagatacaattggactcatgaaatgacacccttaaatgtaattttacccaagaaggcaaaacactaggactgtatacaatggatttccttaagctcatttatgcccagtttttcaaagtcaataagggtcttattacccggggtaaagagccaagtggaccaaacttgtcagaatgctttgggggaacattcaacatcaaaatgatccccagaaagtggattggaattccagccagaactgctattatgtacaataataatccttttccactctggatgcccaatcgagctatccccttcaccctgcctctccctaaactgccctttgtccttgctgcttcaagtggaccactttttgtttttaatatgatagggctacagggaaaagtcagctaaactcccttcataaaatcagtcagtcatatgctgaagtaacactatcaagatgatactcttgagtggttccaattttcagagatctaaattgtattttttaaaaatatttctgattagagatcagtggatcactaagcgaacaattttgtctaaatgaacaccttaggtgcaattttggatgaagaagtataccagtctggggaattgccaaagcagttatcattaaagcatgtcacacttcaacaccaactcctccttaaaagggacatcagaataaatggaatagaactccctaggacttaggaaccgcaaatcactcccttgagtcttatgtgtgcaacatgtattagagaacataaagggagaatatttggcccctgtgaacctctgtagcttattcaccagacatgccaaaaaggagaaggtcggttgagtcaggagggacatgagccaaaggcaaatctaggatccttgctcagaatgcctatttgcaggtacagcctgcctacaaaaccagtttacaaagccttcctagtatgcacttgtgcttctgagacggactcatacatcagacaattgtggggaacaaatatttccttaactgagaggaattctctgaacatgctcagtgaggtttggaagccaaaaaaatctgactgcccactgagaacaaagtatttggatagggaagaaggatggatctatagcttgaagatgaattatgaaaagaaatgaagaaaacccaagagaaaagcaaaatcaatgccaatgccactctaaccatttaaaacttggctggtaaanaggcatggccagccagtggcctcctcctggctccaacagccacgtgaacaattaatgttccccactttcccacaatcttttctgctcccctggttcccactgagcatagcaagaaatacacctgtagaaaactgtgaagtctgacttcaaagtgaccttgaaatcgtagctaataacataatatcaggatggatcagggtgagaaacagtctaaattctataggcagccatcataacttaaaggggaaatttttaaaaaatttttaatgtgttaatcaaatagtcacttgcaaagagaaataaatacttaattcaaaatccactaccaaaatgaaataaatcagagggagaaaactgtatgagaggcaatgaaatgaggaaaaatgaagatgttatggtaattcatccttaattgtgtcagcttcagagggaaatttgcagccacaccaatattttgcatgaggtag

SEQ ID NO: 350822 - DNA, 1675 bp, Homo Sapiens
  misc_feature (1162)..(1162): n is a, c, g, or t
ttcacttcactggctccctcaggctgcagccctgacccccaaggtagtgatggcagctggtgcatgaggtttgatttggaagtagccaggcaagccctggttgcaaaaaatacctcttctattccgacagcgggccagaggcgctgccattagacgcatccctctacttacccccgatcacttttcatggtcaggccggccttgcacaagcaggttctgttcactgcgcacccccatttcttagatggggtactgagcactgcttttcccttagctcacttcatgtggcagcttctcagggatgggacctaccatggctgtgggagatgctttgctactacttactacctttccgagggaggagggctcatttttagaaatgttactggggagccaaattgtaggcctccgaccagagggcctcgctctctccatctcccaggaaccaagggtagctctggctctctgaggagctgtctccagcctccaggtggacgtcctttccagcataccagggcttatggaggcaaaatgaaagctggtccacgtgggaactccctactgttgtcctttccttgggcagacaccatatactttttagctcctagcagtgtttatcccgttttccccaaagcatccttggactcaggcctttcatcctggacccatctgtctgggcctgtttgtgctgagcctttggtctaagtggttggttggtcccagccacttcttcaaaagaaggtttcctgaggtaaccataaattagggcaatcgtacttccaggaacagtgaggctgatgggcctgttcccaagggtactttggcagggggtgctggggaaggggctggcctagggcagggttcatcataccgttagccctgcagccccatgcctgtgtgtcctggtttacccgccgtgtagtggtcctgcaggagtggagcctgtaggacttgcttctcagcggctccaagcagaactctgtctgggaaggtgggaggtgcagccagtctagacctgaagccctcacactaaggactaaggtaggcctgcttcagccttagcccttcgttcaggcccaagggtgggggaagcaggaggaggctgagcgtagtcgtggatagaaacctttccctaccgcacggttacacacatggcatgggnctcctggctgtagctcactcgggtctactgaagaccaagttggtttttagaaatctatttaaaatatctatcatgtatctatttactgtgtttttctgaatacgcaagtgtaaatagtataatttgcagtgcaaaatccttggcaataactttgtgtattatgtttaaaaacactggaaaccgtgaccaccatggactgcccttcccctctgaggcaattattacatgtaggactctgaactttaaaccttcagcgtgactgaagcagcagcctgcacatgtggatggtcatcagtgcctcgcccagagatacctggccttcatccaaagggaccctgctgccacaagtcctccaggcagcacccgcactgtggctccttcgcactgagtatgttggactctgccatagactgaccctcttgtctggctgctgcagtttgtctgtaatgccctgacatgttgcattctccccatttggataaataaaaacaaacaaatgcttctgtcacacac

SEQ ID NO: 350823 - DNA, 678 bp, Homo Sapiens
cttacgctgctactgtcccgcccatgaggtagggctggtgtctttgcaggtggcagggcgggaggggcccctttctgcttctgtgctctttgagtatcgagcccgccgattcctgtctctgcctagtactcaacttgactggctgtcactggacgacaaccagttccggatgtccatactagagcgactggagcagatggagaagcggatggcagagatcgcagcagctgggcaggtgccttgccagggtcctgatgctcctccagttcaggatgaaggccaggggcctgggttcgaagcacgggtagtggtcttggtagaaagcatgatcccacgctccacctggaagggtcctgaacgtctggcccatggaagccccttccggggcatgagccttctgcacctggctgctgcccagggctatgcccgcctcatcgagaccctgagccagtggcggagtgtggagactggaagcttggacttagagcaggaggttgacccgctcaacgtggatcatttctcttgcacccctctgatgtgggcttgtgccctgggacacctggaagctgctgtgctccttttccgttggaaccgacaggcactgagcattcccgactctctgggccgtctgccattgtctgtggctcattccccgggtcatgtgcgccttgcccgctg

SEQ ID NO: 350824 - DNA, 445 bp, Homo Sapiens
ataataagctcagagcttccatagtgtcccaggcacaagcccacatcagaagggtgcaagacaaatgatccatcgttgagccgggtcaacctcctgctataagtccaagcttccagtctccacactcctgaactggaggagcatcaggaccctggcaaggcacctgcccagctgctgcgatctctgccatccgcttctccatctgctccagtcgctctagtatggacatccggaactggtttgtcgtccagtgacagccagtcaagttgagtactaggcagagacaggaatcggcgggctcgatactcaaagagcacagaagcagaaaggggcccctcccgccctgccacctgcaaagacaccagccctacctcatgggcgggacagtagcagcgtaagacaccaggctggacaagtgaggctggcactgcgatgtgatccaaga

SEQ ID NO: 350825 - DNA, 1166 bp, Homo Sapiens
  misc_feature (18)..(18): n is a, c, g, or t
  misc_feature (45)..(45): n is a, c, g, or t
ccccccccacttccttcnctttcccttaacaagtccggtcacacntcctaacgcagcgagggctgggtggcgtttccaccgagggcgccgcctccgccgcgtgtccggggtcagcccgagcccgtgcgggccctttaagggccgggggcgtgtagcgggcccgccccctccccgcggcgcccgcagtccgttaagtgcgagccccggcgcaggggccggatctggccgggggccggcggcggtgtgggagcggcgcgtcatgtacaccatcaccaaggggcccagcaagctggtcgcgcagcgccgcacaggtcccacgcagcagcaggtggagggccggctcggcgagctcctgaaatgccggcagcccgcgccgccgacctcgcagcccccgcgggcgcagccctttgcgcagccgccgggaccctggcccctgtcgagtgcccctctcagctgaggaggaaccgagagcggcgctggggcacctgagcccaggaaggcaacaggccggccgggaccgcgagtgcctggcggagcaggcgcagcccaggactcccggctcccacctccggctgtagtccagggccaaggcttgtgttcaatcgtgtgaatggccggcgggccccctccacgtccccatccttcgaggggacccaggagacctacacagtggcccacgaggagaatgtccgctttgtgtccgaaggctggcagcaggtgcaacagcagctggatggtggcccagccggtgagggcgggccaaggcctgtgcagtacgtggagaggacccccaatccccggctgcagaactttgtgcccattgacctagacgagtggtgggcgcagcagttcctggcgagaatcaccagctgttcctagtggctgctgggagggggcgctgctacacggccgacctgtcgccaggagagaagcatggcgccctgcccacccactgcgcctggctgggtgccggccacacctgaagtgccagcatttggacttttgcacctttttttcccttggcccggctgtcccaaccaagctgccatggccaagggccgaacccgtctgacctcagccctgctcactgtgcccagggaccagcgaccagcccctggggctggcagggaggagctccaggctaataaagtggagaaactgtcaaa

SEQ ID NO: 350826 - DNA, 1264 bp, Homo Sapiens
  misc_feature (64)..(251): n is a, c, g, or t
  misc_feature (1033)..(1033): n is a, c, g, or t
  misc_feature (1110)..(1126): n is a, c, g, or t
ggggtttaaaaagggggcccgcgccctgttttaaaaaggccccccttaaggggccccttttttnnnnnnnnnnnnnnnnnnnnnnnnnnnnnnnnnnnnnnnnnnnnnnnnnnnnnnnnnnnnnnnnnnnnnnnnnnnnnnnnnnnnnnnnnnnnnnnnnnnnnnnnnnnnnnnnnnnnnnnnnnnnnnnnnnnnnnnnnnnnnnnnnnnnnnnnnnnnnnnnnnnnnnnnnnnnnnnnnnnnnnnnnnnnaaagaaactgcatacatcatcagagacaaacaataatttaaataccatgcagtttctgtatgtacaaaacctaggccacagagatccagtttaatttgtattctctatttacatcgttttcctcatacagccatcatctgttaaattagaacctgggagattaggggattgacggtcaccacactcactcctatacaaagacaaactatgtacagacacccaggaagcaactggaaaatgcaaccggtctggggattaacagacagatagggagaaaaagtcatttaaggtgacctttgcccaccggctgtgcacagggagagcctgaaattccattcatcaaagcaacacaccacgattttcattcggcaaataaaaatacatgttcataagcgggagaaaaataaacccagagcttttcatcacatgtaccgtcacgttgtttggtttctctaatctgacataaaggctaaagttttaaaagttttacagtgctttgagggcctttagagatgaatatatcagccatttaaaaaaagctagttggctgatggcggtctcttctgtcactgattgattgggggcgggggcagggttgggcaatgtctaatctttagaaggaagcatttgatttgagacatttcacattttttcctctcacgctaatccaaatgaaaaaatgctcaactgggaatttacacacataaaataaactttgacttgccagctacagctttttcaaaaaagagatgcattttaagtcatctagctcacctttttantttttcccttaattaatgtcaaattgtcatcttggaaagtaacacaaattgctgcagttgtcatgacattgtagtgnnnnnnnnnnnnnnnnngaaaattgaataggtctctagaaagaccttaaggttttaagaaaggaaagagacagcagaaggcccatcctgcaggccacagaggttgctgagcctgtgtaagagcccacttaaaacgggcttgaaatagcccatccc

SEQ ID NO: 350827 - DNA, 1084 bp, Homo Sapiens
ggtagcggcagcagcagcggcggtgcggagagcttggactgggagcccaaagctcggctgggcagcgggagaggaggagccgcaggagctgcagctctgccagcttgggccgagcctagagacaccggcctggctggtccgacgccagccgcagacctgtggctgagcatggagctgtccccccgcagtcctccggagatgctggaggagtcggattgcccgtcacccctggagctgaagtcagcccccagcaagaagatgtggattaagcttcggtctctgctgcgctacatggtgaagcagttggagaatggggagataaacattgaggagctgaagaaaaatctggagtacacagcttctctgctggaagccgtctacatagatgagacacggcaaatcttggacgacggaggacgagctgcatggagctgcggtcagatgccgtgccttcggaggtgcgggactggctggcctccaccttcacccagcaggcccgggccaaaggccgccgagcagaggagaagcccaagttccgaagcattgtgcacgctgtgcaggctgggatcttcgtggaacggatgtcccggagaacatacacctctgtgggccccacttactctactgcggttctcaactgtctcaagaacctggatctctggtgctttgatgtcttttccttgaaccaggcagcaagatgaccatgccctgaggaccattgttccggagttgctgactcggcataacctcatcagccgcttcaagattcccactgtgtttttgatgagtttcctggatgccttggagacaggctatgggaagtacaagaatccttaccacaaccagatccacgcagccgatgttacccagacagtccattgcttcttgctccgcacagggatggtgcactgcctgtcggagattgagctcctggccatcatctttgctgcagctatccatgattatgagcacacgggcactaccaacagcttccacatccagaccaagtcagaatgtgccatcgtgtacaatgatcgttcagtgctggagaatcaccacatcagctctgttttccgattgatgc

SEQ ID NO: 350828 - DNA, 754 bp, Homo Sapiens
gctgtggtggctgctgccctgacgatggcctggagtgtgtgcccactgggcagcaccaagtccggatgcagatcctcatgatccggtacccgagcagtcagctgggggagatgtccctggaagaacacagccagtgtgaatgcagacctaaaaaaaaggacagtgctgtgaagccagacagccccaggcccctctgcccacgctgcacccagcaccaccagcgccctgacccccggacctgccgctgccgctgccgacgccgcagcttcctccgttgccaagggcggggcttagagctcaacccagacacctgcaggtgccggaagctgcgaaggtgacacatggcttttcagactcagcagggtgacttgcctcagaggctatatcccagtgggggaacaaagaggagcctggtaaaaaacagccaagcccccaagacctcagcccaggcagaagctgctctaggacctgggcctctcagagggctcttctgccatcccttgtctccctgaggccatcatcaaacaggacagagttggaagaggagactgggaggcagcaagaggggtcacataccagctcaggggagaatggagtactgtctcagtttctaaccactctgtgcaagtaagcatcttacaactggctcttcctcccctcactaagaagacccaaacctctgcataatgggatttgggctttggtacaagaactgtgacccccaaccctgataaaagagatggaaggagctgtc

SEQ ID NO: 350829 - DNA, 475 bp, Homo Sapiens
  misc_feature (437)..(437): n is a, c, g, or t
  misc_feature (443)..(443): n is a, c, g, or t
gcagcaccaagtccggatgcagatcctcatgatccggtacccgagcagtcagctgggggagatgtccctggaagaacacagccagtgtgaatgcagacctaaaaaaaaggacagtgctgtgaagccagacagggctgccactccccaccaccgtccccagccccgttctgttccgggctgggactctgcccccggagcaccctccccagctgacatcacccatcccactccagccccaggccccatctgcccacgctgcacccagcaaccaccagcagccctgacccccggaccatgccgctgccgcatgccgacgccgcagacttcctccgattgccaagggcggggctatagagctcaagcccagacacctgcaggtgaccggaagctgcgaaggtgacacatgggttttcagactcagcagggtgacttgcctnagaggntatatcccagttgggggaacaaagagggagcc

SEQ ID NO: 350830 - DNA, 1485 bp, Homo Sapiens
  misc_feature (1288)..(1348): n is a, c, g, or t
  misc_feature (1367)..(1413): n is a, c, g, or t
ggagggtgtgcgcggtatgtgtgacagacgagagaagatattagggtagattcgtactggagcgaggtcgagcacgaatggctcgagcagagtattgggcggcagtaattatgcacgcgtacccagacaaagcggaaaggagggtgtgacgaagaggaagtcgcggaggtcttcgcacaggtgttccgccgtgtacgggcgccggtcgttagaggcacgcgaggaccgaagaacggttagatttgaatgaaggggatctgacgtgagagaggagcccaccttgtggacaaagaaaaagtgtgtgtgcggtgtaaaccagggggccccctcaagggggatatctctggagggggggcggcccttgatattaggcggcgatgatgtaggggcgaaagaaggatgaggggggggtgagttatatgtgggtgccttcccatctctgtttatcagggatggggggtcacaatttcttgtaccaaaggccgaaatccccattatgcaggagggtttggggtcttctttagtggagggggaggaagagccagttgtaagatgcttacttgcacagagtggttaggaaactgagacagtactccattctcccctggagctggtatgtgacccctcttgctgcctcccagtctcctcttccaactctgtcctgtttgatgatggcctcagggagacaagggatggcagaagagccctctgagaggcccaggtcctagagcagcttctgcctgggctgaggtcttgggggcttggctgttttttaccaggctcctctttgttcccccactgggatatagcctctgaggcaagtcaccctgctgagtctgaaaagccatgtgtcaccttcgcagcttccggcacctgtctggcttcacagcactgtccttttttttaggtctgcattcacactggctgtgttcttccagggacatctcccccagctgactgctcgggtaccggatcatgaggatctgcatccggacttggtgctgcccagtgggcacacactccaggccatcgtcagggcagcagccaccacagcgctgcacagtcacgcagctgggcaccagctgtttggccacggtgcccatgagctccacagtcaagggcaccaccacctcccggggctggcaggtagcgcgagtatacacatctatccatgacaccactttcctctggtggccaggggcatcaggctgggagacaggggcctgggcgggggccagctgcaggagtgcggcgagcagcaggcggcggagcagagggctcatggtgnnnnnnnnnnnnnnnnnnnnnnnnnnnnnnnnnnnnnnnnnnnnnnnnnnnnnnnnnnnnncggcagccagagccccatnnnnnnnnnnnnnnnnnnnnnnnnnnnnnnnnnnnnnnnnnnnnnnntcctccgcggccccctcccgagccctgggtgcaggcagcgcagcgcagcgcagcggaggcggccggaggagc

SEQ ID NO: 350831 - DNA, 2628 bp, Homo Sapiens
  misc_feature (1109)..(1109): n is a, c, g, or t
  misc_feature (1128)..(1128): n is a, c, g, or t
  misc_feature (1148)..(1148): n is a, c, g, or t
  misc_feature (1661)..(1677): n is a, c, g, or t
  misc_feature (2594)..(2594): n is a, c, g, or t
tatgcatactgtacaatacaatgcaacattcagatatacatccaattgagtttttcaaatggtagtcacctactaaaaatggcttttcccattcacagataaagagcacaattatagagatttttttcaagatcttataccactatatacacattactgtgttttggcaattttatgcaaaacacaattaatatagcttattatatacttgtggcaagcgttatttcaaagggaaacaccatttaggccatttgcaaaggcctggtgaggccttaaacctaccttctaagttcagactcttcatcctttcattagaatactaactgtacaaataaatattacagaattgtatgaacagaagattctattatcagcatgactgaagtcccacaaaagtagaaacaatggccctctggatgccacatcgccactgccacaggagaactgtcttttcaggcttgtggcactaatacttcttaaccagatcacaaaagctaatggtgttagacattcaaaacaaatgcaaagaaaaggtcaggttattcttctgcagtgatcttagcatcaagaaaaagcatcatcaaaatgcctttaactggtacaaaatggaatgatggtaaaccgtcaaaactttggtgtatagaatatcaatgaaaatgtcccagtaagataaccaaatgatacttggtattaaaggaaaatccaagtgcagcaactgtgtttgagtgttgtggtctacacagcccatgacacaggcaacccacgcctacgagaaggcaaaggcagcttagccagtgcgctaatgagtagtctcgaggcaaacaaaaaagtgctccctgacgcagaggactaccgtatgtaatacaaaaccaaaatcgcttctaaatccacttatagtaagtatagaaactttgtagttatcttatttctccaaaaatcccatttactatctggctgaacatacataaaccccatctctgccggagattaacactgggctctgactgctcctcaatgttcttatttttactaattggtatgaaaatacaaaatcttccaatggtgtgagcagttcagtagctacttgggaaccaaatatttggaatttnaacagctgcccctgatgtnctcctgtgcccattagcttngttccatccctgaatgcaagcccacccaactttctaaaccaacgtgctactgccaaggagctccctggcagctctgggcttgtgagcagcaggacccggctcccaggacaagactgatactgcatcagagttcactctgcacaaacaagatcagaacactgaatacgtgggtttggcgaaggagtgggcagtggggaagaaagaaatcacggccacctggaattacagccaccctgaagaaggaaaaaatgttattctcaatttactatggcatcttgttttctgaagctggtttcaatgaatacttaaaacacaaccgtaaggttccattttaacaccaaatagagcgtgcatgggacagaacacaatttggcccctcaagcaatgactaggtgtggatttgatgctacaactgaatgcaacaggtcacattcagtgctttttgaagcagaaattggtctgagtgaggccagtgaaaactccttacaacaaatcccaggaaaacgggtgagnnnnnnnnnnnnnnnnnaaataagtgagccacatggcaacctagtaattcttcaatgaacttcaatatcccattacaatgaggcattgtggttttatactatggggttgctgtaaatggagtttcactgcagctggttgctgaaaataatgatgtgtccatggctcttccagacaacataagtatggatgtcaggggtggggagccgggggaactgaagccacagcacttgactttgtaagtattccaaatgcctctactacagtccagtagtctacacttgcagaggctgaatgcttcagctttcgggctttaaactgttagtgtagagattttactgtagagtggtacaggcttgctatgtgccttataacagaaatcactgcaattcagggaagtttggggtgaagatgcgagtgaacatctgagccatgacagtaagctctgcctttggaaaggagagctcccacttcacggccacaacgcagcacacagaagagcacagagccgtgaggtggagacaagctctgaacacacgtgacgcccgcccgtctgtgcacctgccaaggcccagagcccacatgctgttctgcacgattaccagaacacagccgttggaactgggctcacagcacctttgctgcatataatcctctcatctctccacaactacttgatcagtgttccatagcacttaaaaaatttaggtccctacagataaggccagagtctcctccatggttctggcacttagatcacaaacctgtgtgatttcagtataaaatagaaaagtgttcatacagctgtatccagaaagaaatcaaacagttgctacactgagaataaaaaaaccatttggagctataaaacaacaactaccccttacgaagagcaccctcggatgtaggctcacgtgaacacaccacctccctccnacagtcagtcattcgaatgtatactcgcaatcgg

SEQ ID NO: 350832 - DNA, 2328 bp, Homo Sapiens
  misc_feature (8)..(8): n is a, c, g, or t
  misc_feature (19)..(19): n is a, c, g, or t
  misc_feature (28)..(28): n is a, c, g, or t
  misc_feature (31)..(31): n is a, c, g, or t
  misc_feature (39)..(39): n is a, c, g, or t
  misc_feature (41)..(42): n is a, c, g, or t
  misc_feature (49)..(58): n is a, c, g, or t
  misc_feature (64)..(64): n is a, c, g, or t
  misc_feature (70)..(71): n is a, c, g, or t
  misc_feature (73)..(74): n is a, c, g, or t
  misc_feature (76)..(76): n is a, c, g, or t
  misc_feature (81)..(81): n is a, c, g, or t
  misc_feature (86)..(86): n is a, c, g, or t
  misc_feature (124)..(124): n is a, c, g, or t
  misc_feature (126)..(126): n is a, c, g, or t
  misc_feature (132)..(133): n is a, c, g, or t
  misc_feature (146)..(146): n is a, c, g, or t
  misc_feature (152)..(171): n is a, c, g, or t
  misc_feature (209)..(254): n is a, c, g, or t
  misc_feature (283)..(283): n is a, c, g, or t
  misc_feature (321)..(352): n is a, c, g, or t
  misc_feature (2301)..(2301): n is a, c, g, or t
aatttaancccccagaagntttttattnctncggagccntnnaatgctnnnnnnnnnnagcttnttaaanngnntnctagnaaatnggtggggagggctaatcagaaatgcctttgtttcagangntgttgnntttaaagtccagngagccnnnnnnnnnnnnnnnnnnnntagataaaccctaagtctatactcccagatggatgggnnnnnnnnnnnnnnnnnnnnnnnnnnnnnnnnnnnnnnnnnnnnnnacaatctcactgaattctccctgcacctnacaggcaagcacattccttccatttcacagagcatcgnnnnnnnnnnnnnnnnnnnnnnnnnnnnnnnntgtagcccaggcccttctcaggacacggctctcccagggcctccgcctccctgcactgagccctgccagttccatatgtcctccgaagcactcctgagccaccccagcatggtacctgccactctccgtgtctgcttcccatacctctctgctcctcttccccatccctgggtgggggcgggaattctgaaggggagaaggctctgactttccatgtttgcggtgaccaccctgttaagaactgaatggtgtcccctcccccaaatgcatatgttgaagcagtagcctgctatgtgactgtttttggagatgggacctttaaggggttaaggttaaatgaggtcataggtttaagccctaatatggtgatattagtgtctttataagaagaggaggagacaccagagcctgctcatgctctctgtccctctccacagagaaaaggccatgtgaggacatagtgagaaggtgccacctgcaagccaaggagagaggcctcaccagaaaccaagtcttaacaccttgatctggactttccagcctccagaactggcagaaaataaattcctgatgtttaagccatccagtctggcatggtgctgtggcagcccaagctgatgaatagtacacaccactccgcattctgggaaaaaggacatctggcttttaaacttgcctaagggaggccacaagctgctctcttgcaaacgctgggactgtcccctctggagggagctggaattgcagattgtggggcctgtcctgccaccttctgttccccaagaacagaatccaggagcagtgcaactagaagcagcgatctgattggagaagagtgtcctgagactgggctaaggtgaccccttaagcctttgggtaagactggttccctttggatggcaggaaaaaaaacccagggccacctgtctctttctagtgaatttccctagcctaaatcttatctcttaaagaccctctcttttcaggatggtgcactctcagcccctctggctgcccctcccagagttcaacagcacagggggaaggctccagctcctcccagatcctgactgtctcctctttgtaaccatcagggagaggaaaagcatggaaaagccccaccaaggaagtcccccacaaaatgacaattacgcactgagcaaatggagacaaaggactccagccagcggcacccgaggagctgcatctgccctctgcctgacagcccctccccgactcccatccttgttcctgtccccatcctgtagggtcctttgagacccagccttggggaaagtgtggtcagtggggacttggcccaggccaggctctgtctggtcaccgacagaaacgcgaggaggaatcaagttcacatggggcaggaaagggcccccagacccagacaatagggcccagcaggcagggcccgagcaggtgaggagggagtagtgggctgccaggcctccctcatacccctggagctgtcctccagagccagatcagtcatctgctgagcatcaaccaggaagagttcctatccatgggaggctccatcccaacaggtgtgaagaggatgagatcttcagggagtcacccagcgggctagaaaaccaccggagtctgaccgctaagtcactgtggccagaatccaaggtcacccgaggtccaaagagaagtccaggccaggagtcctggagatgcggcccagatggagccacccccttgccgagactgtaataaagcgtgttctgacatgaagatctgagcagatgggatcatgtctctgggttcacctctgcgtccccagcatctggctcagagaagttgcttggtccatgccggtgctggcagcatccagccgacacacaggcagcccaggctcccagctccttccttccccacacagaccccacaggcccatcctggaagacaaaagagccaaccatccntaactccggggcgtacagctggggctt

SEQ ID NO: 350833 - DNA, 1028 bp, Homo Sapiens
  misc_feature (772)..(772): n is a, c, g, or t
  misc_feature (798)..(798): n is a, c, g, or t
  misc_feature (809)..(809): n is a, c, g, or t
  misc_feature (849)..(849): n is a, c, g, or t
  misc_feature (876)..(876): n is a, c, g, or t
  misc_feature (908)..(908): n is a, c, g, or t
  misc_feature (912)..(912): n is a, c, g, or t
  misc_feature (922)..(922): n is a, c, g, or t
  misc_feature (931)..(931): n is a, c, g, or t
  misc_feature (958)..(958): n is a, c, g, or t
  misc_feature (965)..(966): n is a, c, g, or t
  misc_feature (988)..(988): n is a, c, g, or t
  misc_feature (1009)..(1009): n is a, c, g, or t
  misc_feature (1012)..(1012): n is a, c, g, or t
cagcttggggaaagtgtggtcagtggggacttggcccaggccaggctctgtctggtcaccgacagaaacgcgaggaggaatcaagttcacatggggcaggaaagggcccccagacccagacaatagggcccagcaggcagggcccgagcaggtgaggagggagtagtgggctgccaggcctccctcatacccctggagctgtcctccagagccagatcagtcatctgctgagcattaaccaggaagagttcctatccatgggaggctccatcccaacaggtgtgaagaggatgagatcttcagggagtcacccagcgggctagaaaaccaccggagtctgaccgctaagtcactgtggccagaatccaaggtcacccgaggtccaaaggagaagtccaggccaggagtcctggagatgcggcccatatggagccacctggcagcatctagccgacacacaggcagcccaggctcccagctccttccttccccacacagaccccacaggcccatcctggaagacaaaagagccaaccacaccgcagagaaaactgcacccaggccccctccccaggcccaggccttgccagaactccctgctgaagaaagaaggaccaggagccagggaggctgggcccaggcaccccaccctccacctctctttattccaccccagaacatccttaaaaggtgaggggagaagggttcaccaggttcccttcactcactccctgtttcccaacaacagcagaatgtgacccaggagaaagtnggacaaactcagcagcttggtgatanctgaatagcanctgaacggagagtcaggaatccagaattctgatcccagcnctgctcctgccacactgggtgggcccnggacccttcctgacttgacattcactcaaggngcangtaatcaccnttgtttgangcatggatgggaatggaagggacctcngcccacnncattattttttgccccctcctntccctgcctttctgatgcccngcncaaggaattgggggag

SEQ ID NO: 350834 - DNA, 965 bp, Homo Sapiens
  misc_feature (924)..(924): n is a, c, g, or t
  misc_feature (926)..(926): n is a, c, g, or t
  misc_feature (945)..(945): n is a, c, g, or t
gggatctgcggacgagtgcggggaggagtttgagatgggaggcgcttgcaggggctcccccagttctgcgctgtgagccggggcacaaagagccctctgcactagcgccgcaggaccgcggacccgagttggaggcatctgtccacccatgtggttccagacacgttcatgtggccaccatgaccccgtcggcatcacaggggtaaccaaggtgatcctccctctcttcctgtgtccactggggatggtagagaccagcttaatgctttgagatcagatccatcacgaaatccgtatgtcctgagacctcctgaatcttaagagagcagcaagttcctgggacagaggagacagaagggaatttccaggttcttcaggacgttcacaaccacactgagaagtatctttgcagataagtatttaaacttaccagcccatagcctaccagcctgccctcttctggtctgtgcaggaaagtgtagtatcctagaatgccaaagtgggaggggaaatgggtgatgtagctcattctcttttctacctctatggaagaaagaaagagcctgtccccattttgtggggtcccagaaagaggtgattttcacacttcacatttggcattagggctagtatttcacaaacattaccgtctggaacttttgaaggctgagttaaatgacttcatcttgtgtacttgtagaactgctattagaaggaggctggggactccctgatgatgtgaaccagcccttctcttctcagttttagcaatttgtgatcatatttataaaccttggaaagggctacttggccttagagttaagtgaagagttaacactgtgactttagatgcatttttctcagtgcaagtgtctgagctcatctcagttctggactcgtgccccactcccgggtgctgacagnanctctgagatatgtgagaanctcctgactctctgactcag

SEQ ID NO: 350835 - DNA, 1616 bp, Homo Sapiens
gtccggaattcccgggattgcggacgagtgcggggaggagtttgagatgggaggcgcttgcaggggctcccccagttctgcgctgtgagccggggacacaaagagccctctgcactagcgccgcaggaccgcggacccgagttggaggcatctgtccacccatgtggttccagacacgttcatgtggccaccatgaccccgtcggcatcacaggggtaaccaagagagcagcaagttcctgggacagaggagacagaagggaatttccaggttcttcaggacgttcacaaccacactgagaagcatctttgcagataagtatttaaacttaccagcccatagcctaccagcctgccctcttctggtctgtgcaggaaagtgtagtatcctagaatgccaaagtgggaggggaaatgggtgatgtagctcattctcttttctacctctatggaagaaagaaagagcctgtccccattttgtggggtcccagaaagggtgattttcacacttcacatttggcattagggctagtatttcacaaacattaccgtctggaacttttgaaggctgagttaaatgacttcatcttgtgtacttgtagaactgctattagaaggaggctggggactccctgatgatgtgaaccagcccttctcttctcagttttagcactttgtgatcatatttataaaccttggacagggctccttggccttagagttaagtgaagagttaacactgtgactttagatgcatttttctcagtgcaagtgtctgagctcatctccagttctggactcgtgcccccactcccgggtgctgacagcaagctctgaagatatgctgagagagctccctgactctcctgactcaggtctgccagttgatgaagacagcacagttgttaccaaaaacaaaacctggcagatggtcctaggtcaggattagtggtcattctctggtcttctccagactggtgacacagggtggtcttaaaagagtcctagtccagcctctggctccccgaatttcctctggtgcatggggcatcaggaaagggcaggggagaaggagggggagcagaaaaataactgaggctgggcagaagggtcccttccatttcccatccattgcttcaaacaatgggtgattaccgtgcaccttgagtgaatgtcaaggcaggaagggttccagggccacccagtgtggcaggagcagagctgggatcagaattctggattcctgactctccgttcagctgctattcagctatcaccaagctgctgagtttgtcctactttctcctgggtcacattctgctgttgttgggaaacagggagtgagtgaagggaacctgggaacccttctcccctcaccttttaaggatgttctggggtggaataaagagaggtggagggtggggtgcctgggcccagccttcctgggctctggtccttctttcttcagcaaggagttctggcaaggcctgggcctggagagggggccgggtgcagttctttcctgggtggggttgctctttgtcttcaggatggcctgggggctggttggggaagaaggactgggaacctggctgcctggtggcggtggtatcttgc

SEQ ID NO: 350836 - DNA, 1883 bp, Homo Sapiens
  misc_feature (1686)..(1712): n is a, c, g, or t
catgggcgctgcagcagctacaaagacgacgccggctgcgctcgcgggaccagagggagggaggctgcggacgagtgcggggaggagtttgagatgggaggcgcttgcaggggctcccccagttctgcgctgtgagccggggcacaaagagccctctgcactagcgccgcaggaccgcggacccgagttggaggcatctgtccacccatgtggttccagacacgttcatgtggccaccatgaccccgtcggcatcacaggggtaaccaaggtccacagaacgaggggaaagggtcactgtggatcaagccaggctcctctgagcagtccagggtctatttacagagagcagcaagttcctgggacagaggagacagaagggaatttccaggttcttcaggacgttcacaaccacactgagaagcatctttgcagataagtatttaaacttaccagcccatagcctaccagcctgccctcttctggtctgtgcaggaaagtgtagtatcctagaatgccaaagtgggaggggaaatgggtgatgtagctcattctcttttctacctctatggaagaaagaaagagcctgtccccattttgtggggtcccagaaagggtgattttcacacttcacatttggcattagggctagtatttcacaaacattaccgtctggaacttttgaaggctgagttaaatgacttcatcttgtgtacttgtagaactgctattagaaggaggctggggactccctgatgatgtgaaccagcccttctcttctcagttttagcactttgtgatcatatttataaaccttggacagggctccttggccttagagttaagtgaagagttaacactgtgactttagatgcatttttctcagtgcaagtgtctgagctcatctccagttctggactcgtgcccccactcccgggtgctgacagcaagctctgaagatatgctgagagagctccctgactctcctgactcaggtctgccagttgatgaagacagcacagttgttaccaaaaacaaaacctggcagatggtcctaggtcaggattagtggtcattctctggtcttctccagactggtgacacagggtggtcttaaaagagtcctagtccagcctctggctccccgaatttcctctggtgcatggggcatcaggaaagggcaggggagaaggagggggagcagaaaaataactgaggctgggcagaagggtcccttccatttcccatccattgcttcaaacaatgggtgattaccgtgcaccttgagtgaatgtcaaggcaggaagggttccagggccacccagtgtggcaggagcagagctgggatcagaattctggattcctgactctccgttcagctgctattcagctatcaccaagctgctgagtttgtcctactttctcctgggtcacattctgctggtgttgggaaacagggagtgagtgaagggaacctgggaacccttctcccctcaccttttaaggatgttctggggtggaataaagaaaggtggagaggtgggggtgcctgggcccagcctccctggctcctggtccttctttcttcagcagggagttctggcaaggcctgggccctggggaaggggggcctggggtgcagttttcctcctgcgggtgtggttgggctcttttggcctccaggaannnnnnnnnnnnnnnnnnnnnnnnnnnaaaggaaggaccttgggaaccctgggctgccctgggtggcccggcttggatcctggccaaggggggttccctcttggggccgcattctcccaggaactcctgggccccggaattttcctttgggaacccccggggggaaccttggggatttcgggcccacaaggtgactta

SEQ ID NO: 350837 - DNA, 554 bp, Homo Sapiens
ctgagggggcctctctacctgtgtccccactcactccaggagcactggctttggtcacgtcttagcagcagggccttgctccgttgttcccttgccctggtggtgggggggccagaccgcctccggaatcctgccacctgtgactgtctgactgcttagtgcttcagctgtcccttccttgtgtcctgggggacctgctggcggcctcttcctgggagccatgacctcagaccccacccacactccagatcgagacccctgcctccccccggcaaatgtcctcccgctgccttgcagcctgcactttgcacatgctcacccccagcacagtcccactggcccctcacctccccttccctgagctccttcccaaggactcctggtcactgcctgctgtgcagtcagaggcccagggtccagcagcccggcgggaacgggtgctgcctcttcctccagttagctccagctcaggtctgagacccgtgctgagaaaggtctgagcaccgaccgtgccctctgcccagggctgggtcctgagcagctggttttcctgc

SEQ ID NO: 350838 - DNA, 658 bp, Homo Sapiens
gattttgaaatatctgataataatttggaatgaagtaaggttctgttaaaatatatttgaagaccctttaaagcagtgaatctgaaacaattttcacacccttaagtggttgatacgtacctattttaggtattttgaggtatttaccataaactaaatttagaaattttttagattcacttgaagtaaacattacaaacattggatacggtggggttttctttagattttacttgagagaaggtgagtacaaagcaatttgcagttgttgtaatgacaagattactgcgcaagtgtgaatccaaacagtatagcttttaaattttaaagcatttggtaaattatcgctgagtttttttctgttgccaatagcaaactgcttttccattaatggagaattcatgcctttcaagcattttaaatatgacaatatttataaatgtatggtttggaggaatcgtttaaattctctttcctaattttctttcttttgaagatagattctttcaacaagtaatttgtagtaatgactgtgttgacttcaattttggagcgcagtagctatgttaaagatgaactatttggtctcattgaagccaacacagaacttgctgctgtgttttttcttcagtgataaataaaatacttacagaatttg

SEQ ID NO: 350839 - DNA, 721 bp, Homo Sapiens
  misc_feature (270)..(413): n is a, c, g, or t
  misc_feature (495)..(544): n is a, c, g, or t
atgggcttgcacctttaagatggtgcccacttggaagtttgttcttactactaacccagatgagtcaaaccttacctacagttgagtgagctccctccacaagaaaaaagtcttagatatgcctctaagtgagaggacttctgatctcaatagggcaataactcacatctacaaagaatgaccaacagtgggaccagtcactcagggtaatgacactataattattgctgtttttattatccaaaggaggacagttctggattgggggannnnnnnnnnnnnnnnnnnnnnnnnnnnnnnnnnnnnnnnnnnnnnnnnnnnnnnnnnnnnnnnnnnnnnnnnnnnnnnnnnnnnnnnnnnnnnnnnnnnnnnnnnnnnnnnnnnnnnnnnnnnnnnnnnnnnnnnnnnnnnnncgggggagggagggttccattctaggcctctctcctagcatctcctaggtagttccctggcttatggcaacagtgccaattnnnnnnnnnnnnnnnnnnnnnnnnnnnnnnnnnnnnnnnnnnnnnnnnnntgagagcagtcagtttccatgtacatggcaccatgtatcttattcaggtgtactctaaaataccatgatggggtatggtcaaaacggactggaatctggcctaggcttcaatggggaggtattccctggtcagcaaggaaaagctacagaaggttaattcacagattattccttata

SEQ ID NO: 350840 - DNA, 593 bp, Homo Sapiens
  misc_feature (193)..(255): n is a, c, g, or t
atatatcacgtgagctgtttctttagacaatatcatgaagaatagatttaatgaagcaagttatgaatggtttatatgatgtgttttaacttgttttcttgcttgtgcaaaggctataccaatgtacaatgccaccagcaatgtatggagttcattttaaaacacccttttgccaccattgaatattaccaannnnnnnnnnnnnnnnnnnnnnnnnnnnnnnnnnnnnnnnnnnnnnnnnnnnnnnnnnnnnnngaatttctttaaataactgtgaaggtaaacatttatagttgtttattccccatgtatgaattatctacttgtgtcttatgttcatatatttggtgttttgaaattttatacgtgagaattagatatcccttataattgttagaaatcctttaacacatttctgcaattttttcaattatattgttatgtttacagcttattttcattataatgaattttaatatgtatcattgatgatttcttttataacctcttatattttttcaaaattcagaatactgtctctccaaatagctgcttatggacattccagaaataaagaatgtcaccacctccag

SEQ ID NO: 350841 - DNA, 1448 bp, Homo Sapiens
  misc_feature (1297)..(1352): n is a, c, g, or t
attcaaaaggaaattatttaaaagctaaggggacatttacatttaaacaagatgataaacaggtgtcttgcaaaagaaaaaaatccatggcattaagtttttcattcaaattcggaagcaaaaataacctaagttgtgcactattgccttaggaaagggaaggggaagggtgagggataagggaacagtcaactcagtatcaaacttgagaaagtaaagtcacttctgctcagttctgagtttacaaatatgcttataaagacaaaaagtggtaaaattatatttaatgttcaaatttatttagctgtagtctctataatttctgtacttgaaatggctttgggccactggctgatctatctctgaggtccagattagctggtcagttttcaaatggcaattttatattcctttgttcagattccaagggagtttaggttcagctcatggtcttttggaatgtttagagattattgccaccactccatagccaagctgaccaacttttgctcacttgtatcattctagcctttcagaactattttccccatacacatgtgcagtaattctaataaaggagttttgcttcttctgcagtgtagaggtaatggtaatgaagacacctgcattggaatcacaaactattcctcagaaaaatacatcagactactagaaatgtcattcaggcagttgatttgaatagcaaacttggggagggaagattaactgtgaaacaaaaatatacgaaacattcaaatgcagaacaaagggtctatgctactaaaaatgcccatgacattaaacactccacaaaccccccatctgttgttttaacctaaaaattctattggctaacttatacaataattttgattaataacctgagaagttaaaatcttgaaagtggcaaaagcaaaccgagagagcatcccttacttattggtaccatgttatcaagtcactttttctgggtagcctggttattaaatctccaaattgtaaattataccatctcttcctgtagaaacctgtatgtacatcagattcactattttggttgttatttcaccaacagcaattccaatttatctttgaaaatgcagcctttattcttagttttaaataacaataatcatgtaagtgcaactaacttagaatcccttgctactgggagtaaaaacctaaataacaagttaataacggattcagcctcaaaaggataatcaccgtgtcagactacccgttcctggaatttaaaaagtgatttatgttgtgtagtcaagtttcacagcatgcnnnnnnnnnnnnnnnnnnnnnnnnnnnnnnnnnnnnnnnnnnnnnnnnnnnnnnnntatacatacacatttctattcaaatagtaagattccatattcaaaagtttgtatcacatatatggaaaagaattaagtagcggtgcaaagcgacta

SEQ ID NO: 350842 - DNA, 769 bp, Homo Sapiens
  misc_feature (617)..(672): n is a, c, g, or t
cattcagcagttggatttgaatagcaaacttgggagggaagattaacttgtgaaccttatatacggacattcaaatgcagaacaaagggtctatgctactaaaaatgcccatgacattaaacactccacaaccccccatctgttgttttaacctaaaaattctattggctaacttatacaataattgttgattaataacctgagaagttaaaatcttgaaagtggcaaaagcaaaccgagagagcatcccttacttattggtaccatgttatcaagtcactttttctgggtagccctggttattaaatctccacattgtaaattataccatctcttcctgtagaaacctgtatgtacatcagattcagtattttggttgttattttaccaacagcaattccaatttatctttgaaaatgcagcctttattcttagttttaaataacaataatcatgtaagtgcgaactaacttagaatcccttgctactgggagtaaaaacctaaataacaagttaataacggattcagcctcaaaaggataatcaccgtgtcagactacccgttcctggaatttaaaaagtgatttatgttgtgtagtcaagtttcacagcatgcnnnnnnnnnnnnnnnnnnnnnnnnnnnnnnnnnnnnnnnnnnnnnnnnnnnnnnnntatacatacacatttctattcaaatagtaagattccatattcaaaagtttgtatcacatatatggaaaagaattaagtaggcggtgcaaagcaacta

SEQ ID NO: 350843 - DNA, 1600 bp, Homo Sapiens
  misc_feature (1306)..(1365): n is a, c, g, or t
gatcccctactgttccacagggggaatacatgcccctccctccagaagaggcagaaaatggagagaatgctggtaatgaagaacccaagctacagttcagttatgtggaatgtttgttgtacagttttcaccagttgggccgaaaacttccagatttcttaacagccaaactgaatgcagaaaagctcaaagatttcaaaatcaggctgcagtactttgcacggggcctgcaagtttatatcagacaacttcgcttagctctccagggtaaaacgggtgaggccttaaaaacagaagagaacaagattaaagtcgttgcattgaaaataacaaacaatatcaatgttttaatcaaggatctcttccacattcctccttcttataagagcacagtaacactatcctggaaacctgtacaaaaggttgagattgggcaaaagagagccagtgaagatacaacttcaggttcaccacccaagaaatcttcagcaggaccaaaaagagatgccaggcagatttataaccctcccagtgggaaatatagcagcaatttgggcaactttaattatgagaggagccttcaggggaagtagaggtggccgaggttggggcacacgaggaaatcgtagtcggggaagactctactgaataagacatcagcattcttcagcattgtcatgagcttaatatacttaaattctactactcattggattgccggggatgtccctttaaacagactgctgccttcagctaaaaacttaatgttctttatacctttgtatgtatgacctacttttgtaacagaccatggttgtgtccaaggtaaaaccacagtgatattttcggatgctttgtctgcaatcttgacttgtttttgcagtatcattattcagacttcaaattgtgaatcttttaaacatcttgataatttgttgttgagagctgttcattctaaaatgtaatgaaattcagtctagttctgctgataaagatcatcagttttgaaaggttactgattttcctcttccctcttagttttttacccaatatatggagaagagtaatggtcaatcttaacattttgttttaattgtttaataaagctgctgggcagtggtgcagcattcctacctagtgtcataaaagcaaaatacttacatagctttcttaaaatatagggaatgacattacatttttaggagaaagtaagttgctttgcaccgcctacttaattcttttccatatattgtgatacaaacttttgaatatgggaatcttactatttgaatagaaatgtgtatgnnnnnnnnnnnnnnnnnnnnnnnnnnnnnnnnnnnnnnnnnnnnnnnnnnnnnnnnnnnngcatgctgtgaaacttgactacacaacataaatcactttttaaattccaggaacgggtagtctgacacggtgattatccttttgaggctgaatccgttattaacttgttattaaggtttttactcccagtagcaagggattctaagttagttgcactttacatgatttaattgttattttaaaactaaggaatagagggctgcatttttccaaggggggaaacaaaaccaccccg

SEQ ID NO: 350844 - DNA, 556 bp, Homo Sapiens
ctggagagttaagcgaagtgtgctgatatatacttgcaggccccgtgcaaagtactgcagcctgattttgaaatctttgagcttttctgcattcagtttggctgttaagaaatctggaagttttcggcccaactggtgaaaactgtaacaacgaacattccacataactgaactgtagcttgggttcttcattaccagcattctctccattttctgcctcttctggagggagggggcagaagcaggagcaagaagaaagcataggctctgactgaggtttctgcagggaggcaaggcagagcaaggccaacagtttccaattggcaagtctgaataattccagcaggctctgggctggaggggcggtctccatttgcttggtacctagcccctggggtgagttagggcaatttctatattggcttggtgtgtgaaagttagataaaggggaaggttgcggctatgttcttgacaatagttagatatgctcagggctcagtcctttgctgtctccaagaattagctagcccaaagtgaaaagtaccctgtggaaaag

SEQ ID NO: 350845 - DNA, 986 bp, Homo Sapiens
  misc_feature (11)..(11): n is a, c, g, or t
  misc_feature (77)..(77): n is a, c, g, or t
  misc_feature (89)..(89): n is a, c, g, or t
  misc_feature (96)..(116): n is a, c, g, or t
  misc_feature (119)..(120): n is a, c, g, or t
gccttgtatanaggtaataatttacccaccaccaaactgatatgctagaaatatcacctttcatccctttctgattntgtgtttttaanaatgcannnnnnnnnnnnnnnnnnnnnaannatttattctaatcccatggtgtctcactgggtgatggaaattgaatctgtttcattattgaggtttgctctccctctgatcacataggactcaaggatacttctgcagtgcccagaaaattgggtgtagaagtcactattgttttggctaacccagcagacattctcaaataccttctactttgccactttccttgcagctaggagtggacaagtggtcaagtgatggtgctggccaatgagaggtaagcaagtttcggagctgtctggaaaggctttgcttttcctgacaaaatgaatgtaacatcccagtgctccctcttcctttcttcctcctgacattaacatgcacatgatgccgagaattgcagcagtcatcttacaaccatgaagaacaggtagggagaattgcagacttggtggccccaacatcactgagccactgttcaattcccagagccactttcctccgagaattgcgtatgctttgtggtagggtaaagcatacgaacgtggctctttcctaaacagggactttagtatcctgggctcagagaacctgctcttccaagtcatttgaatgtagcgtgcctaaatcgaatccgtgtgtatcattttctgcgttggtaagtagatccacgttttcctttgggaggctcactttaatatccttctgcttctttaagattgggaaaccacccaggcctcccagctcttggcaagcaacactctgacttcatgttgttactcagcattttgttccttattgaaatgcctggctctgcacaactggtttgtaaagtctgaagatccctggccatgcccagaaacagcagcctcaggaagacagaactgaaaaaagccgct

SEQ ID NO: 350846 - DNA, 639 bp, Homo Sapiens
ttgcttagtctaatttagctccccataatgacattctcactgcaaggtggtcattgctatcattttcttttgggtgtggcagttaggtatgccacgtgagctgaacgggtttcacatggaatcaaagtcagaatgttcgaaaaggacatttgtgtttttccttcaatggtgccttgaaattgggctccctccctcttgctgtgtggggaactgggagggtatagcccaagcttgctttgtgatggacagctagaatgtaaaagcttaaactatggggaaagtcttgcctgttttccaaggcttcctccaccctgccaccgaagaacttacctggatgccaacctgggacccctttgtctttgggcttttgccctttgaaactgtgaatgcttcaagagccacataaatgctctggcagtgtctccatgtaactagtaaattgtcctgggctggattcgttgtgaaatgggaactgtcccatttactttggttgcaaataagggaagatgtatgagtattggcctgggaaatgagccctctagtgtaggagaggttattcttgaggggtttaaactacatggataggccttgggttcaaggttacaggaaaggctgtaagcctgagattgtggggaatgg

SEQ ID NO: 350847 - DNA, 2682 bp, Homo Sapiens
  misc_feature (2583)..(2583): n is a, c, g, or t
atcaggccaaatcggccgagctcgaattcgtcgagagcgggctcgctcactcactcgtccccggcttccgagcacagcatggcggtcaaggtgcagacaactaagcgaggggatcctcatgagttaagaaacatatttctacagtatgccagtactgaggttgatggagagcgttacatgaccccagaagactttgttcagcgctatcttggactgtataatgatccaaatagtaacccaaagatcgtgcagctcttggcaggagtagctgatcaaaccaaggatgggttgatctcctatcaagagtttttggcatttgaatctgttttatgtgctccagattccatgttcatagtggctttccagttgtttgacaagagtggaaatggagaggtgacatttgaaaatgtcaaagaaatttttggacagactattattcatcatcatatcccttttaactgggattgtgaatttatccgactgcattttgggcataaccggaagaagcatcttaactacacagaattcacgcagtttctccaggagctgcaattggaacatgcaagacaagcctttgcactcaaagacaaaagcaaaagtggcatgatttctggtctggatttcagtgacatcatggttaccattagatctcacatgcttactccttttgtggaggagaacttagtttcagcagctggaggaagtatctcacaccaggttagcttctcctacttcaatgcatttaactcgttactgaataacatggagcttgttcgtaagatatatagcactctagctggcacaaggaaagatgttgaagtcacaaaggaggaatttgcccagagtgccatacgctatggacaagtcacaccactagaaattgatattctatatcagcttgcagacttatataatgcttcagggcgcttgactttggcagatattgagagaatagccccattggctgagggggccttaccttacaacctggcagaacttcagagacagcagtctcctgggttaggcaggcctatctggctccagattgccgagtctgcttacagattcactctgggctcagttgctggagctgtgggagccactgcagtgtatcctatagatctggtgaagacccgaatgcaaaaccagcgtggctctggctctgttgttggggagctaatgtacaaaaacagctttgactgttttaagaaagtcttgcgttatgagggcttctttggactctacaggggtctgataccacaacttataggggttgctccagaaaaggccattaaactgactgttaatgattttgttcgggacaaatttaccagaagagatggctctgttccacttccagcagaagttcttgctggaggctgtgctggaggctctcaggtcatttttaccaacccattggagatagtgaagattcgtctgcaagtagctggagagatcaccacgggacccagagtcagcgccctgaatgtgctccgggacttgggaatttttggtctgtataagggtgccaaagcgtgtttcctccgagacattcccttctctgcaatctattttcctgtttatgctcattgcaaactacttctggctgatgtggacacgtgggaggtttaaatcttcttgcagctggagccatggcaggtgtcccagctgcatctctggtgacccctgctgatgtcatcaagacaagactgcaagtggctgcccgcgctggccagacgacatacagtggtgtcatcgactgtttcaggaagattctccgggaagaagggccctcagcattttggaaagggactgcagctcgagtgtttcgatcctctccccagtttggtgttaccttggtcacttatgaacttctccagcggtggttttacattgattttggaggcctcaaacccgctggttcagaaccaacacctaagtcacgcattgcagaccttcctcctgccaaccctgatcacatcggtggatacagactcgccacagccacgtttgcaggcatcgaaaacaaatttggcctttatctcccgaaatttaagtctcctagtgttgctgtggttcagccaaaggcagcagtggcagccactcagtgatgagacaactgttgagtgtggcaaaatggcgccttgaagaaagaggcctaggagagcagccctgtaatgtatccagtcagctgcatggtactgactgagctgaggagtcaaactcttctttctgtatgacatatacatatacttgtttataaaataatcatttgcccagggaaaaaaccacaacgctgtttcaagctttagtcttatgtgttgaaatgtttttgtaagccttggcatgaattagtgttctagactctgctttgcacagcttgcacttacagtgattgtacatattgtacatctttgtacagagacatcttggcacctcatcccaacaaatcacatttgtagaaatgtaatgcggttctgagtggcttgaaatgtacagaatgttttgaaagtgttttattaagaatcacacaaaaataaatgtattaaaattaaattcattctctatggtgactatggaatnagcatcatatggatgtattatttctagtgtttcatctggaaaaaggattgcgataagcatacaactatgcgctcatgatatgaacttgagagctgcatg

SEQ ID NO: 350848 - DNA, 535 bp, Homo Sapiens
  misc_feature (122)..(122): n is a, c, g, or t
  misc_feature (258)..(383): n is a, c, g, or t
  misc_feature (417)..(439): n is a, c, g, or t
caagaacttctgctggaagtggaacagagccatctcttctggtaaatttgtcccgaacaaaatcattaaccctaattagaaagacaacatcagttaacccaaaattccccaacccatttccncttctggcaatactgttgcttttcccaagtcagcaaaatatttgtcttatgaataaaatttaaaattatcaaatgcttacatgtaaaattaaagttgtacaaattctgcgacagtgtgccagtgtcagcagcatcnnnnnnnnnnnnnnnnnnnnnnnnnnnnnnnnnnnnnnnnnnnnnnnnnnnnnnnnnnnnnnnnnnnnnnnnnnnnnnnnnnnnnnnnnnnnnnnnnnnnnnnnnnnnnnnnnnnnnnnnnnnnnngcataaatcaccacacttggctaatttttaattnnnnnnnnnnnnnnnnnnnnnnngtagagctgagttcttactatgcttatgctggtttagaactggtctcaagtgatcctcccaccacccaaaatgctgagattataggcatgagctac

SEQ ID NO: 350849 - DNA, 1555 bp, Homo Sapiens
  misc_feature (1125)..(1153): n is a, c, g, or t
  misc_feature (1183)..(1193): n is a, c, g, or t
  misc_feature (1527)..(1527): n is a, c, g, or t
ggtccggaattcccgggataggctccctcgggagtggtccttgggccgtggcccctctggggtgagcgtggatgattagtacccagaagggactgtgtccaaaaggagccggccagaaacgggttgcggacacggctgggctgacagaaggcagcccccacgaggcctttggctctgaggaccctggaggcctgagggagctcaatcctggtagcaacacccctgaattcctggtggtgaaaggatgtggccccaggacccatcccggaaggaggtgctgaggtttgcagtcagccgccgtatcctgactctgatgctgcaggccctcttcaatgccatcatcccagatcaccatgcagaagccttctctcctcctcgcctggccccctcaggctttgtggaccaactcgtggaaggtcttctgggcggcctgtctcactgggatgctgaacacttcttgttcattgctgagcatggctacctgtatgagcacaactttgccttctttcctggtttccccttggccctgctggtggggactgaactgttgagacccttacgggggttactgagtctacgcagttgcctgctgatttcggtagcatcactcaatttcttgttcttcatgttggctgcagttgcacttcatgacctgggttgtctggttttgcactgtcccccaccagtccttttatgcagctctgcttttctgtctcagccctgccaatgtcttcctggcagctggttactcaaaagctttgtttggccctcctgacatccagtgccatggggcaactgggaaaagggcccgagtctggactagtgtactcctctttgcctttgccactggggtacgctccaacgggctggtcagtgttggcttcctcatgcattctcaatgccaaggctttttctcttctctaacgatgctgaatcctctgagacagctctttaagctgatggcctctctgtttctgtcggtgttcacacttggccttccctttgccctctttcagtattatgcctacacccaattctgtctgccaggctcagcccgccccattcctgagcctttggtacagttagctgtagacaagggctaccggattgcagagggaaatgaannnnnnnnnnnnnnnnnnnnnnnnnnnnnatgggcacgagccactgcgcccagcaagannnnnnnnnnnaaagctcagataaagtattatggaggcgaagaagtaggtaactcactggagtacttgagaaaggcatcatatttcagctgggtcctgaagaatgagattttccatataagaagcagaggaggaacattctaggtaaaaggaagggcatatgcaaaaacacgagggttgtgaaaggacctgattggactgagatacaggaataagcacggaggatatctctggggatctttttccctaatacacagttatagttatatccatattgggttttcttggactgttggactttcagggagggtttctcaactcagggcagggcccccattttcccggnggagattaaccttaaccctgttttgggt

SEQ ID NO: 350850 - DNA, 3094 bp, Homo Sapiens
  misc_feature (1160)..(1185): n is a, c, g, or t
  misc_feature (2423)..(2533): n is a, c, g, or t
  misc_feature (2544)..(2559): n is a, c, g, or t
  misc_feature (2588)..(2630): n is a, c, g, or t
  misc_feature (2709)..(2719): n is a, c, g, or t
  misc_feature (2730)..(2793): n is a, c, g, or t
  misc_feature (2853)..(2862): n is a, c, g, or t
  misc_feature (2894)..(2912): n is a, c, g, or t
  misc_feature (2922)..(2931): n is a, c, g, or t
  misc_feature (2954)..(2968): n is a, c, g, or t
  misc_feature (2997)..(2997): n is a, c, g, or t
taagtagggtagctttacctgttacttatcacaactcagtagcagtgtaggggaaaccacctggcagaatgtctccctggagtagccctgggagggacagagacagcatctgacagagtctcagagagctgcaaggtcacaggagacgaggcaactaactgtggcacaggaacattctttaaggcaaggctttttctgaactcgggtgtttattctgtcctgagagaaccattcattgattctaaaatataaaattcgagttgcaaatgtccatgtgcctggaagctgagggaagttttagacacctgcccagtttccctctccttgcccactgcggtacagcacaacattctagtttctcctgatgcttcgtcaaagacatttagtgcagttatgtcctgttccttggttgggccacaatggagagaatagtacttgagaaggatttctctgtaagaataccatggcagagagacccctctgccccctgctttgcattgctaacagttattagcattttatatttctttaatgcaacctaataggaaattattattcgagacagactcctctgggaaatgcataacccaggaggcactgattccttgctgagaatcctgagtggtctgtcattttacctaagatcacatccttcaaacattgtgtatgttggagcagcgaaagaactgttcaccccttatgaataactgacattcaggaagcccaactccatcatgcagatgtctatctttaattgctagctcagaagcagacagagcttcctgggacctggctaaagtaactgatagatggaactcttctttggggactattactttgcaaatggggtcagagcctcatctatgcagagaatgtcaccatatgtggtttcatgtaatctgtaattatttgttccaacagcctttaacatgactattgtttgagaaacatggcaacttttaattcccctttgatgcttctagctttctttagtattttaagaactcatacagtactaggtatgttggtccctctgagaaaaacatgtggactctcaccagtccgttgtgctcaggactgagcagcagcgtgtgtgcagggcagctgtggaggtgaatactgattgtcccccttttcctccacagggatatctgcattannnnnnnnnnnnnnnnnnnnnnnnnnaccagcagctcccttgcctcctgcgagcaccgaggcacctgcccagctctcgtctcaggctgtgaatggcatgagccgaggggccttgctcagctccatccagaatttccaaaaaggaactttgaggaaagccaaaacctgtgatcacagtgctccgaagatcggctgaagcttcctgtttacacttggagggaaaagttcttttttattcctactcacccctaccccccaaactaccctcttcctgggaaagtaattgctgagccagtacagccacaaacagtactattttgcagatgctcatgtaagcagcttttcgagagaaataattctttaagcagaataaagttaggctggcattgctcccttaagatcttgctcctttattaaccctgtaaaggagtcttgtttatcctctaatggccaggcttttgggacagcagcatattgaaatattttcaccaactaaaggaaatagacagaaaaacaatgacaatattcaatcacagcagtaaatggcctttgtgttgcaatcccttctaccccatcagacagctcctagaaacattcctcttacagttcatttctctaaagcattttctgattcttagataactccaatttttgctacctttatcttagacattaacactatagcccaaagcatagttactttgctaaatcagaaagcaactgagttctttgttttctcctcaaatagaatggggaacgttcacaacattctcttaagttctaacaggaataccattgtggttatagaactcagggctgctaaagcaactactctagacccatagttctttttagttagatgtattgaaacagacaaaaatattaacatcagaaaaagctcttgccaattagaggatcttcttaatcctcagcaattaagtttggggtttgaggggggcaggtcattgttacaacagaagtaaatttggcatctatagaaatcaattatgatttttgaaagatttatctaaatatatcaatatagcatctctttaatgttagtcatttattagaaagatcctttatcctgatttgcttaaacctttcaataaattgcactttaaaggattataaataatccatttaaaaattcaagtacacacatcagtgttggttactatgcagagaatgtcattgtgtatagtttcatgtaatctgttatgtcagctgtattttttattaaaatcatgtcaagaaaaaaaaannnnnnnnnnnnnnnnnnnnnnnnnnnnnnnnnnnnnnnnnnnnnnnnnnnnnnnnnnnnnnnnnnnnnnnnnnnnnnnnnnnnnnnnnnnnnnnnnnnnnnnnnnnnnnncctggggcggnnnnnnnnnnnnnnnnaaaaaagcttttcaaaaacctttctgttnnnnnnnnnnnnnnnnnnnnnnnnnnnnnnnnnnnnnnnnnnnccataaagtggttttccccaagaaaaaaccccggggggaaaagaaacaaaggggtgtgtggattccccccccaccaatnnnnnnnnnnncgccccgccgnnnnnnnnnnnnnnnnnnnnnnnnnnnnnnnnnnnnnnnnnnnnnnnnnnnnnnnnnnnnnnnnttcttctggcgaggggggcgctctttataagcggggggggtctctctccaccaccacaannnnnnnnnntctccccacaagagggcggagggctccccacnnnnnnnnnnnnnnnnnnnttattaaagnnnnnnnnnngcgcgccccgcggtgggcccacnnnnnnnnnnnnnnnaaaaaaaaaacaacgggggtgtggggagngaattaactcttcctttataaataaaacgcatattattttctcgcgccgcggccgacactagatgttgggagagacacacacctctcctctccacac

SEQ ID NO: 350851 - DNA, 462 bp, Homo Sapiens
  misc_feature (229)..(254): n is a, c, g, or t
  misc_feature (378)..(378): n is a, c, g, or t
ccaccatggatctgaggaggaaagaaaaaaaagaaagattttagctcgaaagaagtcaaacgatctgctcttgaaaatagtgaagagcattcagcgaagtacagcaactccaataattcaggttctggggccagctcacctctcacgtccccgtcatcgccaactccaccctctacatcagtagagcatgcaccattttgaacgtgaattttcgggatatctgcattannnnnnnnnnnnnnnnnnnnnnnnnnaccagcagctcccttgcctcctgcgagcaccgaggcacctgcccagctctcgtctcaggctgtgaatggcatgagccgaggggccttgctcagctccatccagaatttccaaaaaggaactttnaggaaagccaaaacctgtgatcacagtgctccgaagattcggctgaagcttcctgtttacacttggagggaaaagttctttttt

SEQ ID NO: 350852 - DNA, 1264 bp, Homo Sapiens
aggcaggggtggcattaatcatgtaaaacacaggaggaggaactgggttaggagtaatggtagagttcagtttaggtaattgcaaatacacactattccctgactagctcccaagactttttcttccctctcttcttagaacttcattagaagaggtgatgttatttcttagatgagagtatcttacttaccattgactaatacatgttctctgatgaactttgctattcaacatacatgcaaaggggttataaaaacaagtcaactctagtgctgatgagggtgatcatcatcactgatcatggtgtcagttgattatagtgtcaatttataacttaatttatgtaaaatagagcaatgcaaaagacatagcaatcttcacttcaaatgaagagtcttgaatgccacttttctaaagagaaggctcatggaggcacctcctcactattgaaaaatccattatacctgtgataaaactgattgtgttcagttgtattagatttgtatgcaaataaaaagttgggtaattagctatacattgtcctaaacgtataaaataagaaaaatacatagatgtatggtttcctaggacatctaccagtttagaaggcgaggctaatgtgggagctgccacagcatcctgattaaggctatggaaagaagttgcagactgatgatgtccttagaagtaatgacattttttaaagataatattcctttggtgagataagcagattatattttacagtaaacacattttatatttcagttaataagacattgtatattaaataatcgcatttaatgctttacttttttcctgtgttaaaattaatcactcatggccttggccatatgactttgccattcctcccactgtttatctgacttgtttatattttattgagcttgctcatatgacttacaatagcctgtgacagaagtgacaggagaccccatcctgaccaagaccttaagaggcatcctagtttcctctcactttcacgagcctctgcggggttcatcatgagaacatatccctagaaaccactggacaaggagaacaagaagtatatggaataggtctgatccacccttaccacctggaagtagagctgcccagctgggcttgcagactcacaaacatggaaaatctatgtttactgcagcaattcatgaaactttgaggctgttataaaaaagaaagggacctaataacaaatggaaaagaacctggtttagtaagcaaagctagttatgagcc

SEQ ID NO: 350853 - DNA, 884 bp, Homo Sapiens
cctccctccacggatgcgcttaaaaggcggtggcggtggcggcagcgccctggcgcccgggctcacctcggccatgagcagcgcagccggcccagacccgtcggaggcgcccgaagagcggcatttcctcagcaccgcggaggcagccgccctggagcgggagctgctggaggattatcgctttgggcggcagcagctcgtggagctgtgcggtcatgctagtgccgtggctgtgaccaaggcgttcccgttgcccgctctctcccggaagcagaggacggtgctggtcgtgtgtggcccggagcagaacggggcagtggggctggtctgtgcccggcacctgcgggtgtttgagtatgaacccaccatcttctaccccacacgctcgctggacctgctgcatcgggacctgaccacccagtgcgagaagatggacatccccttcctgagctacctgcccactgaggtgcagctcattaacgaagcctatgggctggtggtggatgccgtactgggccccggcgtggagccgggcgaggtcgggggcccctgcacccgcgcgctggccacgctcaagctgctgtccatccccctcgtgagcctggacatcccctcaggctgggacgcagagaccggcagcgattcggaggacgggctgcggcctgacgtgctggtgtctctcgcggcgcccaagcgctgcgctggccgcttctccgggcgccaccacttcgtggccggcaggttcgtgcccgatgacgtgcgccgcaagttcgctctgcgcctgccgggatacacgggcaccgactgcgtcgcggcacttgtgaccgccacccgcggccacaccgcagggaccctcgccaataaacagccctcccaccaccgcc

SEQ ID NO: 350854 - DNA, 928 bp, Homo Sapiens
  misc_feature (849)..(885): n is a, c, g, or t
tggccagcgaagcgcttgggcgccgcgagagacaccagcacgtcaggccgcagcccgtccctccgaatcgctgccggtctctgcgtcccagcctgaggggatgtccaggctcacgagggggatggacagcagcttgagcgtggccagcgcgcgggtgcaggggcccccgacctcgcccggctccacgccggggcccagtacggcatccaccaccagcccataggcttcgttaatgagctgcacctcagtgggcaggtagctcaggaaggggatgtccatcttctcgcactgggtggtcaggtcccgatgcagcaggtccagcgagcgtgtggggtagaagatggtgggttcatactcaaacacccgcaggtgccgggcacagaccagccccactgccccgttctgctccgggccacacacgaccagcaccgtcctctgcttccgggagagagcgggcaacgggaacgccttggtcacagccacggcactagcatgaccgcacagctccacgagctgctgccgcccaaagcgataatcctccagcagctcccgctccagggcggctgcctccgcggtgctctggcaaacaggccctgcgttccaaatctgctctagccatgactgccttccccaggcctgtttcctcctctggacaagggaggtggtagcatttgagctaagctccgctcttcccatgtcggcaagtgggggctgcagctccaaggccctgaggaaatgccgctcttcgggcgcctccgacgggtctgggccagctgcgctgctcatggccgaggtgagcccggacgccccgctctcgacgaattcgagctcggccgatttggcctgatnnnnnnnnnnnnnnnnnnnnnnnnnnnnnnnnnnnnncgccgccccgcgtgaaaatccagcgcccatatagtcatacatc

SEQ ID NO: 350855 - DNA, 1528 bp, Homo Sapiens
  misc_feature (70)..(90): n is a, c, g, or t
  misc_feature (795)..(852): n is a, c, g, or t
aaaaaaaagcgggagagggggggccccccctgtcctaatagttgtaaaaagccaccacttgagggggtgnnnnnnnnnnnnnnnnnnnnntttgtccgacattttttcaaaaagggttattaaagaggtttttaaaggggtttgggatattgggcccccttagggccctttttgaagagagtggacccctattgggggtgacaaaatacaatattaaattgggggtttttaaattttaaaaagttttggccccccttttcctttgggaatctttaaaagtttttggagaaatttgggggtgataaagggaaaggttttaaatttgttaaaagggggggtaacatttgaaagtgtgaaaaattaacaaatggaaatgtcctttgttaatttgcacattacaggtagaattgtatatacttccattatacagcttcccacactgagctgtctcaccatctctgtggacagatgagtaattcgtgccagctctcccttctcagtttgtcttctgtgtggagaactgccaacatggtctctcctttttagaaactcacatactgtaagtgcaaccttttggaagtcagtgtacataaacatgtgaaatgtgcatcccagctactgtagataatgaggcagctgtacatgtaatcacgaggaaaaatcgccaagataaattcagtggacaaaccagcatggaagaggctgaggagcacgctgccatatgtctacacatagtgtagctctagcagaattcgtgaggagcaagtgacagcaggtgcctctgcagaaaggaannnnnnnnnnnnnnnnnnnnnnnnnnnnnnnnnnnnnnnnnnnnnnnnnnnnnnnnnncagagctttatggtgatgaggcatgcttctggatagtccggggagcctgtgtccttctcacattcaggagtccagtggaaagctggctcagctggactgagcaagctgagaagaaacatggtcttttgtaggggatctgtcagggtggtgggagaaattataaaaattaagttgtaggagatagacacaaaacttcttggaaggctgggaggtttgcataccttcagtaaaagatttggctgaaggcagctgaattctcttaaaagcttagggcgtagatacataggaatgtagagaagtttatctaaatagcttgtttactcatgtggtcctaaaacagacctttgatcatttgcgggcgcatgactgctctctactcaggaggtcagcaatgttaattaccctctagtggtgtggtgtttacttgagaactttgtcattaaatctgtactgaataaatgcctggagccccagcctgacagggctgtgcctgctgactctttatagcacctgctgactcttcatagcaccctcctcagtgtctgggagctgcccagtcccctaccccattctttcacaggatacctgtgtctgagtgcatttcttcatccatcacgcagccagggtctgcaggttggacccagcaagttattgacagagtttgaaaattataccc

SEQ ID NO: 350856 - DNA, 854 bp, Homo Sapiens
atcattgacaagccgcgagttattgaagtcctccctcgtgggcccacagctgctgttcttgctcctgacagttcaaatgcctcctctgagcctagctcgtgagatgaaagaacagaagttgtttggaccttagagccattgtccacaatcacggatggttctcaagagttgattgtaagaaatttccaaagaaggctgcctgcatagtggttccggctgccctttctaggtgattggaatcagcccatctaaagcagtctttatatgcattccgaggccagagtaacattttgaactttggggggatatttgttcatcacttgggtagaagaggagcaaaaatacctctgttttctcttgccaaagtaagatgaagctattccaggttgagggatttttctttgcacggggttgattaatttctgcacagggagtgagattattaaagtaacacacacacaaagtaaattgcaaaatgaaaaaaattagaagcaaatgagttttggaccaatattgttgataaatctaaattgttaagagagatcttataatgcaacatcaaattctttattcaattttactgaagtactggctctttcctgctctggacaagaattgagcaacttgtctgatgactgggaaaggaggacctgcaaccatctgacttggtctctgttaatgacgtctctccctctaaaccccattaaggactgggagaggcagagcaagcctcagagcccaggcctcagtggtcattaagatgttaagtcttttgcggcagattcctggtgatttgatcaataaagagtaatttcttgctaaataaataaaagaaaccttgttgaaaaactaaa

SEQ ID NO: 350857 - DNA, 1019 bp, Homo Sapiens
  misc_feature (1002)..(1002): n is a, c, g, or t
caggctataaataagggagtccggcggctcctctatcaggaagatgtgcatgccgtgggtctgacggcttgagtagcgctagggagaatccctgcaggtaatatttgacttttgcttcatattaatctgagtggaaaataaaagggccctcttctcctctcgcttccctgccgggcaggcgccatggcggaagcctcggcgacgggcgcctgcggagaggcgatggcagcggcggaaggctcctcgggcccggcgggcttgactctgggccggagcttctcgaactaccggcccttcgagccccaggcgttgggcctcagcccgagctggcggctgacgggcttctccggcatgaagggctgaggctgcaaggtcccgcaggaggcgctgctcaaactcctggcgggactgacgcggccggacgtgcggcccccgctgggccggggcctggtgggtggccaggaagaggcgtcccaggaagccggcctgccggcaggagcgggccccagccccacctttccagccctgggcatcgggatggactcctgcgtcatccccctgaggcacgggggcctgtcactggtgcagaccacggacttcttttaccccttggtagaagatccctacatgatggggcgcatagcttgtgccaacgtgctgagtgacctctacgccatggggattactgagtgtgacaacatgttgatgttactcagcgtcagccagagtatgagtgaggaggaacgcgaaaaggtaacgccactcatggtcaaaggctttcgggatgcggctgaggaaggagggacggcagtgaccggtgggcaaacggtggtcaaccctttggattataatcggtggagttgccactgtagtatgccaaccaaatgagttcataatgccggacagcgccgtcgttggggacgtgctggtgtgttaaccaaaccgttaggaacccaggtttgctgttcaatgcccaccaatggcttggataatcctgaaagntgggattaagtaaagat

SEQ ID NO: 350858 - DNA, 1251 bp, Homo Sapiens
gcaccttggcacaagctatgcgccccatcatgtagggatcttctaccaaggggtaaaagtagtccgtggtctgcaccagtgacaggcctccgtgcctcagggggatgacgcaggagtccatcccgatgcccagggctggaaaaggtgggacggcagtgaccggtgggcaaacggtggtcaacccttggattataatcggtggatttgtcactgtagtatgccaaccaaatgagttcataatgccggacagcgccgtctttggggacgtgctgctgttaaccattccgttaggtacccaggttgctgtctatgcccaccaatggctggataatcctgaaagatggaataaagtaaagatggtggtctccagagaagaggtggagctggcctatcaggaagccatgttcaatatggctaccctcaacagaactgctgcaggtttaatgcacacatttaatgcccatgcggccacagatatcacaggctttggcattctaggacactcccagaaccttgcaaaacaacaaagaaatgaagtgtcctttgttattcataatctgccaataattgccaagatggctgccgtcagcaaggccagtggacggtttgggcttcttcaaggaacctcagctgaaacctctgggggattactgatttgtctgccaagagaacaggcggctcgcttttgttctgaaatcaaatcctccaagtacggagagggtcaccaagcgtggatcgttggcattgtggaaaagggaaaccgaacggcccggatcattgacaagccgcgagttattgaagtcctgcctcgtggggccacagctgctgttcttgctcctgacagttcaaatgcctcctctgagcctagctcgtgagatgaaagaacagaagttgtttggaccttagagccattgtccacaatcacggatggttctcaagagttgattgtaagaaatttccaaagaaggctgcctgcatagtggttccggctgccctttctaggtgattggaatcagcccatctaaagcagtctttatatgcattccgaggccagagtaacattttgaactttggggggatatttgttcatcacttgggtagaagaggagcaaaaatacctctgttttctcttgccaaagtaagatgaagctattccaggttgagggatttttctttgcacggggttgattaatttctgcacagggagtgagattattaaagtaacacacacacaaagtaaattgccaaatg

SEQ ID NO: 350859 - DNA, 1587 bp, Homo Sapiens
  misc_feature (166)..(180): n is a, c, g, or t
ctttcctgtcatttctaacttaccacatgcttggtgtactatatgtatgatgtgcctcatatgttgcaaagaactaaggtgagtatagcctactagatatgggcaatatccagcctagatgattggaaagataccagtttaagtaaacttggtaaaatccaagtcnnnnnnnnnnnnnnnccaggaacaactacattttctcatatacaggtagctaggggcaacacagttccattctagagggaaacaaaagggagagccccacaaaactttggggacaagggagagagagactcatctgacacttcttttggaggtcaggatttgtatatcagaattgaagttagaattaagtgaattaaactgaatttgattgtgagtgaacctagaacagcactgaagtattacataacctggaagactgagaagggtatattatttgaaggatctttttatttccccgaggtctttcgcactggagacagcataaaagagtgaacaaatgttgggatgagagaagatgacatcaatgtgggagttcagtataactggggataaactagaagaacctgtgattttacagtcatcttattacctgccagggctcatctagccatggcaatgtttgccttgaatgggggtgaaagcctttctttgttggatcaaatactactacactattacacttccacactatttatttggggatgggctgggagtgacagtagcctagtagttcagctacctgattactgccccattcttttagaagcacatgtctgccaaggagtggtttgtactgctgtgtttggtacatctagtcttttttctgctataagttttccttacctgtcctttagtgtagattttattcatcacaggacagaataatcaaggacaaccaaaatccttttgttagtttcagtacctcagctatcaacatttctgagctaccattcaatgttcctctgtgtcatggagtgaaattcttgttttgtgggtattaggagtgtgggaatgtgataacctaaacaacctttgctctgaaattccatttttccctctttccctgagttgtattgacctacagagttaatttcctttgtatttttttaagaaaatattaaaaatcaacggtcgcaaacaaaaacaaaaaggcgagaggcccaaccctgtcgggccgcctcggcccctcaagaagccttttctagaccctttcctttgggcggcgcggccccccactcagcgtaaggggaacactggtcccttagctggttctccctaggggagaatcctgggggacatgaccttaaatgcctttggctatcttcccccaccaataaaaaaagaacgtgcccggggcgggctaaacccggaggggggttctgggagacaaacctcccaaaaatgggcgagggttctctgaagaggcccctgtaaggctgtgggaaccctctttcccaagcgcgggaggagccgccacaacccctgggaggccaccccatattaactctcacacaatttaaaaacccgcccctcgggggccccccgcggccccccactttccacttttgggggccggaaaaa

SEQ ID NO: 350860 - DNA, 1686 bp, Homo Sapiens
  misc_feature (1427)..(1475): n is a, c, g, or t
  misc_feature (1490)..(1493): n is a, c, g, or t
  misc_feature (1557)..(1573): n is a, c, g, or t
gttcttcgtgaaagggatgacgggagctgtatgaaagcggaagagttatagaccgctaacacctgtcactggccactggtttcccggagttagcggcaacgaccttgcagcctggacactagccaggcgctccctcttctcacagcggcccacgtctccttgcttgggagcccatcgtcctggctccggtggcctcgctgggtctcggggaagcagaggactgttcattcctgtggcgaaaagccggagtcggccctagacacccacgactcgcagggtccatggttccggaggccgtgagacctgccggggctgacaggtgccagggcccatgctgcgggagcctgtgtgctcagccttcttgcggacggtaaagaagctaagtggaagagtgtttcctcctctggccgtaaagcaggtactctctgcagcaccagctgtccccgccctactccggaccgccccaaagactccatgggatggacctgagtcagccgaatcccagccccttcccttgggcctgctgtggtgctggacatcagtgacagacggaagcaggagaccatcaaggctacgggaggcccggggcgcttgcgaagatgaagtttggctgcctctccttccggcagccttatgctggctttgtcttaaatggaatcaagactgtggagacgcgctggcgtcccctgctgagcagccagcggaactgtaccatcgccgtccacattgctcacagggactgggaaggcgatgcctggcgggagctgctggtggagagactcgggatgactcctgctcagattcaggccttgctcaggaaaggggaaaagtttggtcgaggagtgatagcgggactcgttgacattggggaaactttgcaatgccccgaagacttaactcccgatgaggttgtggaactagaaaatcaagctgcactgaccaacctgaagcagaagtacctgactgtgatttcaaaccccaggtggttactggagcccatacctaggaaaggaggcaaggatgtattccaggtagacatcccagagcacctgatccctttggggcatgaagtgtgacaagtgtgggctcctgaaaggaatgttccagagaaaccagctaaatcatggcaccttcaatttgccatcgtgacgcagacctgtataaattaggttaaagatgaatttccactgctttggagagtcccacccactaagcactgtgcatgtaaacaggttcctttgctcagatgaaggaagtagggggtggggctttccttgtgtgatgcctccttaggcacacaggcaatgtctcaagtactttgaccttagggtagaaggcaaagctgccagtaaatgtctcagcattgctgctaattttggtcctgctagtttctggattgtacaaataaatgtgttgtagatgacaannnnnnnnnnnnnnnnnnnnnnnnnnnnnnnnnnnnnnnnnnnnnnnnnaccactaaaaaaacnnnnccctgggggggcccgcccttgggcccctccgaaaaaagtttttttagaaaccatttctcttttnnnnnnnnnnnnnnnnnccccctataaagggaaaaaggggagaaaagtgggggctcatagaggttgtgggtttccccccaagagagagaaacccggcgggggccactaggaacacaaagagggggctctg

SEQ ID NO: 350861 - DNA, 891 bp, Homo Sapiens
gggagctgtatgaaagcggaagagttatagaccgctaacacctgtcactggccactggtttcccggagttagcggcaacgaccttgcagcctggacactagccaggcgctccctcttctcacagcggcccacgtctccttgcttgggagcccatcgtcctggctccggtggcctcgctgggtctcggggaagcagaggactgttcattcctgtggcgaaaagccggagtcggccctagacacccacgactcgcagggtccatggttccggaggccgtgagacctgccggggctgacaggtgccagggcccatgctgcgggagcctgtgtgctcagccttcttgcggacggtaaagaagctaagtggaagagtgtttcctcctctggccgtaaagcagctgtccccgccctactccggaccgacccaaagactccatgggatggacctgagtcagccgaatcccagccccttcccttgggcctgctgtggtgctggacatcagtgacagacggaagcaggagaccatcaaggctacgggaggcccggggcgcttgcgaagatgaagtttggctgcctctccttccggcagccttatgctggctttgtcttaaatggaatcaagactgtggagacgcgctggcgtcccctgctgagcagccagcggaactgtaccatcgccgtccacattgctcacagggactgggaaggcgatgcctggcgggaagctgctggtggagagactcgggatgactcctgctcagattcaggccttgctcagggaaagggggaaaagtttggtcgaggagtgatagcggggactcggttgacattgggggacaatttgcaattgcccggaagacttaactcccgatgaggttagtgaaatcgaaa

SEQ ID NO: 350862 - DNA, 1267 bp, Homo Sapiens
gcagctctgggcttaaaaatcctgcctggtggtctcgtcccgcccctcctcttcctccctccggttccttttcctccttccggttcttggtctaggctgcctgtctcgagctccccggccttgtcctggttggctggcgcgggacaggatccggtaaactgaacagcgtctccttgtggcaagtgcgtgcgtacgtgcgtggcgacgtcactgcgtggcttcgtgaatacgtggcttcctagcgattggcggtgtataggcgtggctgaatacgggcctcctgcgtacgtgcgtggtgtacgtacgtgcgtgattacgcgcacacgtacgttcctcatgaaagggacgacgggagctgcatgaaagccgaagttatggaccgctagcatctgtcactggccaccggtttccgggagtaagcggcagctaccttacagccctgacacgagccgggtgctctctcttctcaccgcggcccacgtctcctcgctggctccggtggcctcgctgggtcgcgaggaggcggaggactgtactctgaggccaaaagccagagtcggccctgaacgcccacgactctcagggtccagaggccgtgagaccggccgcggctgaaaggtaaagaaaccaagtggaagagtgtttcctcctctggccgtaaagcagctgtccccgccctactccggaccgccccaaagactccatgggatggacctgagtcagccgaatcctagccccttcccttgggcctgctgtggtgctcgacatcagtgacagacggaagcagcagaccatcaaggctacgggaggcccggggcgcttgcgaagatgaagtttggctgcctctccttccggcagccttatgctggctttgtcttaaatggaatcaagactgtggagacgcgctggcgtcctctgctgagcagccagcggaactgtaccatcgccgtccacattgctcacagggactgggaaggcgatgcctgtcgggagctgctggtggagagactcgggatgactcctgctcagattcaggccttgctcaggaaaggggaaaaagtttgggcgaggagtgatagcgggactcgttgacactggggaaactttgcaatgccccgaagacttaactcccgatgaggtcgtggaactagaaaatcaagctgcactgaccaactgaagcagaagtactgactgtgatttcaaacccaggtggttactggagccatacttaggaaaggaggcacggatgtattcaggtagacatcca

SEQ ID NO: 350863 - DNA, 1259 bp, Homo Sapiens
ttcctcctccctccttactgccagctggtaccggtccggaattcccggcatccccggccttgtcctggttggctggcgcgggacaggatccggtaaactgaacagcgtctccttgtggcaagtgcgtgcgtacgtgcgtggcgacgtcactgcgtggcttcgtgaatacgtggcttcctagcgatttggcggtgtataggcgtggctgaatacgggcctcctgcgtacgtgcgtggtgtacgtacgtgcgtgattacgcgcacacgtacgttcctcatgaaagggacgacgggagctgcatgaaagccgaagttatggaccgctagcatctgtcactggccaccggtttccgggagtaagcggcagctaccttacagccctgacacgagccgggtgctctctcttctcaccgcggcccacgtctcctcgctggctccggtggcctcgctgggtcgcgaggaggcggaggactgtactctgaggccaaaagccagagtcggccctgaacgcccacgactctcagggtccagaggccgtgagaccggccgcggctgaaaggtaccagggcccctgatgccggagcccgtgtgctcggccctcttgccgacggtaaagaaaccaagtggaagagtgtttcctcctctggcagcaaagcagctgtccccgccctactccggaccgccccaaagactccatgggatggacctgagtcagccgaatcctaaccccttcccttgggcctgctgtggtgctcgacatcagtgacagacggaagcagcagaccatcaaggctacgggaggcccggggcgcttgcgaagatgaagtttggctgcctctccttccggcagccttatgctggctttgtcttaaatggaatcaagactgtggagacgcgctggcgtcctctgctgagcagccagcggaactgtaccatcgccgtccacattgctcacagggactgggaaggcgatgcctgtcgggagctgctggtggagagactcgggatgactcctgctcagattcaggccttgctcaggaaaggggaaaagtttggtcgaggagtgatagcgggactcgttgacattgggagaaactttgccatgcccccgaagacttaactccccgatgcaggtggtggaactaggaaaattcagctgcactgaacaacctgaagcagaaagtacctggactgtggatttcaaaccccaggtgggttactggagcccctaccctaaggaagggaggccaggatgcattc

SEQ ID NO: 350864 - DNA, 1318 bp, Homo Sapiens
  misc_feature (606)..(626): n is a, c, g, or t
  misc_feature (662)..(696): n is a, c, g, or t
  misc_feature (1125)..(1125): n is a, c, g, or t
gtccccgtttcccctcccccttcccttctccggttgccttcccgggccccttacactccacagtcccggtcccgccatgtcccagaaacaagaagcaggacacgcaggagaaagaaggtattctgcctgagagagctgaagaggcaaagctaaaggccaaatacccaagcctaggacaaaagcctggaggctccgacttcctcatgaagagactccagaaagggcaaaagtactttgactcaggagactacaacatggccaaagccaagatgaagaataagcagctgccaagtgcaggaccagacaagaacctggtgactggtgatcacatccccaccccacaggatctgccccagagaaagtcctcgctcgtcaccagcaagcttgcgggtggccaagttgaatgatgctgcccggggctctgccagatcctgagacgcttcccctccctgccccacccgggtcctgtgctggctcctgccccttcctgcttttgcagccaggggtcaggaggtggctcgggtgtgggctggagaggcagaagccctttcctgttggtgtcccagcacatggagccccttgggctgagcaccaagaccttgaacnnnnnnnnnnnnnnnnnnnnnccaaataacagttgggagaaatatcaatgaaattcnnnnnnnnnnnnnnnnnnnnnnnnnnnnnnnnnnnagatatggaggagtatgaattagggcttggagttggtaaaaacattcctgactatccttcttaaccacgtggctgatgtggggtaggtatgaggggaaggaagtggagtagcctaatgaaaaggggttctagttgagctctgtagataaatgccttgtttcagtgtggttggagacctggtgtcagataaaagaaactccatccgcacagacagatgcaaacagctcctctagttctgcagagctagttgagaactcaacattaatcattttaaaaagtactgtccttgaaatagatttgctgtgggaagaagggcagtgagtgtgggagaaaggagccgtgagcgtggggaaccccacagagcccaaaggactttttcagtattcgaaataaacaaaacaaaaacccatgaaaaaacccaacccctgngacaaactacttataaattatatctttgtcggccgccctcgggcccctcgaaaagctttcctaagaaccatttccgtttgggcgccgcggggccccagtagggaaaagggaaacatggggccttaccctggtttccctaagggagaatcctgggcccctggacttaggggccttgggaatttctccccccaat

SEQ ID NO: 350865 - DNA, 831 bp, Homo Sapiens
agcggagtgacaggagccgaagcagcagcgcaggttgtccccgtttcccctcccccttcccttctccggttgccttcccgggccccttacactccacagtcccggtcccgccatgtcccagaaacaagaagaagagaaccctgcggaggagaccggcgaggagaagcaggacacgcaggagaaagaaggtattctgcctgagagagctgaagaggcaaagctaaaggccaaatacccaagcctaggacaaaagcctggaggctccgacttcctcatgaagagactccagaaaggggtatggggcatagtctcttaccctctttctttggagctaaaggaggttcttcgaatgaagtctgtagaggttctactggatccttttctggaggttttgttgttgaacagaagtagaggcgaatttgaaatttgaaaagagcaagtcaaattaatgtaaatccctgatgtggtatcaattccctcctgatttcccatgtaggaaattaaggcctaaattggagcatttgggtgtgtggggaaatgagggaaagatgttagaaactgaaatgcagactgcccccaggcatttgcctgtttgaatgttggaggttttaggattgtgcactttttaagcattagagataaattttgggatgcatcatttcagaagaagatcaaaccatctatcctacagaaataaatcctcaacttgaaatgaattttcgcttcttccctcatgtgtgtatcccttcttcctcgcttctacaaatccccgctctttcagctctctatgctctttctctctgcttactttgcctttctctcgtccctccg

SEQ ID NO: 350866 - DNA, 966 bp, Homo Sapiens
  misc_feature (767)..(801): n is a, c, g, or t
gggacgggcaagggccgccattttgactgagcaaccctagtgacaggagccgaagcagcagcgcaggttgtccccgtttcccctcccccttcccttctccggttgccttcccgggccccttacactccacagtcccggtcccgccatgtcccagaaacaagaagaagagaaccctgcggaggagaccggcgaggagaagcaggacacgcaggagaaagaaggtattctgcctgagagagctgaagaggcaaagctaaaggccaaatacccaagcctaggacaaaagcctggaggctccgacttcctcatgaagagactccagaaagggcaaaagtactttgactcaggagactacaacatggccaaagccaagatgaagaataagcagctgccaagtgcaggaccagacaagaacctggtgactggtgatcacatccccaccccacaggatctgccccagagaaagtcctcgctcgtcaccagcaagcttgcgggtggccaagttgaatgatgctgcccggggctctgccagatcctgagacgcttcccctccctgccccacccgggtcctgtgctggctcctgccccttcctgcttttgcagccaggggtcaggaggtggctcgggtgtgggctggagaggcagaagccctttcctgttggtgtcccagcacatggagccccttgggctgagcaccaagaccttgaacctttcttgtgttaactttttttccaaataacagttgggacaatatcactgaaattccnnnnnnnnnnnnnnnnnnnnnnnnnnnnnnnnnnnagaatatggaggagtttgacttagggctggagttggtaaaaacattctgaagtatcttttaaccacgtgcttgagtggggaggataggggaacgagggagtacctattgaaaggtctagtggccctgtaataaaggctgtcatgggtggaacgggtaataaaaat

SEQ ID NO: 350867 - DNA, 1414 bp, Homo Sapiens
acaccacctgagtcttcctcacttttagttttataatgaacagtatggagtttttctgctgacagttaagacttcagaatcagaatcaatcttacatacatttaactctattttacagatgaggaaatagaaatccagagaggctaaatgacttaatcaaggttatacaacagctctgctgggactgagtagagtgagaaccccagatatccttgactccctaaaccagtgcctcgtccccactatccccatgatactttcaaaagcaacatgcctggaagagagagagaaggtgcccattttctgtgaataatgttcatcaatctttatattatttgagagccagagcaaactgtaagagatactaagtaatggaggctaagggggcactgtagttttaggcaagcaagtcaatttttctttttaaggattctctaaacctgccataatggaaacatgaagcaatagcagcctaagggacagaacacttagaagcacagaaaacatgtctcattcaatctacctttcccaactacgttaggttagccttgggatgttaaacctgccaaactattcccaaggctcagcctaatcaattttgggacattctctcccaaaaggagaaatcacatctctccagtttctcacacaaaaaaagcatttgcagcattatccaatcctagcctttcctatttctaggccctacctggactacagggagtgtgtggaagtgtcaatctaacgaaataaataaacttagagccccttttcaacctacattaccttctcagcagcccccagcagaatcacagtcatttctggctagcaagctgagaagatctgactaggtgcccatttcatccctgcctataatatataaacgtccagtggttgaggaaggggaggagaggggggctcaggttaccccgcaagcttgctggtgacgagcgaggactttctctggggcagatcctgtggggtggggatgtgatcaccagtcaccaggttcttgtctggtcctgcacttggcagctgcttattcttcatcttggctttggccatgttgtagtctcctgagtcaaagtacttttgccctttctggagtctcttcatgaggaagtcggagcctccaggcttttgtcctaggcttgggtatttggcctttagctttgcctcttcagctctctcaggcagaataccttctttctcctgcgtgtcctgcttctcctcgccggtctcctccgcagggttctcttcttcttgtttctgggacatggcgggaccgggactgtggagtgtaaggggcccgggaaggcaaccggagaagggaagggggaggggaaacggggacaacctgcgctgctgcttcgactcctgtcactagggttgctcagtcaaaatggcgccccccgct

SEQ ID NO: 350868 - DNA, 1352 bp, Homo Sapiens
  misc_feature (93)..(128): n is a, c, g, or t
cacccccaagcatcccccaaagatgacacactatgggcctagctgagcagcgaacgacgagcgccagcgagttagtgagcgaggaagcggcgnnnnnnnnnnnnnnnnnnnnnnnnnnnnnnnnnnnnagtcgaggggacggacatatgcccgggaattcggccattacggccggggacggaagcggcctagtcctccggctccgacagctgggtgtccaggccatggggcagccctgggcggctgggagcacggacggggcgcccgcgcagctgcctctcgtgctcaccgcgctgtgggccgcggccgtgggcctggagctggcttacgtgctggtgctcggtcccgggccgccgccgctgggacccctggcccgggccttgcagctggcgctggccgccttccagctgctcaacctgctgggcaacgtggggctcttcctgcgctcggatcccagcatccgtggcgtgatgctggccggccgcggtctgggccagggctgggcttactgctaccaatgccaaagccaggtgccgccacgcagcggacactgctctgcctgccgcgtctgcatcctgcgtcgggaccaccactgccgcctgctgggccgctgcgtgggcttcggcaactaccggcccttcctgtgcctgctgcttcatgccgccggcgtcctgctccacgtctctgtgctgctgggccctgcactgtcggccctgctgcgagcccacacgcccctccacatggctgccctcctcctgcttccctggctcatgttgctcacaggcagagtgtctctggcacagtttgccttggccttcgtgacggacacgtgcgtggcgggtgcgctgctgtgcggggctgggctgctcttccatgggatgctgctgctgcggggccagaccacatgggagtgggctcggggccagcactcctatgacctgggtccctgccacaacctgcaggcagccctgggggccccgctggggccctcgtctggctctggcccttcctggcctccccattgcctggggatgggatcaccttccagaccacagcagatgtgggacacaacagcctcctgactccaggaagagccagagctgtgcagggaggaaggggtgagaggggggcccccacaccctagactcagtaaggaagtcgggttggaccttaacatctgcattggacaactccaccccttccttggccttgcccctgcccgcctacactcctacgtgtccagggcttgggccgtgacttaggcagaggagtgcagaggagggtctggcaggggctgctcaggccgcctagctgcccctttgccaggttaataaagcactgacttgtttcta

SEQ ID NO: 350869 - DNA, 1230 bp, Homo Sapiens
tactttcacagtgaagagtctttgaggaaagagccaagcagagaagaccgctgcgtggagtgtgacaccacatggcatttctcaagcccagcggaccctgtgtcagcaaataccagtaatttaacatctgctcctggcctcctcttcacctgcctgggttcggaactgaggaggaaggatgagaagagactgcaatgcagcaggcaccctctgcagagtgaggccgcccgtccatcactgccagccctgggctgctcaggaggggacgtgaaccactcaaaggaatgtcttaaagaggatctggagtttcccccatgcaaattagggaagaattaggcaagaaaagacatacattacagggaaatccttctgaacaaaatggctgtcttcacctactcttcttgcaagaaaagacatacattacagggaaatccttctgaacaaaatggctatcttcacctactcttcagcaaaaaccgtctccagactttttagtgtcaaaaatgtaaccaactgtctcctgattttttccaatgtgtttggcaagtgctgtggccctgttgtaggtacttctcctgactcttgggggagaagtggttttagggattgatttgggggagcgggtttttgtcccatcccacctcctctcttctttctctgcttgtcgatattgtctgtgtgattcagagaattgggggcagttacattgtgtctgttgttgagattattaaaagattaaaacgtagttgtagaaatgaaaaaattaaacagctgtgttttaaaaatgcaaaccaatatcttgtcaataaaggaattcaagctatggggcagccacactcccctcctcccaggctggcattaggtggccctgggctggcggctttagggaagcatggagcacactttagggtagtgcctgcctgggcaagagacacctggccgagcaaaaggaacgagattctggggctcagaggctcggacagtgtgcccaggatttctattacatgttcaggacctctgagtagaggttcacaaggttggtgaccccataacaacctcaccgaagtggttctaagatccagtgtgctaatattgctgggtaacctgggtcgacctcaagcctgcttgagggccaaggatttctggcatgggggatccttcacgtgacaccagctggtgacgtgattgacctgacatggaacacgccccgaatctgtagccactactgat

SEQ ID NO: 350870 - DNA, 796 bp, Homo Sapiens
ccacaccagagctgaccaccccatgtggctctgcagaatacatggcccctgaggtagtggaggtcttcacggaccaggccacattctacgacaagcgctgtgacctgtggagcctgggcgtggtcctctacatcatgctgagtggctacccacccttcgtgggtcactgcggggccgactgtggctgggaccggggcgaggtctgcagggtgtgccaggaacagcagcacaatggacctgacgctcttcgcagctgaggccatcgcccttaaccgccagctatctcagcacgaagagaacgaactagcagaggagccagaggcactagctgatggcctctgctccatgaagctttcccctccctgcaagtcacgcctggcccggagacgggccctggcccaggcaggccgtggtgaagacaggagcccgcccacagcactctgaaatgctccaagttcaccaccttaattgggcccttaggcccgggccaggcttggtccccgtggaaacctgtgtggctaaagtctgctgagcaggcagcagcctctgctctgtggctccattcaggctttttcatctacgaaggccctgaggttcccatcaacccccatttccctagggtcctggaggaaaaagctttttccaaaggggttgtctttgacaaggaaagcaatcacttctcactttgcataattgcctgcagcaggaacatctcttcactgggctccacctgctcacccgcctgcagatctgggatccagcctgctctcaaccgctgtagctgtggcggctgggc

SEQ ID NO: 350871 - DNA, 1195 bp, Homo Sapiens
  misc_feature (838)..(838): n is a, c, g, or t
  misc_feature (951)..(951): n is a, c, g, or t
  misc_feature (1117)..(1117): n is a, c, g, or t
agcgggttgaggagctgcctcgcgcagggggtgtgcgaggctgagtccaagagatagcaaatcgagtcttaaataatccggggagaaagacgcccgggtagatttgaggtgcagccttggagggagggattagaagccgctagactttttttcctcccctctcagtagcacggagtccgaattaattggatttcattcactggggaggaacaaaaactatctgggcagcttcattgagagagattcattgacactaagagccagcggctgcagctgggtgcagagagaacctccggctttacttctgtctcgtctgccccaaccgctagcctcggcttgggtaaggcgaggcggaattaaaccccgctccgagagcggcagcttcgcgcgcggtgcgctcggcctatgcctgccccgaggggcgtctggtaggcaccccgccctctcccgcagctcgacccccatgatagatacgctcagacccgtgcccttcgcgtcggaaatggcgatcagcaagacggtggcgtggctcaacgagcagctggagctgggcaacgagcggctgctgctgatggactgccggccgcaggagctatacgagtcgtcgcacatcgagtcggccatcaacgtggccatcccgggcatcatgctgcggcgcctgcagaagggtaacctgccggtgcgcgcgctcttcacgcgcggcgaggaccgggaccgcttcacccggcgctgtggcaccgacacagtggtgctctacgacgagagcagcagcgactggaacgagaatacggggcggcgagtcggggctcgggctgctgctcaagaagctcaaggaccnagggctgccggggcgtcctacctggaaggggggctttcagtaagttccaagcccgagttctccctgcattggcgagaccaatctagacggctcgtgtagcagcagctcgccgnccgttgccagtggtgggggctcggggggcctgcggatcagactctgactctttcctccggaaatccaggcctgaaccttgtaccgaaaccccaatagggcaacgaactccggatggtaagtccgcctgttcaaaagcccaagcctttctttcccagtgggaaatcnttgccccttcccctacttggggctgggccccaagaatccccccaacttggaacatgtttgaaaggaaatccggaatca

SEQ ID NO: 350872 - DNA, 1029 bp, Homo Sapiens
  misc_feature (782)..(782): n is a, c, g, or t
agcggaaataatccggggagaaagacgcccgggtagatttgaggtgcagccttggagggagggattagaagccgctagactttttttcctcccctctcagtagcacggagtccgaattaattggatttcattcactggggaggaacaaaaactatctgggcagcttcattgagagagattcattgacactaagagccagcggctgcagctgggtgcagagagaacctccggctttacttctgtctcgtctgccccaaccgctagcctcggcttgggtaaggcgaggcggaattaaaccccgctccgagagcggcagcttcgcgcgcggtgcgctcggcctatgcctgccccgaggggcgtctggtaggcaccccgccctctcccgcagctcgacccccatgatagatacgctcagacccgtgcccttcgcgtcggaaatggcgatcagcaagacggtggcgtggctcaacgagcagctggagctgggcaacgagcggcttgctgctgatggactgccgggcgttctacctggaacggtggcttcagtaaagttcccaagccgagttctccctgcattgcgagaccaatctagacggctcgtgtagcagcaagctcgccgccgttgccagtgctggggctcgggggcctgccgatcaagctctggactcttcctcggacatcgagtctgaccttgaacgagaacccaatagtgcaacagaactcggatgggtaatccagtggcaaacagtcatgccttccttccccagtggacgactcttggnccctttccgtcttaccttgagggactgggtgcacaaatgactgtcaaccagagtatggtaggagtatcgaggaaggcaaatacgcgtaagtcaatgtttgctatctttagcaacgtttcagcccccatagtttggcctagtctctcatatgagcaacgtcgtagaagttttacatacaaatgcgattatcccgaattcttgtgattacctggtgtagaccatatactcttgcccacgaattttcccc

SEQ ID NO: 350873 - DNA, 914 bp, Homo Sapiens
  misc_feature (37)..(37): n is a, c, g, or t
  misc_feature (53)..(53): n is a, c, g, or t
  misc_feature (104)..(104): n is a, c, g, or t
  misc_feature (118)..(118): n is a, c, g, or t
  misc_feature (146)..(146): n is a, c, g, or t
  misc_feature (205)..(205): n is a, c, g, or t
ccttaaaacctgtccttaaatcctaaaaaattcctcnggccacatttcccttngggaacacaagaagctcttgtatgccctacctaataattatagtaacaacnggaaattccatccnaataattcccttgaaatgttttgctttnatctgatatttcctctcaaattgtcctgactttcagggtacacttcgtatcactgtccnagtctttgaagagcagttcccagtggtttttatcaaggagtctctatgtagcttagagctacatagagtccttcgccaatagtggcctatgctcttgctccatctaggagtcagtacagtttgctgagattttccttctattcttgttagatttctttgggtccaagttgccatttctgtccccaaataaacttgaaaacgtttagccacttaaaaaaacaactgctaatatgaattaaaccctaagtacaacatcttttcccttttatgtgttggtctgttcttcaatttcatttttccttttatatctatttgacttgttctctatcaactttttctccaaaaaagctttctccttcccaattacttagtttattgtctcattcttccattgctcctgtcctaacactgaagcatgctctaaaaacctcttcagacattccttgatgtcctgaatgaacctgattcctagagacagactgttgtaggcacagtctaattgtctagactgcctctttaatctttggttttaaaatatttaacttaattgcatctttaacttaggcatttttcattataatacaggctcctatatctttgtttgcttagttttcaataaaagcctttcatggtgtctgcagagtgggagggttagaaatctagagctgtggccagagcctatgtaattaacaaatacagttgagttagg

SEQ ID NO: 350874 - DNA, 1141 bp, Homo Sapiens
  misc_feature (886)..(886): n is a, c, g, or t
  misc_feature (941)..(941): n is a, c, g, or t
  misc_feature (1109)..(1109): n is a, c, g, or t
atgcgcagtgcgggagctgaggcgccagctgtggatttggaagttccggggaagtcgcgcatgcgcgagtgtacgcgttgccggcgaagaggggagcctgacgactcggaaatttgaataccacagtagcatggagtgtgacctcatggagactgacatcttggagtcgttggaagatctaggttacaagggcccattgttggaagatggagcgctctctcaggcagtctctgctggagccagttcccccgagtttaccaaactctgtgcttggctggtgtctgaattaagagtgctctgtaaactagaggaaaacgtgcaagcaactaacagtccgagtgaagctgaagaattccagcttgaggtgagtgggctactaggggagatgaactgcccgtatctttcactgacatctggggatgtgaccaagcgccttctcattcagaagaactgcctcctcttgctcacatacctcatctcagaactagaagctgccagaatgctctgtgtgaatgctcctccaaaaaaagctcaagaaggaggcggtagtgaggtctttcaagagttgaaaggcatatgtattgctctaggaatgtccaaacctccagccaatataactatgttccaattcttcagcgggattgaaaacaaaattaaaggaaacattagcaaaagttccacctaatcatgtgggaaagcctttactgaagaaagccaatgggaccagcccactgggaaaagatagaagcaattaaccaagccatagccaatgaatatgaagtccggagaaagctgctaataaaacgtttggatgtcactgtacaatcctttggctggtctgacagagcctagagccagacagaaaaattagccaaggtttaccagncgaaacgttcagtcttatcccctaaactactatttctgttgccccatcttttggnctgcaaggcaggaactgtcaaagatttttagggacagcagcgggctctataagagaaagactgcctgtgccctccaataagtggttgattgggcagggggcctgaacagagggtggaagaccccaaggaaatcgaacctcccacccccaaagatgccaccctgggcanaaaaaggcaaaatggcccccagccagcaaaag

SEQ ID NO: 350875 - DNA, 804 bp, Homo Sapiens
cggcagagccctttgtgctgctgcttctggaagtagtcccccttcctcccgggatgacctcaggactctgtcggtttcccctctttacccttccccgtccccgtgttctgctgggctctgattctgcccaatgagtatccccataggttctcaaaaacatgaacaagtctgtaaagctcagacatttgtcagcctcaacagcaccacccattcaagcatcctgtggataaagaattcagggaaccatccacacacctgccaaccctgggaagcatccagttctcaaatcgtttttgctatggatttatactaacaagaacattccttgacttcccctcctgctggtgttttaaagccacaagtagggaagatatctggcaggcagaaagaagtctgtgatgataaacaatgatgaggatgacctaggcaccctacgctagtgtgagaagcctgcgccccaggaaggatctgtgttagtccctgggatggctccaaggcctgctctaggaaggcagcatgctcagtgggaacacagcaagattcagaatttaaagtagttgcttcatggctctgtgcactcccttttcttcctcgcagcctccctaagatgactccagtgtgaccctgtgcttagtgagcaatagtgattgagctcatgttccctgcaagtgccatttcctctccaggatgggcctctaaagctgaggcctggctcagagcctgtttgccctctgtcttaaacaattgtaaatatcacttaaattataaccatttgcaataaacatccccaaagttcaaaaaaaa

SEQ ID NO: 350876 - DNA, 1717 bp, Homo Sapiens
cggctatcgtcgacccagcgcgtccgcggagggggtggaggtttgtctccgctgtttcatctctatggctgtcagaggtgggcggctttgaccgagaggctgctggagctcgtgtttggacgcgatgtttcgtctgaactcactttctgctttggcagaactggctgtgggttctcgatggtaccatggaggatcacagcccatccagatccggcgaagactaatgatggtggctttcctgggagcatctgcagtaactgcaagtactggtcttttgtggaagagggcccatgcagaatctccaccatgtgtagacaacctaaaaagtgacatcggtgataaagggaagaataaagatgaaggggatgtttgtaaccatgagaaaaagactgcagatcttgcccctcacccagaagagaaaaagaagaaacgttctggattcagagacagaaaagtgatggaatatgagaataggattcgagcctactccacgccagacaaaatcttccgatattttgccaccttgaaagtcatcagtgagcctggtgaagcagaagtgtttatgacaccagaagattttgtgcgatccataacacccaatgaaaaacaaccagaacacttgggtctggatcaatatataataaaacgctttgatggaaagaaaatttcccaggaacgagaaaaatttgctgatgaaggcagtatattttacaccctttggagaatgtgggctcatatccttttcagactacattttcctcacaactgttctttccactcctcagagaaattttgaaattgccttcaagatgtttgatttgaatggagatggagaagtagatatggaagaatttgaacaggttcagagcatcattcgctcccaaaccagtatgggtatgcgccacagagatcgtccaactactggcaacaccctcaagtctggcttgtgttcagccctcacaacctacttttttggagctgatctgaagggaaagctgacaatcaaaaacttcctcgaatttcagcgtaaactgcagcatgatgttctgaagcttgagtttgaacgccatgaccctgtggatgggagaattactgagaggcagtttggtggcatgctacttgcctacagtggggtgcagtccaagaagctgaccgccatgcagaggcagctcaagaagcacttcaaagaaggaaagggtctgacatttcaggaggtggagaacttctttactttcctaaagaacattaatgatgtggacactgcattgagtttttaccatatggctggagcatctcttgataaagtgaccatgcagcaggtggccaggacagtggctaaagtggagctctcagaccacgtgtgtgatgtggtgtttgcactctttgactgtgatggcaatggcgaactgagcaataaggaatttgtttccatcatgaagcaacggctgatgagaggcctggaaaagcccaaagacatgggtttcactcgcctcatgcaggccatgtggaaatgtgcacaggaaactgcctgggacttcgctttacccaaacagtaaccccacactgcaagaggggacccctccaaccccagtaccctgggaccccctccgcagagttttcgggcagagccctttttgttgctgcttgtttcttgggaagttagttttccctttccttccccggggattgaccttcagggattctgttcggttttccc

SEQ ID NO: 350877 - DNA, 800 bp, Homo Sapiens
taggctaggtacgaggccgggtggctgaatcggcacggaggatttcagcgtaaactgcagcatgatgttctgaagcttgagtttgaacgccatgaccctgtggatgggagaattactgagaggcagtttggtggcatgctacttgcctacagtggggtgcagtccaagaagctgaccgccatgcagaggcagctcaagaagcacttcaaagaaggaaagggtctgacatttcaggaggtggagaacttctttactttcctaaagaacattaatgatgtggacactgcattgagtttttaccatatggctggagcatctcttgataaagtgaccatgcagcaggtggccaggacagtggctaaagtggagctctcagaccacgtgtgtgatgtggtgtttgcactctttgactgtgatggcaatggcgaactgagcaataaggaatttgtttccatcatgaagcaacggctgatgagaggcctggaaaagcccaaagacatgggtttcactcgcctcatgcaggccatgtggaaatgtgcacaggaaactgcctgggacttccgctttacccaaacagtaaccccacactgcaagagggggacccctcgcaccccagtacctggacccctccgcagagtctcggcagagccctttgtgctgttgttctggaagtagttctccttcctccgggatgactcaggatctgtcggtccctctttaactttccgtccccggtctgtgggctgttctgccatgggttccctggtcttaaatgacagtggagcaaattggggcaaaga

SEQ ID NO: 350878 - DNA, 1214 bp, Homo Sapiens
  misc_feature (46)..(46): n is a, c, g, or t
  misc_feature (82)..(82): n is a, c, g, or t
  misc_feature (713)..(754): n is a, c, g, or t
cggggctactacgacgtccgaagccagctgctggctgcaggtgcgnaggtgaacacaaggggcctagatgacgacacgcctntgcacgacgctgccaccaacggcactacaaaggtggtgaagctgctgctgcggtacggagggaacccgcagcagagcaacaggaaaggcgagacgccgctgaaagtggccaactcccccacgatggtgaacctcctgttaggcaaaggcacttacacttccagcgaggagagctcgacggagagctcagaagaggaagacacaccatccttcgcaccttccagttcagtcgacggcaacaacacggactccgagttcgaaaaaggcctcaagcacaaggccaagaacccagagccacagaaggccacagcccccgtcaaggacgagtatgagtttgatgaggacgacgagcaggacagggttcctccggtggacgacaagcacctattgaaaaaggactacagaaaagaaacgaaatccaatagttttatctctatacccaaaatggaggttaaaagttacactaaaaataacacgattgcaccaaagaaagcgtcccatcgtatcctgtcagacacgtcggacgaggaggacgcgagtgtcaccgtggggacaggagagaagctgagactctcggcacatacgatattgcctggtagtaagacacgagagccttctaatgccaagcagcnnnnnnnnnnnnnnnnnnnnnnnnnnnnnnnnnnnnnnnnnncaaaaggcagagaggttcgcttcggaaagcggagcgacaagttctgctcctcggagtcggagagcgagtcctcagagagtggggaggatgacagggactctctggggagctctggctgcctcaaggggtccccgctggtgctgaaggacccctccctgttcagctccctctctgcctcctccacctcgtctcacgggagctctgccgcccagaagcagaaccccagccacacagaccagcacaccaagcactggcggacagacaattggaaaaccatttcttccccggcttggtcagaggtcagttctttatcagactccacaaggacgagactgacaagcgagtctgactactcctctgagggctccagtgtggaatcgctgaagccagtgaggaagaggcaggagcacaggaagcgagcctccctgtcggagaagaagagccccttcctgtccagcgc

SEQ ID NO: 350879 - DNA, 610 bp, Homo Sapiens
tccagtgaatggcgtcagccagctgcccactgatgggatgggccaacgacgtggcagtttgcacttgagtgtcggtacttctcacccttgaccgcctccgccccagtgcggctgagacaacagagtaaaaaggtttgtggagaacactgacgagtaccttccacttccaactatggcttcttcagcccctcctgggagcattctcccttgaagatgtcaatcagtatcttaagcgttggctttaaaagtcaacttgtgcacctcaatcaaaattgagaattaaggaaaaggccagggagaccatcttcattctgcttctgctggaaacctctaaaactttctgacgaggctcccacacgccctgcctgcaggagccagcatcccgaatctccgagcaaagccaggtacagggtttgcaaagtctaaacaggactatcttaagacttcccagcgttacagagccaggttcagcatctgcaaagtctaaatgggactatcttaagacttgccagtgttacagactgatttccaagaaaacggaggcttaaaaacttccagcacaaatttctcctccacctttgaaaacacagaaactcactcaatgaatacg

SEQ ID NO: 350880 - DNA, 1083 bp, Homo Sapiens
ccgaagtatctatctatgcttagaaagactaaggcgtacttataggaagagggatagaaacctaacttgattcttctcagttttctcattttaaaacagcccagtattcctttgtatcctcaagggtccttgagaatacttctgttattgagaccctgttggctacttgtactgtacctcctctcaagccaagaagggctgtgggataatttaccatgaatccttagtagcaatgacagcagaggtaaaaaataaaaggtgttttactttcaggctcttgttttggttcagaggagattttaaatattgaatgacacttctacagaacaacggtttttcttctgccaaggctacttcctttaacgaagtgcctttaattcagccttatccaactagggaaaataatgttggacaagtctaggatttgaagagtcagtgaacttttagtgtcagggaataaacatggtgggtagattaggtttgaaaaaaacttccttagaggtatttattctcaatacctgacaggggcccatgggaatgacttcagaagcatcccggataatagatgggtaaaaagtctaggcaccctgaagaacaggtgagacagctggcctctggacagaggtaggcatagtacagtacgatatatcattcctctggtcctaaatatacaaacttattcatgtttttaggtgatgatggtcattgaaactcacttcttttcaggtgtagctacaattgtgtaatgtacaatattagagaaaggacaggctttttatgagtaacacacaccatatataaaacagcctttctggctgaccacatggttaaatgcataccttcccagtactggggggaaaaaatgacccttcttagaatgtgcaagttccatgagagtaatatattgatatgattttgaaaagaattgttgatagttacatcttcaaacttatcattccagtatgcatctttaagataatgtgattctaagtagatgactttatattcttgattaaagagtgctatacatgttaagaaatgcattaaggaatacaataaatattctaaagtgatgtaaaaaaa

SEQ ID NO: 350881 - DNA, 443 bp, Homo Sapiens
  misc_feature (30)..(30): n is a, c, g, or t
ccccccgggcccctaaaaatacaaacctantccaggtttttaggtggatggagggtccattgaaacctcaccttccttttccaggtgtagcctacaattgtgtaatgtacaatattagagaaaggacaggctttttatgagtaacacacacccatatataaaaacagcctttactggctgacccacatggttaaatgcataccttccccagtatctggggggaaaaaatgacccttccttagaatgtgcaagttcccatgagagtaatatattgatatgattttgaaaagaattgttgatagttacatcttcaaacttatcattccagtatgcatctttaagataatgtgattctaagtagatgactttatattcttgattaaagagtgctatacatgttaagaaatgcattaaggaatacaataaatattctaaagtgatgt

SEQ ID NO: 350882 - DNA, 1359 bp, Homo Sapiens
  misc_feature (30)..(30): n is a, c, g, or t
  misc_feature (1103)..(1146): n is a, c, g, or t
tggagcatccagcgtggacttctccctcantggtcgcctgctgtttgctggatacaatgattacactatcaacgtctgggatgttctcaaagggtcccgggtctccatcctgtttggacatgaaaaccgcgttacactctacgagtttcccccgatgggactgctttctgctctggatcatgggatcataccctcagagtctgggcctaatcatcttctgacagtgcactcatgtatacctgagaatttgaaatcttcacatgtaaatagatattacttctagaggagcttagagtttattgcagtgtagcttaggggagcaacccatggctcacaggtcactaagcgtctccaatatgactattaaaactgtcacctctggaaatacactagtgtgagccttcagcactgcgagaataccttcaagtacagtatttttcttttggaacactttttaaaatgtatctgtttttaaggttattctaaattatagtagcctcaactcattctgtcaccagtagaattcagcagttaatatattccatattatttctttgaatcaattcattttcagagcactttaaagtctgatatttctcgatgtgcactgtgatgcctggaaccttcctctggaagtgctgattttatggactgaggactggtgactggtctgtgatagaagcaaattccaattccaaatgtaattagacaaaaatcatttttttagaatgtgtttttattgtaaaagtatctttttcagcttcctgttctattgtcttttttcagatacaacatttttgtctatggtgaactgctgtaaatgacgcagagaaatgcctaaaaaggacaggtggtttgactcatggatgatgatgatgtcactgtgccacttggacagggcgttttctctgaattgaagggaaagccaatggtgtttgtaaacaaatgcttctgagagcaaagaaaagtcttctgtgtgggaacacaagatagtaaacttatttaaaaacctattagtagaattagtggaaacacttaggttaaagtgaatcttgtccatataaattatattcatggccgggcgcggtggtcgcgcttgtggnnnnnnnnnnnnnnnnnnnnnnnnnnnnnnnnnnnnnnnnnnnntacacccttaaaagttattgaggaccccaaataacttgctcattgtggattgtatctatccatatttattgtattagaaattaagactgagaaaaagttataaaacacaagaatacagatgcacacgttccattagccatcaaggtgatctttctcccatgccagtagtctctggaaaattcctgagaggatgaaaataaaaaaatcacccat

SEQ ID NO: 350883 - DNA, 766 bp, Homo Sapiens
  misc_feature (281)..(299): n is a, c, g, or t
  misc_feature (306)..(559): n is a, c, g, or t
tcgagctcgcgaccacggttattgacactgattggcactccttttttcctttttccccaccattagatattgaaaaagtacttgtttctctgcagaaagcagaagactatatgagaacaacatccaacttcagtgggaaggtagcaccatgtatacttactatatattgtagtgatttatttgggattttcagaaattaaacgttcattaaaggatcattatatatacattttattttaatttggaaaattgtatctgtaatatgcttattccaggatagnnnnnnnnnnnnnnnnnnngagacannnnnnnnnnnnnnnnnnnnnnnnnnnnnnnnnnnnnnnnnnnnnnnnnnnnnnnnnnnnnnnnnnnnnnnnnnnnnnnnnnnnnnnnnnnnnnnnnnnnnnnnnnnnnnnnnnnnnnnnnnnnnnnnnnnnnnnnnnnnnnnnnnnnnnnnnnnnnnnnnnnnnnnnnnnnnnnnnnnnnnnnnnnnnnnnnnnnnnnnnnnnnnnnnnnnnnnnnnnnnnnnnnnnnnnnnnnnnnnnnnnnnnnnnnnnnnatgggccactgcacccggcccaggatagtgttttaaaagtttttgttggtttataagtttttttctgttccctatcttttatagaaagtacaatgtcaggttagtatcggctcttcagaaaagttgaggaatttacagttatttctttagtttcagatagagaagcacatttcatttgtcagccctttcaacatgtcgtgttacagc

SEQ ID NO: 350884 - DNA, 2564 bp, Homo Sapiens
  misc_feature (923)..(935): n is a, c, g, or t
aacctataaatgtggggcagaaatcaccctccatcaaacagttgcatatttactgtaaaagtattcccagtatgtgtgcagcatgaagaaagtattagtgcttctcagtgttctcagtgtaaattctatttatatacagcatattcacatactactttccttatattttatatagttctatgactgttgaaacatcaaggagttaaaaaaatcttaatatttcatgattaactctaagtactattaatagcttgcgaaatattagcaattttcccattatggactattctctctaaagcaagagagactagcattcccagacatcattctagggtctttaagctcattttgggtctgctaaagtttggggggaaatgttacgcaaagtgatactgtgtatgttgccattttgctttattcttctgttgaagcaaaattgtggggttttattatgtgtgtgtgcttttcctagatgtcccagttagctgtgctgagatatacctgtactatttatggcttaagctttgattcttaggtattttctccagctctgacattgttttccaaagacacactaaactgcattgcacagttcaaaatttgattacttaagggatcaatctaggtggtgttcttggtcttaaatttaacagcaaacacagcacatatctattatcactatattaattttcaaaggtttttctttgacgtttaaaactgtgacaacagatattcacatttgattatagaaacttaatgtctattaataattttagtacaaaatttcataaaccgtgtttttcaaaataagtttatgtcaaatccagcttcccagaaacactaataattaagtacatcaatgtactaaataaatcattcagttgcacccatggggaagattgtgttactgcccttcacagtgnnnnnnnnnnnnntctttcatttttaaaattaggagatgttacgtaacttggcactttagtagtgtatacactagcattagtttatacaccacttttgccgctggggaattcaagttgaaatgtccctcaatcatataggtctggaatacatctttcattcataatttctgctcagataattgaatagtttgccatcgagattattttcatttatactataaaacaaaagcaaactagtccagtttaattttttgtacttagaatattgcacattttctatatatgagttattcagattagtatctatgtaggttcagtcagatccaaccatggattcgaggtattatactgtataaccctacaaaatacatagaagtattatttgccttcataatagaacccaagagtctgtttcaatttatgaattcagtatttgcaccgagattttgattcccaaagtttggaaaaaaatgacaaaacaacgagggaagaaggaaccagaccttagtgccacatatttttctcttggggttgtaaggtagtctcctgctttccagaacactttattatatttcacttatagacctgattttctgtgtcaaagtataattctcatgctgaagctgtagcctaaaaagccaaaagaaagttgtcttcattgtacaaacatattcatcactttaacaataagggaacaaaatttagtattcaagctgagtgagaatactgtttcaatgagcatgtccctaagataaaccagaattggcagttaatttaggcgtctagaaaatctcagttcccaccagtaaaattatcctgagtagctaatgcaccttgagaaaaatctggcatactgaataaataacattaacttgggagccaagagctgggtaagccttacctttagactactctgtgactacagaaataaagccagcacttttggaactaataagccttcacttgtcagtatcataaagagtattgcccaactgaactttgctcccactggtttaatagttacttatttctgcctaagcactcaccttccgattttacccaagtatatatataggatagaaaaaaatgcattatatttgagagctacttcgcccaaattacaaaatgagtgtttttagattcaagtgacagtaaaaggatttgttcccttcagtgacttgagtgttttagttatgcataagtatttctagcaaaggaagggtagaaaggaattgaaaattaatttacactagttgctacttgggaataaagggctttttgaggggggtatggatattaaatgttttcgttatatacttatccctattaaaacaggcagttgtttctttgaatatgcctaaataacagtattcttaaaatctgacagacaagtaacatgtcaattacttgatattccttgtctccagtaccacaggccactcttgacatcccatgtttgcctggataaagttcctcatttcaaacagtatacatacttctttgcagttcattatagtaaggcttaacctgtaaacagtatctgatggcccacctataaataaaattcagcattctatttttaataatttgtatgccaccaatttgtattatttgtctcaataaatacttagtcatcaatga

SEQ ID NO: 350885 - DNA, 2392 bp, Homo Sapiens
  misc_feature (2318)..(2336): n is a, c, g, or t
ggcctgggtggcgaattcggcacgaggctccgggaatggtcccccctccactccacagaaaaccctcccctccctgctgtgcatgacgcgggctccctctgcacacagtgcacgaagacgctgtcgggagagcccaggattcaacacgggccttgagaaatgtggctcttgtacctcctggtgccggccctgttctgcagggcaggaggctccattcccatccctcagaagttatttggggaggtgacttcccctctgttccccaagccttaccccaacaactttgaaacaaccactgtgatcacagtccccacgggatacagggtgaagctcgtcttccagcagtttgacctggagccttctgaaggctgcttctatgattatgtcaagatctctgctgataagaaaagcctggggaggttctgtgggcaactgggttctccactgggcaaccccccgggaaagaaggaatttatgtcccaagggaacaagatgctgctgaccttccacacagacttctccaacgaggagaatgggaccatcatgttctacaagggcttcctggcctactaccaagctgtggaccttgatgaatgtgcttcccggagcaaatcaggggaggaggatccccagccccagtgccagcacctgtgtcacaactacgttggaggctacttctgttcctgccgtccaggctatgagcttcaggaagacaggcattcctgccaggctgagtgcagcagcgagctgtacacggaggcatcaggctacatctccagcctggagtaccctcggtcctacccccctgacctgcgctgcaactacagcatccgggtggagcggggcctcaccctgcacctcaagttcctggagccttttgatattgatgaccaccagcaagtacactgcccctatgaccagctacagatctatgccaacgggaagaacattggcgagttctgtgggaagcaaaggccccccgacctcgacaccagcagcaatgctgtggatctgctgttcttcacagatgagtcgggggacagccggggctggaagctgcgctacaccaccgagatcatcaagtgcccccagcccaagaccctagacgagttcaccatcatccagaacctgcagcctcagtaccagttccgtgactacttcattgctacctgcaagcaaggctaccagctcatagaggggaaccaggtgctgcattccttcacagctgtctgccaggatgatggcacgtggcatcgtgccatgcccagatgcaagatcaaggactgtgggcagccccgaaacctgcctaatggtgacttccgttacaccaccacaatgggagtgaacacctacaaggcccgtatccagtactactgccatgagccatattacaagatgcagaccagagctggcagcagggagtctgagcaaggggtgtacacctgcacagcacagggcatttggaagaatgaacagaagggagagaagattcctcggtgcttgccagtgtgtgggaagcccgtgaaccccgtggaacagaggcagcgcatcatcggagggcaaaaagccaagatgggcaacttcccctggcaggtgttcaccaacatccacgggcgcgggggcggggccctgctgggcgaccgctggatcctcacagctgcccacaccctgtatcccaaggaacacgaagcgcaaagcaacgcctctttggatgtgttcctgggccacacaaatgtggaagagctcatgaagctaggaaatcaccccatccgcagggtcagcgtccacccggactaccgtcaggatgagtcctacaattttgagggggacatcgccctgctggagctggaaaatagtgtcaccctgggtcccaacctcctccccatctgcctccctgacaacgataccttctacgacctgggcttgatgggctatgtcagtggcttcggggtcatggaggagaagattgctcatgacctcaggtttgtccgtctgcccgtagctaatccacaggcctgtgagaactggctccggggaaagaataggatggatgtgttctctcaaaacatgttctgtgctggacacccatctctaaagcaggacgcctgccagggggatagtgggggcgtttttgcagtaagggacccgaacactgatcgctgggtggccacgggcatcgtgtcctggggcatcgggtgcagcaggggctatggcttctacaccaaagtgctcaactacgtggactggatcaagaaagagatggaggaggaggactgagcccagaattcactaggttcgaatccagagagcagtgtggnnnnnnnnnnnnnnnnnnncaactgaccagttgttgataaccactaagagtctctattaaaattactgatgcaga

SEQ ID NO: 350886 - DNA, 474 bp, Homo Sapiens
  misc_feature (182)..(199): n is a, c, g, or t
ggggaccccgaacactgaatcgctgggtgcccacgggcatcgtgtccctggggcatcgggtgcagcaggggctatggcttctacacaaaagtgctcaactacgtggactggatcaagaaagagatggaggaggaggactgagcccagaattcactaggttcgaatccagagagcagtgtggnnnnnnnnnnnnnnnnnncaactgaccagttgttgataaccactaagagtctctattaaaattactgatgcagaaagaccgtgtgtgaaattctctttcctgtagtcccattgatgtactttacctgaaacaacccaaagggcccctttctttcttctgaggattgcagaggatatagttatcaatctctagttgtcactttcctcttccactttgataccattgggtcattgaatataactttttccaaataaagttttatgagaaatgccagtgtgcaaaatgaaaaaaaa

SEQ ID NO: 350887 - DNA, 2125 bp, Homo Sapiens
  misc_feature (1386)..(1399): n is a, c, g, or t
cccagagtcactctccatccttaccaatccccgagccatgcaggcattgctgcagatccagcagggactacagaccttgcagaccgaggcccctgggctggtacccagccttggctcctttgggatatcccggaccccagcaccctcagcaggcagcaacgcagggtctacgcccgaggcccccacttcctcaccagccacgccagccacatcttctccaacaggggcttccagcgcccagcagcaactcatgcagcagatgatccagcttttggctggaagtggaaactcacaggtgcagacgccagaagtgagatttcagcagcagctggagcagctcaactccatgggcttcatcaatcgtgaggctaacctgcaggccctgattgccacaggaggggacatcaacgcagctatcgagagactgctgggctcccagctctcctaatccctcggcccatgcctcctgcctctcccctccctcgatgtcagcattcggttcttctgtcaatccttaccctctgcagcttgtcctcccttccgtcttctccctcatcctttccaaacagcagggtgactttagaggcatgggctccaaccccttagctctgtctgagaattatggttttactgctacgtctctaacagactcttctctcctggtctccttgagcagtgctacttaaacagttttcacagtttcattgattgactctacctccttgccccacaccacttttgcaatctttaaactttcagtggctgtgcagagtcgagggaggaaccagctctctggtttactggaacatagtcttccatctataccactagggttttgtcttatgtttacttttggtaactctcttccttctttttctccctaccccccaacccctagcccaaccaatgctagaatttcttgctctgaaggaggagcaggtgaaacaggtggtaattttccttctcgggcccctattctggttcattcagcactttttggtgggaactgttggaaattccagggtaaggaggaagatgcctgttctccctgtctgaagagggagatgagacagctctctggacaggaattaacaaacgctggagcagcccagaggaaattcgtgtgaaagaggagggaatgagattattcggaggaagggaatgggggagacagcctgagtaaaaggcttggaagttggaattagcagtggggagcagaagcactcatagctcttttaggcagaagaatccaggcccgagctggcagaagagacttagagatgctaatggaatttaaactgaaaaaaggagcccaatgaagctaagcgccacgccccacaaggggtcatattggctttagttcctcaagcatatgtgcttatatgnnnnnnnnnnnnnntttccatggacccaggtcttgcttgtgtccccaggcaccagtagtttgagcccccctcaaaagacatgaagggggttggggtctgtgtgagtagtggggaggtgcatgtgtatccacatgtgtgcatacactcttaagttgggtgggaagtggattccttgttggtttctggttcagagtgctctcccaccaccagagacaagtgggtaaaaaggtcagtccattgcaggaatatatatccgggagagctaggtcccttggggctctggatgctgggtaacccagaggtaatgtgggtaccctttctgaagctgtcagggctgtgactagcacccttatcacccctcactgccttgtgggaatagtagagggtttttttcctccagaccccctggcctttcagttcttaactatttccctccaggccagaaagttttctttgaggaaggagaggagagggtggcaatgatgcctttgatctggaattggacatttctctgtcagagcacagaggaggctcatatcacctcttccctctcctacttggcccagctgcttggaggaccgaccccatggctgagaatatgacggcaagaggaacagagtttgctccaagtgggaaagggtcccaagcagtccagagaagatgtctgtgtggctttccctccctgcctcccccagctcccacactggcctttgtaaataaatggcgtggtctttgttgtg

SEQ ID NO: 350888 - DNA, 1231 bp, Homo Sapiens
  misc_feature (84)..(124): n is a, c, g, or t
tatcggcaggtataggcccggtggttaatcggcacgagggccagagcagctccgtcaacagcctagcagatgcctcagacaacnnnnnnnnnnnnnnnnnnnnnnnnnnnnnnnnnnnnnnnnnagaaggccctgaagcccgggagatggccatgatgcaggagggggagcacacagtcacctcgtcagagctccattatccaccggctgccgggctctgacaacctatatgatgacccctaccagccagagataacccccagccctctccagccgcctgcagccccagctcccacttccaccacctcttctgcccgccgccgggcctactgccgtaaccgagaccactttgccaccatccgaaccgcctccctggtcagccgtcagatccaggagcatgagcaggactctgcgctgcgggagcagctgagcggctataagcggatgcgacgacagcaccagaagcagctgctggccctggagtcacggctgaggggtgaacgggaggagcacagtgcacggctgcagcgggagcttgaggcgcagcgggctggctttggggcagaggcagaaaagctggcccggcggcaccaggccataggtgagaaggaggcacgagctgcccaggccgaggagcggaagttccagcagcacatccttgggcagcagaagaaggagctggctgccctgctggaggcacagaagcggacctacaaacttcgcaaggaacagctgaaggaggagctccaggagaaccccagcactcccaagcgggagaaggccgagtggctgctgcggcagaaggagcagctccagcagtgccaggcggaggaggaagcagggctgctgcggcggcagcgccagtactttgagctgcagtgtcgccagtacaagcgcaagatgttgctggctcggcacagcctggaccaggacctgctgcgggaggacctgaacaagaagcagacccagaaggacttggagtgtgcactgctgcttcggcagcacgaggccacgcgggagctggagctgcggcagctccaggccgtgcagcgcacgcgggctgagctcacccgcctgcagcaccagacggagctgggcaaccagctggagtacaacaagcggcgtgagcaagagttgcggcagaagcatgcggcccaggttcgccagcagcccaagagcctcaaaaaaaagacaaacacaaataaaatatctgagcggaaatatgcctttg

SEQ ID NO: 350889 - DNA, 997 bp, Homo Sapiens
accctccactctggctgccagcaatggaaaccagcagcagcagcaggagggcaaggagtccagaggagacccccactgcaaaggagagcccggccaggagccaatgggacaggagtccagggagctgactgcaggcagggcctcagtgtgttggaggcgcttcaggagcgatgtcgggggaaggacaaccatctccaggatccctaggggtcccaatcggagccccctcttcctcttcttcctcctcgctcagggacgggagtcagtgctgggccctggacccagccaagctcaactcctcatccagaagactctcatcctccttcccccacaagctccatgtcccagcctcctcctggccaacaatgctcctctcctggggtacaagggagggcaccctaagctcctctatctcctcaggcagaccccaaacttcctcatcaaccaggctcccatgtttttgtggactgggactaggggctcctgattcttcccccagaatcctctgctgcttgggctccaaagtggccccttcctttcccagaatccttctctctccaactgcttcctcctcctcgccaagcattctttggtccaggactgcctcctggccaggtgagcagggctgctgttctataggggtgcctgtgttgggtgggcccagagccccaggaatggggagtggaaggcccggggggcgactggcctgcacgtactttgaggctcttgggctgctggcgaacctgggccgcatgcttctgccgcaactcttgctcacagccgcttgttgtactccagctggttgcccagctccgtctggtgctgcaggcgggtgagctcagcccgcgtgcgctgcacggcctggagctgccgcagctccagctcccgcgtggcctcgtgctgccgagcgcagtgccgctccagtccttctgggtctcgcttcttgttcggtcctcccgcgccgcttctgtcccggcgcgcggtcgcgttcccgtga

SEQ ID NO: 350890 - DNA, 1415 bp, Homo Sapiens
  misc_feature (164)..(176): n is a, c, g, or t
  misc_feature (280)..(296): n is a, c, g, or t
ctcacccttaaaattctcctgtaactcaactaacaaaatcaagcctgattcaaaacatcctagggtgttttaaacacaccatctggtgccaaatgaagatttttaggagtgattactaattatcaagggcacagttgtggtactgtcattgataataatatagnnnnnnnnnnnnncctaattttgacctgtttcaccagtgttttacccttgactgccccttctatgctgcttccaaaagtgatagtgtgtgtaagatttttaccttcctttctaaagnnnnnnnnnnnnnnnnnaagtgagtcctgttcttcctatttctttcagcagaaatgaaatcccaggtaagtataagtattcaagtatttgatcagtaagtcacagttatctccagtgcattaaataaccttcatcaagaaataggttataggtaaaatctctgaaggatcatctatgtattcaagtaattattttttagataataactgtcttctggacttggtcttgaagtctgtacagattcagcctcagtagtagcgaactgcactgctgtttggtttggagtacaaattagacttatagtcctcctggaacttgagttattaaaatcataggaataaaattatgggatctcaacaaagggtcgagggtttgaggcttaaacaagccaacatatgaatatatgttttgtctcgctatactgcacttacgctatccagttgcaggtaattttttgtctgctagtagtgttctagattatgtctttccaaagcgctgaggctgtgcacctattctgtagttgcagctgatgcctgaatgtatcctagctgacaaattattgattaataagaacttgaatttctggaagattcttactgttaaccaaattttgagcaaggagtctcaaaggtaattctgaaccagaattacatgttaatgaacagtgtaccttttaacagtgtaaatcacggaatatccgtgaagggatttcttaatttattttttaccggttgattgaaatatcagttaaaggttgccagcatggttgcagataaactgatgtttgaaattcgctgaaatacttaatgtggaataggataatatacttccaatgccctcaaggctgtgaccttacagccattttacatagcacatcattcctcctatagggatgaactttttcctggcacgaaaagtagccgctctggttgaagctttgcttattgtaacaggcttttatttccaggtaatatgtcttggaagacttaattctgattagagatatagatattactggaaactaattgttttttttctattgtactctgctttatcaaagaagtaaaacatttaaatcgtactacagaaattaagatgttgtcttgcgatccttaataaatgaatgatttcccttt

SEQ ID NO: 350891 - DNA, 812 bp, Homo Sapiens
  misc_feature (533)..(533): n is a, c, g, or t
  misc_feature (714)..(714): n is a, c, g, or t
gggaaagttcgtggcaaagtctggaagcaaagaatatctagccctctgttcaacaccaaacaatacacaatggaactagagcggctctatctacagatgtgggagcattatgcagctggcaacaaacctgaccacatgattaagcctgttgaagtcactgagtcagcataaataaagactgcacaggagaattacccctatacctgagcctcaaccttctgggggaaagggaactagataacatacttcttacttgtctgtacagtaccttgttgcagatgggtgatatataatggtaatagaatagcacagccagacttgcttcctgcatggtagggagagacacaaaagatgggaaactgcttttccacaaggaatctccgtagaattttgcggcgaccagatggtgcataggtctggaaggtctgatctcccttggtcttccatgggatggttagtgtggaggggagatatagattgtccggccgctttgtgattccatgggattgattcagtcttctggattttttttnctttatattttgggtactggagcttttaaaaatgtttggtttcaggtatttttattcatgtgaagtgtatatgattctcttgagataaggttttaagctaaaatgttactccctgttagtttctgaactctgacagattgacagggactttgctggtgtagtcttttttataggttttatnaaccacttgaagcctatatcagtcgtttttaggggcctgaccataaattttgggagctatcaaatgcttttgtttgatttaaaatgaaggaactcaag

SEQ ID NO: 350892 - DNA, 1169 bp, Homo Sapiens
  misc_feature (27)..(27): n is a, c, g, or t
  misc_feature (51)..(51): n is a, c, g, or t
  misc_feature (99)..(111): n is a, c, g, or t
  misc_feature (117)..(117): n is a, c, g, or t
  misc_feature (606)..(606): n is a, c, g, or t
  misc_feature (1048)..(1084): n is a, c, g, or t
ggagggtaaaaacccttacacacactnccacttttggaagccagcttaganggggcagtccaagggtaaaacactggtgaaacaggtccaaaattaggnnnnnnnnnnnnnctatanttatttatccaatggaccagtaccccacaactgtgccccttgataattagtaatcactcctaaaaatcttcatttggcaccagatggtgtgtttaaaacaccctaggatgttttgaatcaggcttgattttgttagttgagttacaggagaattttaagggtgagggtatgggggtcagggaagaaaaggaaatgggaaatggaccagaaaaaatcttgagtcatcatctaaatcaacaaagcactgatagctccaaatattaggtcagacactaaaacgactgatataggctcaagtggtttataaaacctataaaaagactacaccagcaaagtccctgtcaatctgtcagagttcagaaactaaaacagggagtaacattttagcttaaaaccttatctcaagagaatcatatacacttcacatgaataaaaatacctgaaaccaaacatttttaaaagctccagtacccaaaatataaagaaaanaaaatccagaagactgaatcaatccatggaatcacaaagcggccggacaatctatatctcccctccacactaaccatcccatggaagaccaagggagatcagaccttccagacctatgcaccatctggtcgccgcaaaattctacggagatcccttgtggaaaagcagtttcccatcttttgtgtctctccctaccatgcaggaagcaagtctggctgtgctattctattaccattatatatcacccatctgcaacaaggtactgtacagacaagtaagaagtatgttatctagttccctttcccccagaaggttgaggctcaggtataggggtaattctcctgtgcagtctttatttatgctgactcagtgacttcaacaggcttaatcatgtggtcaggccgctctcgacgaattcgagctcggccgatttggcctgatnnnnnnnnnnnnnnnnnnnnnnnnnnnnnnnnnnnnncgccgccaccgcgtgtaactccagtggcgcctcatatgagtgtatacctgccttttggcggggggggtgcgcgccgtcttttttc

SEQ ID NO: 350893 - DNA, 314 bp, Homo Sapiens
tttatcaaaaacaaattattatatgtagcttttctacagtgctttgctaaaccatgtagtactagttaagtcttccttgaaaataaagatacactcttataggggacagttcctgttcactcccaggaaacttttttaaaagatgacactgaatgtttattgcactttagtgcagtgaagtggcaataaaacctaacatgaatcaaggttgtttatggcagatgcatgtgttgctttacagagtttagcaaaagctcttaattttatgtcatactgtattctactgaataataaagctaacattattcaataat

SEQ ID NO: 350894 - DNA, 1123 bp, Homo Sapiens
ggaactgaggcagtactatacggtactaaggtagcgaggcctgggtggcgaattcggcacgaagcgagcgtgtggcgattgcttctgtctgttatttagatatggaagctgaggggatgcacagaggcagccagaacctaggtcagggtctcgctcggtgctgaccgcccccggggtcgagtaggcgatgggggagcccggcttcttcgtcacaggagaccgcgccggtggccggagctggtgcctgcggcgggtggggatgagcgccgggtggctgctgctggaagatgggtgcgaggtgactgtaggacgaggatttggtgtcacataccaactggtatcaaaaatctgccccctgatgatttctcgaaaccactgtgttttgaagcagaatcctgagggccaatggacaattatggacaacaagagtctaaatggtgtttggctgaacagagcgcgtctggaacctttaagggtctattccattcatcagggagactacatccaacttggagtgcctctggaaaataaggagaatgcggagtatgaatatgaagttactgaagaagactgggagacaatatatccttgtctttccccaaagaatgaccaaatgatagaaaaaaataaggaattgagaactaaaaggaaattcagtttggatgaattagcaggtcctggagctgaaggcccctcaaatttgaaatccaaaataaataaagtgtcttgtgaatctggtcagccagtgaaatcacaggggaaaggtgaagtggccagtacaccctctgacaatttggatcctaagttgactgcccttgagccaagtaagaccacaggggctcccatttaccctggcttcccacaaagtcacagaggttcatcatgagcagaaagcccacaactcttcagcatctcagaaaaactaaccaaaatggttaagggtgaccatgttccaggaattctggaggctcaaaataccggatggcaggaaaaacctgaagcccgctttttggattgtggaaaaacccagaaccccaaagggggaactccccagaaaagttgggggcccaattgggaaacccaggaacctttccgggactttttaccgtcccccccattttgg

SEQ ID NO: 350895 - DNA, 945 bp, Homo Sapiens
  misc_feature (165)..(174): n is a, c, g, or t
gcgggactcgggcttagggcctgctgtggaggcagcggcggacgccgagctaagcagtttctctggaaacccccctggtaagtgtggaggaggcgggacactctgacccaagacgaaaggcctgtagctccagccaaagaaaataaaccttaggagggagaaggnnnnnnnnnntccatcagctgttcctgagaacagcctgcattggaatctacagagaggacaactaatgtgagtgaggaagtgactgtatgtggactgtggagaaagtaagtcacgtgggcccttgaggacctggactgggttaggaacagttgtactttcagaggtgaggtgtcgagaagggaaagtgaatgtggtctggagtgtgtccttggccttggctccacagggtgtgctttcctctggggccgtcagggagctcatcccttgtgttctgccagggtcgggtacggggtttgacactgaggagggtaacctgctggctggagcggcagagcagtggccttgatttgtcttttggaagattttaaaaaccaaaaagcataaacattctggtccttcagcaatgctttctctgaagaaatacttaacggaaggacttctccagttcaccattctgctgagtttgattgggggtacgggtggacgtggatacttacctgacctcacagcttcccccactccgggagatcatcctggggcccagttctgcctatactcagacccagttccacaacctgaggaataccttggatggctatggtatccaccccaagagcatagacctggacaattacttcactgcccggcggctcctcagtcaggtgagggccctggacaggttccaggtgccaaccactgaggtaagtgcctcggctggttcaccgagacccagaggggtctgtctcttaggcagtcagcccaactcagctcgccctcgag

SEQ ID NO: 350896 - DNA, 893 bp, Homo Sapiens
tgggccatgagcgccacccgtccctcacacctgggctgctttctccagggttcgccaccgaggggaacttcggggtaaccggtttccgctcgccaactacccaagatggcggccacgagcggtcgccaaccacaagaaaccacatgccttcgtggtcccggcctcagcattcttcgggtctcactagacttttgcaagtcactgtgggtacccttcaaggcgaggctgttccgcaactccggcggcgatacaccgtcctagttgcctgacctaggccgtcagtcccccgccaacagaaagcgctggaagcgcccaacctggatacttcacccaacgcccaagcccactaacatcgcccgccgcgaaggcgcggccgaggggcccagaatgccagacactagggccttcgccctcctcattgctgggtccataccgcggggcgggcctaggtactcattgggccgggaattatgtcagtcttgggaaatcaggtccggggatgaggaggtacactcagccattgggccctctctgctgccaatcagagggacatccgtcgacggccccggcctcggctcgttgattggagaaactgttcctagggtgtttgcggcgggcgggtttccgagtgcggtagcaggagggggcggggaggtaagcggaggctccgagctctaggccggccggcggtggcggcggcgaggccgggactcgggcttagggcctgctgtggaggcagcggcggacgccgagctaagcagtgggtatcgggcacattcctgttcccagaagggagggttgcagcgccgcggggccgaggcttatggggcgacgggatggtgctgaggtgcaggaggcgggggccgagcggggttcccgccagagcccggccc

SEQ ID NO: 350897 - DNA, 192 bp, Homo Sapiens
agcacttgttcgctggccgcccctggaggctagaagctccggcgccgagagtgggcatggcgacttggtctcagccggactcgggtttctctggaaacccccctggtaagtgtggaggaggcgggacactctgacccaagacgaaaggcctgtagctccagccaaagaaaataaaccttaggagggagaagg

SEQ ID NO: 350898 - DNA, 1884 bp, Homo Sapiens
ctgggcatctggggataccccagcgcctgggcccggcgccggcctgctgatgccaggcgagctgagctggggatgctggaacgaagggcgttgctatggcaacgggaggcagggcctggttggggggaccgggcccgggctgtgaccgggggggccggcggtggctgtggtggggcgatggcggagcgcggcccggccttctgcggcctgtacgacacgtcctcgctgctgcgatactgcaacgatgacaatttgtcgggcacgagcggtatggaagtggacgaccgcgtgtcggcgctggagcagcggctgcagttacaggaagacgagctggcggtcctaaaggcggcgctggcggatgctctgcgtcgcctgcgggcatgcgaagaacagggagcggcgctacgctgcgcggggcacccccaagggccgggcgcctccgcgcttaggcaccactgcctcggtgtgtcagctcttgaaaggccttcccaccaggactgccccttaatggcctcgggacccccgcggcgcgtgggtggctatgccacgtccccatcctctcccaagaaggaggcgacctccgggcgcagtgtccgccgctacttgtcacccagagcgcctcgcctcggtgcgccgtgaggacccccgcagccggaccacaccctccagcagcaactgtagcgccaaaaaggaaaggcaaaaccaaagaagttatcttcagtgtggcttggccatccacccagatatggtcaccatcgccacgggacaggtggcggggaaccactaaagaagggaagccgctgccgccccacgtgcggcatctgggactcagtttcccctctccaccttacacgtgctgggcttgggggtgtttgacagagccgtgtgctgtgtgggcttctccaaatctaatggaggcaacctgctgtgtgcagtggatgaatccaatgatcacatgctctcggtgtgggactgggccaaggagaccaaggtggtggatgtcaagtgctccaatgaggctgtattggtggccaccttccaccccacggaccccactgtgcttatcacctgcgggaaatctcacatctacttctggaccttggaggggggcagcttgagcaagcggcaaggcctctttgagaaacatgagaaaccgaagtatgtgctgtgtgtgacctttttggaaggtggcgacgtggtcacgggggactctggggggaacctctatgtttggggcaaaggtgggaaccgtatcacacaggcggtgctgggcgcccacgacggcggcgtgtttgggctctgcgccctgcgggacgggacgctggtgtctggagggggccgtgatcggcggctggtcctctggggttctgactacagcaagctgcaggaagtggaggtccctgaggactttggccctgtgcgcaccgtggcagagggccacggagacacactgtacgtggggaccacccgcaattccatcctgcagggctccgtgcacacaggcttctcactgctggtccagggcccatgtggaagagctgtggggcctggccacacaccccagtcgggcccagtttgtgacctgcgggcaggataagctggtgcatctatggagctcagattcccaccagcccctgtggagcaggatcatcgaggaccctgcccgctcagccggcttccaccccagtggctctgtcctggctgtgggtacagtgactggcagatggctgctgctggacacggagacccatgacctggtggctatccacacagacggcaatgaacagatctcagtggtcagcttctccccagacggggcgtaccctggccgtgggctcccacgacaacttggtgtacgtgtacacggtggaccagggcggccgc

SEQ ID NO: 350899 - DNA, 1094 bp, Homo Sapiens
  misc_feature (998)..(1048): n is a, c, g, or t
aattcttgggatggggccggcggtggctgtggtggggcgatggcggagcgcggcccggccttctgcggcctgtacgacacgtcctcgctgctgcgatactgcaacgatgacaatttgtcgggcacgagcggtatggaagtggacgaccgcgtgtcggcgctggagcagcggctgcagttacaggaagacgagctggcggtcctaaaggcggcgctggcggatgctctgcgtcgcctgcgggcatgcgaagaacagggagcggcgctacgcgcgcggggcacccccaagggccgggcgcctccgcgcttaggcaccactgcctcggtgtgtcagctcttgaaaggccttcccaccaggacgccccttaatggctcgggacccccgcggcgcgtgggtggctatgccacgtccccatcctctcccaagaaggaggcgacctccgggcgcagcagtgtccgccgctacttgtcaccagagcgcctcgcctcggtgcgccgtgaggacccccgcagccggaccacatcctccagcagcaactgtagcgccaaaaaggaaggcaaaaccaaagaagttatcttcagtgtggaggatggctccgtgaaaatgttcctgaggggccgccctgtgcccatgatgatcccagacgagctggcacccacctacagcctggacacacgctcggagctgccttcttgccggctcaagctggagtgggtctatggctaccgtggccgagactgccgggccaacctttatttgctgcccaccgggggagatagtgtacttttgtgccctccgtagccgtgctatacagcggtggaggagcaaaggcagcgacactacctggggacacaacgatgacatcaaatgcttggccatcccacccagatatggtcaccatcgccaccggaaaaggtgggcgggaaccactaaaggagggaaacccgctgccgccccacgtgcgcattctgggactcagtttccctctccacctacannnnnnnnnnnnnnnnnnnnnnnnnnnnnnnnnnnnnnnnnnnnnnnnnnnctttctccaatcttatgaagggaccctgctgggtgcacaaggatga

SEQ ID NO: 350900 - DNA, 1511 bp, Homo Sapiens
  misc_feature (84)..(123): n is a, c, g, or t
  misc_feature (135)..(400): n is a, c, g, or t
  misc_feature (496)..(526): n is a, c, g, or t
  misc_feature (528)..(637): n is a, c, g, or t
  misc_feature (660)..(786): n is a, c, g, or t
  misc_feature (1054)..(1078): n is a, c, g, or t
gggtccggaattcccgggatggtatttttcactggcccaaagtattgcattcccttaacagcaagcacaagttctctatatcannnnnnnnnnnnnnnnnnnnnnnnnnnnnnnnnnnnnnnnagacggagtctnnnnnnnnnnnnnnnnnnnnnnnnnnnnnnnnnnnnnnnnnnnnnnnnnnnnnnnnnnnnnnnnnnnnnnnnnnnnnnnnnnnnnnnnnnnnnnnnnnnnnnnnnnnnnnnnnnnnnnnnnnnnnnnnnnnnnnnnnnnnnnnnnnnnnnnnnnnnnnnnnnnnnnnnnnnnnnnnnnnnnnnnnnnnnnnnnnnnnnnnnnnnnnnnnnnnnnnnnnnnnnnnnnnnnnnnnnnnnnnnnnnnnnnnnnnnnnnnnnnnnnnnnnctatcccacttggattttgactgaaggggaagtgtagaaatatattgatttgtgatttctggtgtcacctgtgttaccaaaaatcaaaacaaatcnnnnnnnnnnnnnnnnnnnnnnnnnnnnnnngnnnnnnnnnnnnnnnnnnnnnnnnnnnnnnnnnnnnnnnnnnnnnnnnnnnnnnnnnnnnnnnnnnnnnnnnnnnnnnnnnnnnnnnnnnnnnnnnnnnnnnnnnnnnnntgggtcctacaggcgcacacgannnnnnnnnnnnnnnnnnnnnnnnnnnnnnnnnnnnnnnnnnnnnnnnnnnnnnnnnnnnnnnnnnnnnnnnnnnnnnnnnnnnnnnnnnnnnnnnnnnnnnnnnnnnnnnnnnnnnnnnnnnnnnntgagctaccactcacggcccaaatcttcttgatcatatgtttaaatatattttttaatatttggagcatgagttgtcacttcttgtttgccttttttataaggaaatgttggagagttacatcattgctaatgtagaaatgttaagtggaaaaatatacagtttggtaaaataaactagattctacatttatttgtgggtttttttcccctcctttctttccacagcacttttgatatcaagcaagtggcttcctttttgagatattnnnnnnnnnnnnnnnnnnnnnnnnngtaaatgaagcccaactacctaaccctttcttatttgtatttgttttagtattgtgaagttgtgttaaatagtactagctagaaatacaaatttctggttatcatttctcttccctgtggcacttgacattttaattgtcttaaagtttttgaagtacatcttctggccccttgagtactgccagaggcaaaagatgtttgtttcttattcattccacttttgtctcctgggatcccttctgtagcctaaagtatggctgggaaatggacttgagaagattggcttgaattagatcataatcatgtgtgatcccatcatgaattcattggaatttgtgttgcatgtaaggcaatctttcctgttgtaaatcttccttttttaatgtacatatattttgaaaaatatgaataaacatgaaattttaaaagctgc

SEQ ID NO: 350901 - DNA, 902 bp, Homo Sapiens
  misc_feature (711)..(711): n is a, c, g, or t
actggttgaatccggaagtgaccctagagaaacgagttgtggctgaggaccccggcggcagacgcaggttcgggaccatgagctggattccttttaagattgggcagcccaagaaacagattgtgcccaaaacagtggagagagactttgaaagggagtatggaaaacttcagcaccatgtcaaaatctgccgtgaagatatccttggacttactctccaatcccctctgtgagcaagaccaggaccttctgaacatggtgacggccctggacacggccatgaagcggatggatgccttcaatcaggaaaaggtgaaccagatccagaagactgtgatcgagcccttaaaaaagttcggcagtgtcttcccgagcctcaacatggctgtgaagaggcgggaacaggccttgcaggactacaggaggctgcaggccaaggtggagaagtatgaggaaaaggagaagacggggccagtgctggccaagctccaccaggcacgagaggagctgcggcctgtgcgggaggactttgaagccaagaacaggcagctgctggaggagatgccgcgcttctacggcagccgcctcgactacttccagcccagctttgagtccctcatccgagctcaggttgtgtactactcggaaatgcacaagatctttggagacctgtcccatcagcttgaccagccaggccactccgatgagcancggggagcgggagaacgaagccaaactcagtgagctccgggccctctccattgtgggcgatgactgaatccccgtccactcttggaggactccctgtgacgtgggtcagccctcattcatccttggcccttctcagggctagctgcctcttctcacaagctggggggaacgaagggtggcccctgggttca

SEQ ID NO: 350902 - DNA, 1552 bp, Homo Sapiens
agcggggttgaatccggaagtgaccctagagaaacgagttgtggctgaggaccccggcggcagacgcaggttcgggaccatgagctggattccttttaagattgggcagcccaagaaacagattgtgcccaaaacagtggagagagactttgaaagggagtatggaaaacttcagcagctggaagagcagacccggaggctgcagaaagacatgaagaagagcaccgacgcagacctggccatgtcaaaatctgccgtgaagatatccttggacttactctccaatcccctctgtgagcaagaccaggaccttctgaacatggtgacggccctggacacggccatgaagcggatggatgccttcaatcaggaaaaggtgaaccagatccagaagactgtgatcgagcccttaaaaaagttcggcagtgtcttcccgagcctcaacatggctgtgaagaggcgggaacaggccttgcaggactacaggaggctgcaggccaaggtggagaagtatgaggaaaaggagaagacggggccagtgctggccaagctccaccaggcacgagaggagctgcggcctgtgcgggaggactttgaagccaagaacaggcagctgctggaggagatgccgcgcttctacggcagccgcctcgactacttccagcccagctttgagtccctcatccgagctcaggttgtgtactactcggaaatgcacaagatctttggagacctgtcccatcagcttgaccagccaggccactccgatgagcagcgggagcgggagaacgaggccaaactcagtgagctccgggccctctccattgtggccgatgactgaatccccgtcactcttggaggactcctgtgacgtggtcagcctcattcatccttgcccttctcagggctagctgctcctctcacaggctggggacagaggtggccctggttcacttgccgggccctttgcaatgaatgactcttcctgagcctggcaccaggagccctaggcaggccgccgtctccccactcacagccccagcaggtaagcagtgtagacaaacccttggggcttttttatttggagaaccgtccagcatgcatcctggcccacggcctgagcaagctgcagcccttctgaggccatgggcttcgttggctaagttgggggtcttagccttgcatgcgttgtgggcatcaaatctacctccaaaagacccatcctggggagccctctggcccctcgttgccttttcacttcaaaacctcttttttctgggagaggccctgaaccctgtgcgggagagctggtcctccagccctggcaggccctcagccagcttcccagcaagacaaagggcacccttgtggctttgggacctaagtggttggggttcccgaggtcactgaggactggtacctcgggaacgcaagctgtcagtggaactgtcccacaagaattcacaggtctcaaagcaggaacagtgggtttgtgtctcacctgagtatctggaattttattttttcaagtaaaattttcaatgaaacgtcc

SEQ ID NO: 350903 - DNA, 348 bp, Homo Sapiens
  misc_feature (167)..(167): n is a, c, g, or t
  misc_feature (253)..(253): n is a, c, g, or t
ccctagagaaacgagttgtggctgaggaccccggcggcagacgcaggttcgggaccatgagctgccatgtcaaaatctgccgtgaagatatccttggacttactctccaatcccctctgtgagcaagaccaggaccttctgaacatggtgacggccctggacacggncatgaagcggatggatgccttcaatcaggaaaaggtgaaccagatccagaagactgtgatcgagcccttaaaaaagttcggcagtntcttcccgagcctcaacatggctgtgaagaggcgggaacaggccttgcaggactacaggaggctgcaggccaaggtggagaagtatgaggaaaag

SEQ ID NO: 350904 - DNA, 816 bp, Homo Sapiens
  misc_feature (74)..(74): n is a, c, g, or t
  misc_feature (155)..(155): n is a, c, g, or t
ccagttcgatgctgtcgtcgctgtccactgaactgctgtcatcagacagggagccggggctgggagctgggccntgggactccctggggaatggattcccttcgggggcagaggcggaggcgggtctcctcacccggaaggccagggccgcgtcntggctcgcggcaccctcctgcctcatcctctctgccgtgctgccaaagacactggggggtttcttcccaggaccctcgccactgtctctcttggacttggagaggcagctcttcagcactggcgggcccctgtctttccagtctctccggagcccgcccagctgctccaagaagtgcgtctgggctgtgctgaacctgaccttcttcctgcacgcagccctgggctccctgcacctcttcttgagctttcgcttggaccttaacaagtccttgatggctgtgtccaggtcctcgtcactgtccagggagctgcttttgtcttcagagctctctttctcgtctaggcgccttgcctcgcctgtcttaccctggccctgtgacatgcgagtgtcgccagggcccctggcggtgccctcccctcccagggcctcactggctttgccctgtatgggcagatctcgcctctcatggccggtctcagctctcccctggctgcgggcggcatcctggctaccgtctctcaccacctcctgcattttcttgggcgtgaatggcctgacatggccaccacctctacgcttccttttgcagcccagcagtgggtctgacgtgttacagagaggggacttgtgtccgacgctctggctgtagatgacagaac

SEQ ID NO: 350905 - DNA, 2736 bp, Homo Sapiens
aaatgagtggggcggtgaggggaaggaggagggaagtaggacttcaacatggcggctgcggcactggcggtggctacggtgacggcctggcccggagcgggcagagttggaggtggtggcgttcgctctccctaggggctgtcgggagctcagcggggaccgagcctgggaggccggccggtgccagcacctttcggcttctgagacggcggcagcagcggcattcaggttctaaatggcttctaagaagttgggtgcagattttcatgggactttcagttaccttgatgatgtcccatttaagacaggagacaaattcaaaacaccagctaaagttggtctacctattggcttctccttgcctgattgtttgcaggttgtcagagaagtacagtatgacttctctttggaaaagaaaaccattgagtgggctgaagagattaagaaaatcgaagaagccgagcgggaagcagagtgcaaaattgcggaagcagaagctaaagtgaattctaagagtggcccagagggcgatagcaaaatgagcttctccaagactcacagtacagccacaatgccacctcctattaaccccatcctcgccagcttgcagcacaacagcatcctcacaccaactcgggtcagcagtagtgccacgaaacagaaagttctcagcccacctcacataaaggcggatttcaatcttgctgactttgagtgtgaagaagacccatttgataatctggagttaaaaactattgatgagaaggaagagctgagaaatattctggtaggaaccactggacccattatggctcagttattggacaataacttgcccaggggaggctctgggtctgtgttacaggatgaggaggtcctggcatccttggaacgggcaaccctagatttcaagcctcttcataaacccaatggctttataaccttaccacagttgggcaactgtgaaaagatgtcactgtcttccaaagtgtccctcccccctatacctgcagtaagcaatatcaaatccctgtctttccccaaacttgactctgatgacagcaatcagaagacagccaagctggcgagcactttccatagcacatcctgcctccgcaatggcacgttccagaattccctaaagccttccacccaaagcagtgccagtgagctcaatgggcatcacactcttgggctttcagctttgaacttggacagtggcacagagatgccagccctgacatcctcccagatgccttccctctctgttttgtctgtgtgcacagaggaatcatcacctccaaatactggtcccacggtcacccctcctaatttctcagtgtcacaagtgcccaacatgcccagctgtccccaggcctattctgaactgcagatgctgtcccccagcgagcggcagtgtgtggagacggtggtcaacatgggctactcgtacgagtgtgtcctcagagccatgaagaagaaaggagagaatattgagcagattctcgactatctctttgcacatggacagctttgtgagaagggcttcgaccctcttttagtggaagaggctctggaaatgcaccagtgttcagaagaaaagatgatggagtttcttcagttaatgagcaaatttaaggagatgggctttgagctgaaagacattaaggaagttttgctattacacaacaatgaccaggacaatgctttggaagacctcatggctcgggcaggagccagctgagaccaggccctgcctaggccctgccgcagaaccaccatccctgggaggccctgcagagcccacctgtggggaaagagaaggggcagcttccggattttcttttgggggttagaaggtcaggtgtggagactgctcgccagtctctgtgagcctaggccctgagctggggaggtggggaagattcgggcatgtgagtgcccccagaactgtcctggctccttccgtattaaacgcatttgcattttgagaagtgtccttcccacttcagccctccggagagactaccctagtctttctggggtgtttatgtcctcagctgaaagcctggcctaattgctgagaggggctggggagatggggcgggagggccagactcagtgctgctgtggagctaggtgcttccccccttcccctcagactggtggactgaactccagtcaagttgagttcaagtgaaagattcttccagggttttattttttcccctcctaacaaagtctcatagtgttaacactggttctgcaatatctctgaggtgcaaagaatgcacttttccctatggggcccagagtttgccttttctgccaggcagtcaccacgcttccctaccccagcctgtttcttttggcttggtttggaccacagtcctctgctacccagggttttagagcccctgctctaggaaacagtttaagaaatcattggccccttcccagcacattgaatgggtaagcagacaggccatgatttagttggccagcactaactccacctctgttctccttgaacagcttcccctccagcccactgctttaggatgacacaatgaataacacctagtcatagaaatcagtctctctggtttgttttgtattatgttgtacatcattaaagatctaaatacaaaggatatacagtcttgaatctaaaataatttgctaactattttgattcttcagagagaactactaataaaaatctaaaaggtaaaa

SEQ ID NO: 350906 - DNA, 697 bp, Homo Sapiens
gggctggctgaaaagagcgaccgctgctcggcctgctgatgccacagaccaggcaacctcccatcccacccccgacccctggcctgggcgagcccctccttctcccctgccggtgcacaggcttctgcctgctggggattactcgatcaaaaccttccttcccgggctacttcccttcctcccggggccttccttttgaggagctggaggggtggggagctagaggccactctatgccagtgctcaaggttactgggagtgtgggctgcccttgttgcctgcacccttccctcttccctctccctctctctgggaccactgggtacaagagatgggatgctccgacagcgtctccaattatgaaactaatcttaaccctgtgctgtcagataccctgtttctggagtcacatcagtgaggagggatgtgggtaagaggagcagagggcaggggtgctgtggacatgtgggtggagaagggagggtggccagcactagtaaaggaggaatagtgcttgctggccacaaggaaaaggaggaggtgtctggggtgagggagttagggagagagaagcaggcagataagttggagcaggggttggtcaaggccacctctgcctctagtccccaaggcctctctctgcctgaaatgttacacattaaacaggattttacagtaaatgaagaggtggcttgtg

SEQ ID NO: 350907 - DNA, 1113 bp, Homo Sapiens
  misc_feature (979)..(979): n is a, c, g, or t
  misc_feature (1063)..(1063): n is a, c, g, or t
  misc_feature (1090)..(1090): n is a, c, g, or t
agtgtgctcaggagtcgtctcaaaagcaagatggtacaattcagaacctcaaggaaactctgaaaagcagggaacatgagactgaggagttgtaccaggtaattgaaggtcaaaatgacacaatggcaaagcttcgagaaatgctgcaccaaagccagcttggacaacttcacagctcagagggtacttctccagctcagcaacaggtagctctgcttgatcttcagagtgctttattctgcagccaacttgaaatacagaagctccagagggtggtacgacagaaagagcgccaactggctgatgccaaacaatgtgtgcaatttgtagaggctgcagcacacgagagtgaacagcagaaagaggcttcttggaaacataaccaggaattgcgaaaagccttgcagcagctacaagaagaattgcagaataagagccaacagcttcgtgcctgggaggctgaaaaatacaatgagattcgaacccaggaacaaaacatccagcacctaaaccatagtctgagtcacaaggagcagttgcttcaggaatttcgggagctcctacagtatcgagataactcagacaaaacccttgaagcaaatgaaatgttgcttgagaaacttcgccagcgaatacatgataaagctgttgctctggagcgggctatagatgaaaaattctctgctctagaagagaaagaaaaagaactgcgccagcttcgtcttgctgtgagagagcgagatcatgacttagagagactgcgcgatgtcctctcctccaatgaagctactatgcaaagtatggagagtctcctgagggccaaaggcctggaagtggaacagttatctactacctgtcaaaacctccagtggctgaaagaagaaatggaaaccaaatttagccgttggcagaaggaacaagagagtatcattcagcagttacagacgtctcttcatgataggaacaaagaagtggaggntcttagtgcaacactgctctgcaaacttggaccagggcagagtgagatagcagaggagctgtgccagcgtctacagcgaaaggnaaggatgctgcaggaccttctaagtgntcgaaattaaacaagtgcttgga

SEQ ID NO: 350908 - DNA, 1780 bp, Homo Sapiens
  misc_feature (1163)..(1356): n is a, c, g, or t
cgcggcgctgcagttgtgtccagccggtcacggggcggctatggcggccacgttcttcggagaggtggtgaaggcgccgtgccgagctgggactgaggacgaagaggaggaggaggaggggcggagggagacgcccgaggacagggaggtgcgtctgcagctggcgcggaagagggaagtgcggctccttcgaagacaaacaaaaacatctttggaagtttctttgctagaaaaatatccgtgctccaagtttataattgctataggaaataatgcagtagcatttctgtcatcatttgttatgaattcaggagtctgggaggaagttggttgtgctaaactctggaatgaatggtgtagaacaacagacactacacatctgtcctccacagaggctttttgtgtgttttatcatctaaaatccaatccctcggtttttctctgtcagtgcagttgctatgttgcagaagatcaacagtatcagtggctggaaaaggtttttggctcttgtccaaggaagaacatgcagataactattctcacatgtcgacatgttaccgattataaaacctcagaatccaccggcagccttccttctcctttcctgagagccctaaaaacacagaatttcaaagactcggcgtgttgtccattgctagaacaaccgaatatagtacacgaccttcctgcagcagttctaagctactgtcaagtatggaaaatcccagcaattctgtacttgtgttatactgatgtgatgaaattagacctaatcacagtggaagcttttaagcctatactttctaccagaagcttgaagggtttggttaagaatattccccaaagcactgagatactaaagaaattgatgacaacaaatgagattcagagtaacatttatacatgatcttaaacattgttttgtagtgtatattacttgtccattcctttaaggggagcagcctgcactcttttgtagattacttttgggggatatattttgagaatgatgaaacggaataaaattggtaaaaaactaattgtagttttaattccttatttatggtggtattattcacaaccaaaataagccaggcattttccttttatccattaggtgggagtattgttgtatttgaatattttaaggtactatagttaannnnnnnnnnnnnnnnnnnnnnnnnnnnnnnnnnnnnnnnnnnnnnnnnnnnnnnnnnnnnnnnnnnnnnnnnnnnnnnnnnnnnnnnnnnnnnnnnnnnnnnnnnnnnnnnnnnnnnnnnnnnnnnnnnnnnnnnnnnnnnnnnnnnnnnnnnnnnnnnnnnnnnnnnnnnnnnnnnnnnnnnnnnnnnnnnncaaagctacagatatcagcagatggtattcatgtggcaaagtgtagttaattaggtgtaactactcattgacctgttggtgattcttaatatgtggaaagtttctggatattttaggagtcctgcagttttttttatcttgtgggtaaaaattgatgacaaagtaacaaaattatatatttactaaaaatgaaacagaaatgtgtatgtcctcactttttagtaatatctgacagatagcctcttcacccagactttcccagggctctctttcaaggctggctctgcgcgtgtcagcagttctcttacagtcatgtgttatcattaggagtgtgaatggaatcatgaacccggagtagccacacaacttcacaggaccacaaactgagctgcattcataacaataaattttagaatggtggagt

SEQ ID NO: 350909 - DNA, 1159 bp, Homo Sapiens
catcatatctgtcagccagctgatagcagacgttgttggcattgggggaaccagattccagcagtccctgtccatcatcaacaactgtgccaacagtgaccggcttattaagcacaccagcttctcctctgatgtgaaggacttaaccaaaaggatacgcacggtgctaatggccaccgcccagatgaaggagcatgagaacgacccagagatgctggtggacctccagtacagcctggccaaatcctatgccagcacgcccgagctcaggaagacgtggctcgacagcatggccaggatccatgtcaaaaatggcgatctctcagaggcagcaatgtgctatgtccacgtaacagccctagtggcagaatatctcacacggaaagcagtccagtgggagccgccccttctcccccacagccatagcgcctgcctgaggaggagccggggaggcgtgtttagacaaggatgcaccgccttcagggtcattaccccaaacatcgacgaggaggcctccatgatggaagacgtggggatgcaggatgtccatttcaacgaggatgtgctgatggagctccttgagcagtgcgcagatggactctggaaagccgagcgctacgagctcatcgccgacatctacaaacttatcatccccatttatgagaagcggagggattttgagaggctggcccatctgtatgacacgctgcaccgggcctacagcaaagtgaccgaggtcatgcactcgggccgcaggcttctggggacctacttccgggtagccttcttcgggcaggcagcgcaataccagtttacagacagtgaaacagatgtggagggattctttgaagatgaagatggaaaggagtatatttacaaggaacccaaactcacaccgctgtcggaaatttctcagagactccttaaactgtactcggataaatttggttctgaaaatgtcaaaatgatacaggattctggcaaggtcaaccctaaggatctggattctaagtatgcatacatccaggtgactcacgtcatccccttctttgacgaaaaagagttgcaagaaaggaaaacagagtttgagagatcccacaacatccgccgcttcatgtttgagatgccatttacgcagaccgggaagaggcagggcggg

SEQ ID NO: 350910 - DNA, 1518 bp, Homo Sapiens
  misc_feature (331)..(331): n is a, c, g, or t
  misc_feature (1107)..(1107): n is a, c, g, or t
  misc_feature (1122)..(1122): n is a, c, g, or t
ggatgcacagagccttccggttcccctttggcttttaagggccccgggttccagcgtttttcattccaggggggggcccaaccttttcaaaaatcccctccggttttttaataaaatggggaaggataaattttttagatttcggcggatgagttgttaagccttgggctttcccgagttccattggggcactgttcaaggagttccatcagcacatctttgtgaaaagggacatcttgcatccccacgtcttccatcatggaggcttcctcgtcgattttgggggtaatgaccttgaaggcggtgcatctttgtctaaacacgcctttcngtgtgagatattctgccactagggctgttacgtggacatagcacattgctgcttctgagagatcgccatttttgacatggatcctggccatgctgtcgagccacgtcttcctgagctcgggcgtgctggcataggatttggccaggctgtactggaggtccaccagcatctctgggtcgttctcatgctccttcatctgggcggtggccattagcaccgtgcgtatccttttggttaagtccttcacatcagaggagaagctggtgtgcttaataagccggtcactgttggcacagttgttgatgatggacagggactgctggaatctggttcccccaatgccaacaacgcctgctatcagctggctgacagatatgatgacttgcaaatgtgtccggacaaaggacttctttccagtgtaatcaaagttgctcctcatcaggaagtagagcagctgggaggcctccgtcctgatggagctcagcttggagttacagcacttgagaatctcgtaacacagagccgcacacatgtccgctctcccttcatagaatgttgagggaaacttataaattaaggaccttaaggcagtgaagacattttttaaagccgtttcagactgatgtttttgaagaaaacacaggtagacatcaaaaacttttttcatgagaggattatgtccatggtcggccaggagctggttcttaaacgccaatgtaaatagagaaagcgtgtccagagctgtcaggcaaacctcagtagcaatgttggcttcnaagtaatgactggtngcagaacatctgcgtccgagtggccatagccattgtctacagaaatcccaagcacacttgatatctttctcacactggctatgtatcgcttccccatgtactggaactggtgcaggcagacttcagatattgtaaaaaaatccataagttcagatgttgaagccttgttccaatatgtaaacaaagcatcatcagacatgctctttaagatgtagagggaaacacatcagtagggctcttaatctcagactgggtcaagtttatcacagcgaaccacggaatttcccaatgtgctactttgttggtgcttatccagggaattgctcttctcactattcctttctggaaggctgttacccgaatctgtgcttatgagagatcctctcgaatcaagcc

SEQ ID NO: 350911 - DNA, 907 bp, Homo Sapiens
  misc_feature (44)..(44): n is a, c, g, or t
  misc_feature (297)..(425): n is a, c, g, or t
cgcaatgcatccgtccttccctaatcatcacgtggctgtcatcnggtcaatgaactgaggcccgaaggcttgagtcaaactggttttcaaggctgtgctcatgggatttatatgtttcttgagccctgttggaggctcttggcaggtctgaacattaaacatttcttttcttccttttgcacactgcttcaacctaaagagttggagcgaactagctctatatcatttctgtgttgtaaatgggaaattagctaccccataacttcccattgtctcctgagaggttacaaattgtgnnnnnnnnnnnnnnnnnnnnnnnnnnnnnnnnnnnnnnnnnnnnnnnnnnnnnnnnnnnnnnnnnnnnnnnnnnnnnnnnnnnnnnnnnnnnnnnnnnnnnnnnnnnnnnnnnnnnnnnnnnnnnnnnngtcaagaaaagggctggggttctccccaccaataccaaatgattttgctctgtggagtttgtgtctcggttaggacattggtgagctatgtcacctatgtttcaggtgacagggacatcacaacaaaggtttgttgggttaacagtgtcaagcatttccctgccccagaccccagactcattgccacactccataccactgtcacggaggtgcagatagtggggtttggaatctcagtaaagccaaaccacaggccagagattcaccatatggggccatcggtcatccccgatcctgttgtcccaatagctttcattctggcgataggatatctgcatctcctagaaatgtggctgctaagccccactcctgcacggatcattcaccggctccccactcagcgtagccactcctgggtggatcggcaaacagctcttcaatacgtccacccccatgtgtcacagagcttttcaggtggaagg

SEQ ID NO: 350912 - DNA, 922 bp, Homo Sapiens
  misc_feature (49)..(141): n is a, c, g, or t
tcatgttgtttcatatccactagtgttacagaaactgctgcaaaccagnnnnnnnnnnnnnnnnnnnnnnnnnnnnnnnnnnnnnnnnnnnnnnnnnnnnnnnnnnnnnnnnnnnnnnnnnnnnnnnnnnnnnnnnnnnnnatgtacaaaattgggtctgtatgcacatttgtggttctaaatcctggagtccaaatcagagttctttgtgcaaaatatacgtagctaggtcctaacctcggagatcctgactcagtctggggaaaggcgcagatcttggggagaaaacaactctctagaagagtctcgccttcagtgagtgacaagatctctcctgtctctcggttcacaatgttaccctaactaatccatcctctgatgtcacctgctaacaacttcccctgtggcatcaaaccagtagcccatttgcagctagtacaaacacttctttacatttaagttttgtttacgagatttagcctacaatcatagaggctgccagctgggtttcaaatgtgtatgttccattgctaataggaaaaactgcatctattagaaaaattctctctgggagctgagcacagaggcaggccttgtattgcaaacatttgaaaagccataagcaggtattctggactgtgttttagatcacctgagaacatttcttgaacactagtatttgcttagagtgacaaacctattaagtggttctttcaggtaagtttgcatccaagcaatgtcgtctgaatcgcaggaggaagccaggagttgtgtctggctttctggccatacaaatggcatatgggaaagtcattgtatattattaatatcctttgatgtatattattatgactttctcacggtagtaatgttgttggtttttattaatgttatttttatagcaatgctaatattatgagct

SEQ ID NO: 350913 - DNA, 1487 bp, Homo Sapiens
gaagctgaccctgctgacgtgccaagtgaggccaaaccctgaggagaaaaagtgcttcgacctggtgacccacaaccggacgtaccactttcaggcagaggacgagcacgagtgtgaggcgtgggtgtcagtgttgcagaacatcatggacgaagccctgagcagcgccttcctcggggagcccagcgctggcccggggtcctgggggtccgccggccatgatggggagccgcacgacctcacaaagctgctcatcgcggaggtgaagagcaggcctgggaatagccagtgctgcgactgcggggctgcagaccccacgtggctcagcaccaacctgggcgtgctcacctgcatccagtgctcgggcgtccaccgcgaactgggcgtgcgcttttcgcgcatgcagtcactcaccttggacctgctgggcccctccgagttgttgctggccttgaacatgggaaacacgagcttcaatgaggtcatggaggcccagctaccctcacacggcggccctaaaccctcagctgagagtgacatgggcacccgcagggactacattatggccaagtatgtggagcataggtttgcacgccggtgcacacctgagcctcagcgactctggacagccatttgcaacagggacctcctgtcggtactggaggcctttgccaatgggcaggactttggacagccgctgccagggcctgatgcacaggcacctgaagaactcgtcttgcatttggctgtcaaagtcgccaaccaggcttccctgcctctggtggatttcatcatccagaacggtggtcacctggatgccaaggctgctgacgggaacacggctctgcactacgcagcactctacaaccagcccgactgcctcaagctgctgctgaaggggagagctttggttggcacagtaaatgaagcaggcgagacagctctggacatagccaggaagaagcaccacaaggagtgtgaggagctgctggagcaggcccaggcggggacctttgccttccctctacatgtggactactcctgggtaatttccacagagcctggctctgacagtgaggaggatgaggaagagaagcgctgcttgctgaagctcccggcccaggttcactgggccagtgggaggctggacatcagcaacaagacctatgagactgtcgccaggcctgggagcagccacccctcagggcgagagtgaaggactgtcccccgcccttgccagtcaaaaactcttctcggatttggtacaagggtgtgcaggacattgccagtggagaatcgtctaagttccagcctgagttcaagaggccctgagaccctgagagctgggcaagacaagctactcgaccagtctgatgaccccttggaacggcgaatccaggcaaagcccaaccaatccgaaacaggctcccagaacccccaaggcctccacaccggccgcatcggaacagcccccgaaagcctcccgg

SEQ ID NO: 350914 - DNA, 538 bp, Homo Sapiens
  misc_feature (93)..(128): n is a, c, g, or t
  misc_feature (369)..(369): n is a, c, g, or t
taatttaaaaacacaaaggcctaaagaaatacgtatcttataatttttttaatttttgagacgttcatttaatgaattgtgcacgaatgaatnnnnnnnnnnnnnnnnnnnnnnnnnnnnnnnnnnnnttggggaagggcactgtctcttttttctcctcatttttaaaatgaagtgttgttgcctttgtaatgtggttcaaccatccagctcccagctggctaaactttgcctccagtggtcaaagatgggaaaagagtggggttggcaggagatggaaaacggaggtgccgccccagcatggggggcaggtcccccagtccaccctgcccctccccctgtggagaagacgcttagttgggggtgtgnggtttgggctccattctggattcggcggttccgggggaggggtgggtctgtgccgattactctgtcttgtacgtttgttctgctgctcttcaatattgtatcaacgccaggaaaggggggtgaaaagcctcttttaccccccaaataaattgtcacattccgaagctga

SEQ ID NO: 350915 - DNA, 475 bp, Homo Sapiens
  misc_feature (19)..(19): n is a, c, g, or t
  misc_feature (25)..(25): n is a, c, g, or t
aacttccaactacctggcntcccgnaaaaaaggttccccccatgaaaccgttagtctctctttgccctggctgaactacctgcatacagtaggcactcactgctggagtgaggcactgactcctcccaaagattgcagggggcggaggagggaaccacgaaggcctgggagggggcatctttggcccccactaaccatctccctatttctgcatcctggtgaccgtcagcaagagatgagtcggggagaccctctccctggagttctagcccctaattctgggctttctatatgagaggacatgcagatagggaagaaactaaaacctttcaatgtcttccttttttctttaaaagtgtttcctcaaaccatccccgtcccaaagaggccgccttgggcaagtgcatgggagcccggaagtggaactgacccaggtggggctccactgtcctgtgtgggcgaagtgcaaaaaaaa

SEQ ID NO: 350916 - DNA, 1960 bp, Homo Sapiens
  misc_feature (707)..(749): n is a, c, g, or t
  misc_feature (787)..(813): n is a, c, g, or t
  misc_feature (898)..(935): n is a, c, g, or t
  misc_feature (958)..(1004): n is a, c, g, or t
  misc_feature (1077)..(1096): n is a, c, g, or t
  misc_feature (1212)..(1297): n is a, c, g, or t
  misc_feature (1436)..(1444): n is a, c, g, or t
  misc_feature (1568)..(1603): n is a, c, g, or t
  misc_feature (1697)..(1713): n is a, c, g, or t
tgacagccgccaacacagagccctggagaggtggggagctgctgaagggcgggagaagttgcggcgtggcgataggtctgggtgttctgggaggacccctaaaagggagcagctctgccaggtcagagcttgaggtagcatgtgtgccgcttccaggaggccaggatggagacagcagttcgaggaatgcccttggaatgccctcctaggccggagcggctcaatgcctacgagcgcgaagtgatggtgaacatgctgaactcactgtcgcggaaccagcagctgccgcggatcacgccccgatgcgggtgcgtggacccgctgcccggccgcctgcccttccatggttacgaaagtgcttgctcgggccgccactactgtctgcgcgggatggactactacgccagcggggcgccctgcaccgaccgccgcactgcggccttggtgccgggagcaaccgactatgtgtacctccctacgagcaccggcccggaatgcagtgtgctgttacaactcccccgccgtcatactacccatatccgaaccttagatgggacacaagtcacttcaagaagtctggtggtccccagagaaacaactatgttatccatcctgagtttgtgtctgagacctatcccgactatcgttgctggtagagcctgggcttgctgtgccaagggggcagagcaataaataaactcttcaannnnnnnnnnnnnnnnnnnnnnnnnnnnnnnnnnnnnnnnnnnaccgaaacccaaccacccacccctttattaatacccannnnnnnnnnnnnnnnnnnnnnnnnnnggggggtcccctctcttagcactatccctcgccggcgcccctgttttctccttcttacccctcccttcccccgccaagaaagggnnnnnnnnnnnnnnnnnnnnnnnnnnnnnnnnnnnnnnggtcgggcgcattctctttatannnnnnnnnnnnnnnnnnnnnnnnnnnnnnnnnnnnnnnnnnnnnnngcaaaaagaatatcccacttcctcggccggtttaccacccaagccgcgtcccaatattgcttttaattgttannnnnnnnnnnnnnnnnnnnggtaacaaatccaaactatttttctccccccttgtataccggcgtagccaccccaataccgcgcattctttgttcccggccccccccgcgaagctttttctttctccccatttatnnnnnnnnnnnnnnnnnnnnnnnnnnnnnnnnnnnnnnnnnnnnnnnnnnnnnnnnnnnnnnnnnnnnnnnnnnnnnnnnnnnnnngttcccaccccgcataactcctgcccatacgcactcgccgcgccctcttatttcttgtaggagcgtttccccgccgctatacttcaacaatcccttggtcgccttttttatcaacacaccaccctccttcttttttctnnnnnnnnntctgctttataatttagcagacgccacgctgggcgatcactataaatacatcttctccccttatatagagggaccccccccgcgcaaactcattttatttttctctaaatacgcgctcatgccnnnnnnnnnnnnnnnnnnnnnnnnnnnnnnnnnnnnattattgggccgggggaacgcctctactagcttggggagggtgatttatttccccacaagataatagctggctcctctttcttctttttcctgnnnnnnnnnnnnnnnnnaaaatatcctaaacaccacccgttttttttatccctattaacctgcagctacaggcatattagaaaccgagtgtaattttgggagtggggcgtgccggccgcccacatattagggataaagggcgcccgtaattttccccccgcctccccaccgccccttttaatttgtttttggcatccattcccatattttagtatttcccgccccgcctgttattatcacgcatcaccccaaatcgtcaacccc

SEQ ID NO: 350917 - DNA, 700 bp, Homo Sapiens
  misc_feature (44)..(80): n is a, c, g, or t
  misc_feature (498)..(508): n is a, c, g, or t
  misc_feature (559)..(618): n is a, c, g, or t
tgatagactcactatggggaatggagctaccgcggtggcggcgnnnnnnnnnnnnnnnnnnnnnnnnnnnnnnnnnnnnnatcaggccaaatcggccgagctcgaattcgtcgagagcggggtgggcctccatcagcaagctccagtgctacgtgtccctggcattttaggtgtcggttgggtaggcagtcatggatcaggtaatgcagtttgttgagccaagtcggcagtttgtaaaggactccattcggctggttaaaagatgcactaaacctgatagaaaagaattccagaagattgccatggcaacagcaataggatttgctataatgggattcattggcttctttgtgaaattgatccatattcctattaataacatcattgttggtggctgaatacattttggaagagagtttttcatcttagagattggtgaacaagtgtgagggtgtgagaaactcacagaatacaaatttgcctgtatgttttgtgggnnnnnnnnnnncctttcaagatgttttctatttctaaattaaagtaatttcaaagtaaaagnnnnnnnnnnnnnnnnnnnnnnnnnnnnnnnnnnnnnnnnnnnnnnnnnnnnnnnnnnnngggcccgagaacaacagaccttttcccccaccctaactaccaaaacgtttttttcgaaatggggggcccctcccgcgctcct

SEQ ID NO: 350918 - DNA, 801 bp, Homo Sapiens
agcggaattccttgcaagcaatactgtttggaggttcagacgaggtgtccatttatattgcccgacaatgatgaagtcatctacggaggcctctccagtttcatctgtacagggctttatgaaacctttctaaccaatgatgaaccagaatgctgtgacgtcaggagagaagaaaaatcaaataacccatccaaagggacagtagagaaaagtggctcctgtcacaggacatcgctcacagtgtcatcagcaacaagactgagcaacagcagactcaagctgtgtgttcttgtactgattctcttacacacagtgctcacagcctcggcagcacagaacacagccggactgagctttggaggcatcaacacgctggaagaaaactcaaccaatgaggagtaacggaaggacgagtgtcaccacagcagcagctggcccgccgtgaaaaatggcaactgctgtctcatgtaacagaaactgggtgcttttaccctcgaattacttattgcaaggcctttagggtaaaatttaaacagatgggcctgaatccaaacaaggacacaaccacagctttttattgactaaaaggctggaaagtgactttaaatttctcacaccattttatacactgtgttttaatgtttggaggttttatttgctttcgttttggtttgggtttatttgtttgtttattttttgcacttgttaatacaggatttatttggggggatggtttctcagaggtaaactaagtcttttcactgtctctatctctctatatattctagtcactgtgtgtgc

SEQ ID NO: 350919 - DNA, 1411 bp, Homo Sapiens
  misc_feature (389)..(457): n is a, c, g, or t
  misc_feature (1266)..(1266): n is a, c, g, or t
  misc_feature (1393)..(1393): n is a, c, g, or t
cggtccggaattctgggatccaccccgagcagcgctggtgctgcagcctgttcgcgctgaccatttctctacaagatacaatatttattatcaggcaagaggacagttccattttaaaataagacttttgtaatcattccaattttgtaatcatttcaaaggccacataacttagttttctctacttacacattcagtataaatatgaagctattttctgttcatatcaaacattaactacaaggcacattcgtatcagttttgtgtttctcaaattgaagtaccataccagttctgaggcagtgtcccagcttccatgtttgttaaataccccttgtttgtttcaccattccagcaagtgctgaagggtgtactttttttgagacagnnnnnnnnnnnnnnnnnnnnnnnnnnnnnnnnnnnnnnnnnnnnnnnnnnnnnnnnnnnnnnnnnnnnntgggctcaagcaatcctcccacctcagcctcctgcatagctgggactacaagtgaatttcctaatattccgggaggtcaaaaccaaggctcactgttttcacaatacacacagttctatgtttataaataacaggtttcaaaagaaactcaggacagtatttaaaacaagttcttaaactattaattgaacaatggcatttttaaatatgtaaacacagcggaaattcgtgtatacactaacagaagctttaacaaaacatgtagccgtggtgggacactctgccacagcttagctgattggtatcaagccttgtctttggtttctgaggcctcctgagcccttctgtactgggagaccgcactccagagtctgcagaggagaccacccctgggaaacaaacacagctgtcttcagagtcagtgcttcaagccaacagagcttaaaactgcagtccctaatttaaaaacctaatgaaaataaaaacattctcctcacatatggaggtgacgctcgtgtcccagcagtagtaggacatggccttagaggtacgtacctgcagagagctggctatttcaaatgactcgggaacaagaaggcaggctgcagtttaaagaagggggtgggtccagcgtgcaggcacgcttgccatgtgcctccacccactcccagccaggcattaatggcaggagattggccagctcttctctgtcacattcctatttctgacttctgcctggctttcagtttctgccccaccttggcttttcccagcttgaacctatagaactcagagtttggggggagccnagcctttgtttctgctcttgagcatatcacacataaaagttgtatctctatacaactgtttgagctctacgtatcgaagatcttaatctctatgattctagattcgaaggatacctctacatcgacnaataatctagacgacctg

SEQ ID NO: 350920 - DNA, 1408 bp, Homo Sapiens
  misc_feature (23)..(23): n is a, c, g, or t
  misc_feature (951)..(1019): n is a, c, g, or t
  misc_feature (1294)..(1303): n is a, c, g, or t
tgaaaccagcaatccttgcccantgtggaaagaacctaaaggaaaattgatgtggaaagtgagggaaggagattgaaggatgcctgcccccagtttgcccacggcccgatccctgagcccaccccttggaaagagctgggcctacccacatcctactcccagcgaccccaccttttgaagttccgtggtgcccaatcagtggatcaagtttaagtcagtcagttaaggggaggagaaggagaggttataccttcagggggctaccagacagtgttctcaacttggttaaggaggaagaaaacccagtcaatgaaattcaatgaaattcttggaaacttccattaagtgtgtagattgagcaggtagtaattgcatgcagtttgtacattagtgcattaaaagatgaattattgagtgcttaaagattatttttgacttaaaatagtatactttgaacaaatactctaattatgaaaaggaagaacaattccttgtatgcctgtttcccctgcccccagccacctttttgggaggagaccattatggcggggcccctcacagcattctaccaaccatagcacccaccccgagcagcgctggtgctgcagcctgttcgcgctgaccatttctctacaagatacaatatttattatcaggcaagaggacagttccattttaaaataagacttttgtaatcattccaattttgtaatcatttcaaaggccacataacttagttttctctacttacacattcagtataaatatgaagctattttctgttcatatcaaacattaactacaaggcacattcgtatcagttttgtgtttctcaaattgaagtaccataccagttctgaggcagtgtcccagcttccatgtttgttaaataccccttgtttgtttcaccattccagcaagtgctgaagggtgtactttttttgagacagnnnnnnnnnnnnnnnnnnnnnnnnnnnnnnnnnnnnnnnnnnnnnnnnnnnnnnnnnnnnnnnnnnnnntgggctcaagcaatcctcccacctcagcctcctgcatagctgggaactacagtgaatttcctaatattccgggaggtcaaaacccaaggctcactggtttcacaatacacacagttctatgtttataaataacaggttttcaaaagaaactccggacagtaattaaaacaagttcttaaactattaatttgaacaaatggcattttttaatatgtaaaaccccgccggaattcgtggtatacccttacacgaagctttaacaaaaacatgtaacnnnnnnnnnnaacacttctggcaacaacttaaccttgaattgggaattcaagcccttggccctttgggtttttcgggagccctcccctggaacccctttttgtgtaaatggggac

SEQ ID NO: 350921 - DNA, 845 bp, Homo Sapiens
  misc_feature (145)..(238): n is a, c, g, or t
  misc_feature (747)..(747): n is a, c, g, or t
gtctgctggggcacctgaaggagacttgggggcacccgcgtcgtgcctcctgggttgtgaggagtcgccgctgccgccactgcctgtgcttcatgaggaagatgctcgccgccgtctcccgcgtgctgtctggcgcttctcagannnnnnnnnnnnnnnnnnnnnnnnnnnnnnnnnnnnnnnnnnnnnnnnnnnnnnnnnnnnnnnnnnnnnnnnnnnnnnnnnnnnnnnnnnnnnntctcactctcttaaaaccaggcaggcaagcagagtgctggtagcatcccgtaattttgcaaatgatgctacatttgaaattaagaaatgtgaccttcaccggctggaagaaggccctcctgtcacaacagtgctcaccagggaggatgggctcaaatactacaggatgatgcagactgtacgccgaatggagttgaaagcagatcagctgtataaacagaaaattattcgtggtttctgtcacttgtgtgatggtcaggaagcttgctgtgtgggcctggaggccggcatcaaccccacagaccatctcatcacagcctaccgggctcacggctttactttcacccggggcctttccgtccgagaaattctcgcagagcttacaggacgaaaaggaggttggtgctaaagggaaaggaggatcgatgcacatgtatgccaagaacttctacgggggccaatggcatcgggggagcgcaggtgccccctgggcgctggggattgctctangcctgtaagtataatgggaaaaaatgaggtcctgccctgtactttatatgggcgaatggttgctgcctaacccagggcgcaagatattcccgaaacca

SEQ ID NO: 350922 - DNA, 1080 bp, Homo Sapiens
  misc_feature (1058)..(1058): n is a, c, g, or t
gcacccaacccccacggccaacatccctaagtgcgcccaccggcaagagccgtccccaccccgccgcgaagagccataatagggtccctcctaacttctaactcccggaatgtcttcctcgtgtacggtaactactccagggtcactcatactggggtccgtggtaacgctaagtctgcagctccatccaggatgggcccccttcccagatctacaataggcagcagcacaaccttgttgcctctcggacgcacagggataaccagtccacccactccgcagcccaggaatgaaatcgcctctcttgtagtaatcagtgctggctgccgctctctcaacagacgttcccattccatagcgattattctcacagatgaaaatacaaggtaatttccacaaagctgccatgttgtaagcttcgaatatctggccctgcgctcccacgatgccattgcccccgtagaagttcttggcatacatgtgcatcgatcctcctttccctttagcacaacctccttttcgtcctgtaagctctgcgagaatttctcggacggaaaggccccgggtgaaagtaaagccgtgagcccggtaggctgtgatgagatggtctgtggggttgatgccggcctccaggcccacacagcaagcttcctgaccatcacacaagtgacagaaaccacgaataattttctgtttatacagctgatctgctttcaactccattcggcgtacagtctgcatcatcctgtagtatttgagcccatcctccctggtgagcactgttgtgacaggagggccttcttccagccggtgaaggtcacatttcttaatttcaaatgtagcatcatttgcaaaattacgggatgctaccagcactctgcttgccggcttctgagaagcgccagacagcacgcgggagacggcggcgagcatcttcctcatgaagcacaggcagtggcggcagcggcgactcctcacaacccaggaggcacgacgcgggtgccccacaagtctccttccacctcgtgccgaattcgccacccaggcctcgctacctntaccccgagggtactgccagca

SEQ ID NO: 350923 - DNA, 1801 bp, Homo Sapiens
  misc_feature (1665)..(1665): n is a, c, g, or t
cgccgcggtgcgactgaggcgtggcgtctgctggggcacctgaaggagacttgggggcacccgcgtcgtgcctcctgggttgtgaggagtcgccgctgccgccactgcctgtgcttcatgaggaagatgctcgccgccgtctcccgcgtgctgtctggcgcttctcagaagccggcaagcagagtgctggtagcatcccgtaattttgcaaatgatgctacatttgaaattaagaaatgtgaccttcaccggctggaagaaggccctcctgtcacaacagtgctcaccagggaggatgggctcaaatactacaggatgatgcagactgtacgccgaatggagttgaaagcagatcagctgtataaacagaaaattattcgtggtttctgtcacttgtgtgatggtcaggaagcttgctgtgtgggcctggaggccggcatcaaccccacagaccatctcatcacagcctaccgggctcacggctttactttcacccggggcctttccgtccgagaaattctcgcagagcttacaggacgaaaaggaggttgtgctaaagggaaaggaggatcgatgcacatgtatgccaagaacttctacgggggcaatggcatcgtgggagcgcaggtgcccctgggcgctgggattgctctagcctgtaagtataatggaaaagatgaggtctgcctgactttatatggcgatggtgctgctaaccagggccagatattcgaagcttacaacatggcagctttgtggaaattaccttgtattttcatctgtgagaataatcgctatggaatgggaacgtctgttgagagagcggcagccagcactgattactacaagagaggcgatttcattcctgggctgagagtggatggaatggatatcctgtgcgtccgagaggcaacaaggtttgctgctgcctattgtagatctgggaaggggcccatcctgatggagctgcagacttaccgttaccacggacacagtatgagtgaccctggagtcagttaccgtacacgagaagaaattcaggaagtaagaagtaagagtgaccctattatgcttctcaaggacaggatggtgaacagcaatcttgccagtgtggaagaactaaaggaaattgatgtggaagtgaggaaggagattgaggatgctgcccagtttgccacggccgatcctgagccacctttggaagagctgggctaccacatctactccagcgacccaccttttgaagttcgtggtgccaatcagtggatcaagtttaagtcagtcagttaaggggaggagaaggagaggttataccttcagggggctaccagacagtgttctcaacttggttaaggaggaagaaaacccagtcaatgaaattcaatgaaattcttggaaacttccattaagtgtgtagattgagcaggtagtaattgcatgcagtttgtacattagtgcattaaaagatgaattattgagtgcttaaagattatttttgacttaaaatagtatactttgaacaaatactctaattatgaaaaggaagaacaattccttgtatgcctgtttcccctgcccccagccacctttttgggaggagaccattattgcagggcccctcacagcattctaccaaccatagcacccaccccgagcagcgctggntgctgcagcctgttcgcgctgaccatcatttctctacaagatacaatatttattatcaggcaagaggacagttccatttttgtaatcattccaattttgtaatcatttcaaaggccacataacttaggttttctct

SEQ ID NO: 350924 - DNA, 443 bp, Homo Sapiens
acaggggcaatctaaagcagcacacaatcctcgtcctgatactgcgctccacgatgccatgcccccgtagaagttctggcatacatgtgcatcgatcctcctttccctttagcacaacctccttttcgtcctggaaatggcagaacatacacatgtgcagaacaaaccaactctacaaagcaaaccaaaccgcaccccaaatatgtactctgaggctcaaccattagaacacagaggccagttcagtcgtctaagtacctgtccctccaggcaaacacatgtttctccttgtcctttcactagttccatgtgcttcaacctttccagcttttcctactctctagtcacttagtttccttcagatgttccatccagatgataccctggacttttctgggttttctggccagtacaacatcttagacctctcctccctgtgaaga

SEQ ID NO: 350925 - DNA, 730 bp, Homo Sapiens
  misc_feature (50)..(50): n is a, c, g, or t
  misc_feature (106)..(136): n is a, c, g, or t
tgatacagtgttaaaagaaaataaattacaattgatctgtcatccatatntgctaagaatgtctatttccaagaacctatatcttacaaaatacacattcttgctnnnnnnnnnnnnnnnnnnnnnnnnnnnnnnnccacgtactagaaaaattacctgtgtgagattttattttgacagaagctatttcatttgctgttcatcttgtacaaactttgtttttggttttttagtataaatgtacatcagtttgttccttttgtactgtatctattcttctgaccatctagtgactcaggatattaggccagttgaagtggagttatagggattttcacacattcacgcatacttggatatcaaccctctctacaggtccgtttccttacacattttatcccctcagaacacgataaaccatggccaattcagtttcactttggggccaattacttgaagtatccacagaaaatgtaaactgctcgccttattcccccaaactttttgttcatgtggcagggagcagtacacaactatggaatagattattaaaactgaacttgaagctaacgttagaatagtggttaacagagctaagaaataaggctaaccatcgaaaagaacatgggccgcgggtaaactagctttgctctttagatgcaagtggctgaggccaataggtgcctagtaaatgttaactgttcttggaaaaaataaaaacatcagtaac

SEQ ID NO: 350926 - DNA, 1263 bp, Homo Sapiens
  misc_feature (1171)..(1171): n is a, c, g, or t
  misc_feature (1245)..(1245): n is a, c, g, or t
tggaccagcaccttggagaccatagcagcgagtcacacttcctgtgtgtagactgtggcctggccttcggcacagaggccctcctcctggcccaccggcgagcccacaccccgaatcctctgcattcatgtccatgtgggaagacctttgtcaaccttaccaagttcctttatcaccggcgtactcatggggtagggggtgtccctctgcccacaacaccagtcccaccagaggaacctgtcattggtttccctgagccagccccagcagagactggagagccagaggcccctgagccccctgtgtctgaggagacctcagcagggcccgctgccccaggcacctaccgctgcctcctgtgcagccgtgaatttggaaaggccttgcagctgacccggcaccaacgttttgtgcatcggctggagcggcgccataaatgcagcatttgtggcaagatgttcaagaagaagtctcacgtgcgtaaccacctgcgcacacacacaggggagcggcccttcccctgccctgactgctccaagcccttcaactcacctgccaacctggcccgccaccggctcacacacacaggagagcggccctaccggtgtggggactgtggcaaggctttcacgcaaagctccacactgaggcagcacctgctttcgctgcatgcccagcacttcccctaccgctgccaggatatgtgggggtgcgttttcaccgtccttaccgcctgctcatgcaccgctaccatcacacaggtgaatacccctacaagtgtcgcgagtgcccccgctccttcttgctgcgtcggctgctggaggtgcaccagctcgtggtccatgccgggcgccaccaaccgctgcccatcctgtggggctgccttcccctcctcactgcggctccgggagcaccgctgtgcagccgctgctgcccaggccccacggcgctttgagtgtggcacctgtggcaagaaagtgggctcagctgctcgactgcaggcacacgaggcggcccatgcagctgctgggctgggagaggtcctgggctaaggagccccctgcccctcgagccccacgggcaacttcgtgcaccagtttgcctcttccagcagcccttgggaagcattgttacagcattcccttgcgggcccttgcccgccgccggggtntaaagagtgcagcgagttgcaaaaaagttgtttcagcacagagaacttcattgcaggttgcaaccggcgcattncacaaaggttgagcggtt

SEQ ID NO: 350927 - DNA, 1067 bp, Homo Sapiens
gctcgtggtccatgccgggcgccagccccaccgctgcccatcctgtgggctgccttcccctcctcactgcggctccgggagcaccgctgtgcagccgctgctgcccaggccccacggcgctttgagtgtggcacctgtggcaagaaagtgggctcagctgctcgactgcaggcacacgaggcggcccatgcagctgctgggcctggagaggtcctggctaaggagccccctgcccctcgagccccacgggccactcgtgcaccagttgcctctccagcagcccttggaagcactgctacagcatcccctgcggcccctgcccgccgccggggtctagagtgcagcgagtgcaagaagctgttcagcacagagacgtcactgcaggtgcaccggcgcatccacacaggtgagcggccatacccatgtccagactgtggcaaagcgttccgtcagagtacccacctgaaagaccaccggcgcctgcacacaggtgagcggccctttgcctgtgaagtgtgtggcaaggcctttgccatctccatgcgcctggcagaacatcgccgcatccacacaggcgaacgaccctactcctgccctgactgtggcaagagctaccgctccttctccaacctctggaagcaccgcaagacccatcagcagcagcatcaggcagctgtgcggcagcagctggcagaggcggaggctgccgttggcctggccgtcatggagactgctgtggaggcgctacccctggtggaagccattgagatctaccctctggccgaggctgagggggtccagatcagtggctgactctgcccgacttcctctttggcacctccattccctgttgctgaaggccctccagcatccccttaagcatctgtacatactgtgtcccttcctcttcccatccccaccaccttgtaagttctaaattggatttattctctcgtgaggggggtgctctggggtccttgacacacataaaggtgcccccccaccttccacctcttagcactggtgaccccaaaaatgaaaccatcaataaagactgagttgccagc

SEQ ID NO: 350928 - DNA, 1292 bp, Homo Sapiens
tttctgcacatataaaaagagagactggccgtggtcagtggctcaggacgtggaccaaagtcccaagagtgccaagggagtccgtggtgccccagaggtagaagagctagcctggggcaccctggttgccgggacagtgccggctctggagaaggctgtggtgtttggctgggttgtgcttctgtggatgcaaggtctgaggggcaagaggggcggccaggagcgcttggctcccgcagtcctgcagagaccctgtgctaaggtaaggcggtgggagtgccttggccctgggccttcgggaacccccttagtgaaccccattgctaaaggcagaaaccccttcacagtaaacttccccagatagctggtcagtggcgtggtcagggaagctgcagggggtcccgtctgatttccactctgatggagggttctgcccagaggctccagaagactggctcctgttgagactgaccccagctggggacatcaggcacaggagggcagtccggggtatggccaggaacgaaggctctagataaacaggggagccgccttggcagcctggcccctcctggctggggcttcttgatgtttcctgtgggaagggctgaaagcaaggagagggtggtggccccgtcttcctagcctgctcctccctccattcttcaccccacaagggcctagactgtgcggcctggctaggaaaggtccagggagttcacccaggccctgatctgggggggccaagcagcttccagagccaaatgggtagggagagccgatgtgacagtcagagctagagggttcctcgtgcccagtcagcccaggcatcccttgtctacccgccatccatggagccaaggctgtggtggccaccctcagtggatcttgtaccctccaaggcagcctaggagtggggtgggagtgggcggcatctgcagtctgaaatgggctgaggaccactctggtctctgatggcgtggggtgcctgtgcatcagatcccgtccaggcactctagggtctggaggaggggcaggccacgccggagtccctccttcaggaactgcatgtaggtggccgtggacgggtcttcaaaggtggatgagaagcctgaagagattgctctcgatttcctcgggcttcacggaggtgatgtccaagaagtagttggcattgatgtgatggaccacggtgccattgggcaggcagatcatcatctccacggggaagctgtacttctccaggtgcaggccagccagcttctggtgggacgagatccggagatctcctg

SEQ ID NO: 350929 - DNA, 1774 bp, Homo Sapiens
agcggagaggcctccgcctccaccaccgccgccacagtcttccagctccacatcatgagaggacgcctctggagccgcgactgcccggggttgtgccggccgccgctgccgcccaggccgcctcagctctcctctgcgccggcccgctcactccgcccggccccagccctagcgctggccgcgaccccggcggagatcatgaatcagacagataaaaatcaacaagaaatcccatcataccttaatgatgaaccaccagaaggttcaatgaaagatcacccacagcagcagccaggcatgttgtcccgtgtgactgggggtatcttcagtgttacaaagggagctgttggtgccaccattggtggtgtggcttggattggtggaaagagtctggaagtgaccaaaacagctgttacaactgtgccttccatgggaatagggctggtgaaagggggtgtctctgctgtggctggaggtgttacagctgttgggtctgctgttgtaaacaaagtgcccttaacaggaaagaagaaagacaaatctgactgaaatatagagatacacttgcgctccacagcactgtaatgccagtggcattgaattgctaaattatggactacaaccaagtcaactgttttggacgtttatcttctaaactgctgtgttgaaagtattgatgactggctttcatctacaaaagaagagaccaatacgagcacagctatactgaacgggttctcatacttaagttccaggtttttatctggtaaaatgttacacttactcggttgtaactgaagatatggtatgtttggatatttactataagtctttcagtttgactaaaaatgtgaaagttgaatttagtagatgatcttcacagttccatatgtataatgtgccaggtaactcacctgccccttaagaagggaaccttgaattacataagccgtacctttgatgtgcctaatagtttcagatgtcttagttttgtataaccatagtcgattaggccaagaggcactcaattcctaatttaagctggcaaaattgagcaggaacttagagaagtttaaaaagataaatggtgtttatgataatgttaaccatcttttgttagtaaatatgcgttctattattttaatcattgatgccttacaaaagaaaacatcttttctaataccctgaatatgtgctgttcttagaatcatctatggattcttttaaaggttgtttgtgaaattagttttccctttttagaatctcaggagtagtggggtaaagacatttcctgctgtcagtggataagacagagcttgttaactgttttggcagtagttaaaatcaaattgtacacttctcagcctgggttcatgcttcatcagttaatacacctcacagtgcctaaggaacatttacttactggtcagaaggtattttggaagagtttcatattaaggaggaacaaataataattttaagttcttaaaaattacctaaaacaccccaaatataaaaagaagccttcacacctattctgtctttaggatgtcttaaattattagcagtactccttttttaaaaacactgtaaaagtaaccacaaatatgtgaggacttactattttaaatggaatggaatgagctccatagattagttttgaatataaagtatataaaagtgcatcagtggtttatataggctttaaaaacatgttatcttacagtcctttaaagcagccatagagtttaatcattgggcaagccaattttca

SEQ ID NO: 350930 - DNA, 986 bp, Homo Sapiens
  misc_feature (41)..(77): n is a, c, g, or t
acaatcatataggggaatggagcttaccgcggtggcggcgnnnnnnnnnnnnnnnnnnnnnnnnnnnnnnnnnnnnnatcaggccaaatcggccgagctcgaattcgtcgagagcggggtggagccgcgggaggaggcgggagctgaggaggcggcggagggggcgggtcgcgtcgggcgccacgtccacagccagaggcctccgcctccaccaccgccgccacagtcttccagctccacatcctgagaggacgcctctggagccgcgactgcccggggttgtgccggccgccgctgccgcccaggccgcctcagctctcctctgcgccggcccgctcactccgcccggccccagccctagcgctggccgcgaccccggcgcctttgaaacttctgctggtgtgagtgccctcaggggttccccaggaatatcgatacaacaccaacaggagatcatgaatcagacagataaaaatcaacaagaaatcccatcataccttaatgatgaaccaccagaaggttcaatgaaagatcacccacagcagcagccaggcatgttgtcccgtgtgactgggggtatcttcagtgttacaaagggagctgttggtgccaccattggtggtgtggcttggattggtggaaacgagtctggaagtgaccaaaacagctgttacaactgtgccttccatgggaatagggctggtgaaaacgggggtgtctctgctgtggctggaggtgttacagctgttgggtctgctgttgtaaaacaaagtgccccttaacaggaacagaaccaaagacaaatctgactgaaatatagagatacacttgcgctccacagcactgtaatgccagtggcattgaattgctaaattattggacttacaaaccaagtcactgtctcggacgtttatcttctaaactgctgtgttgaaagtattgatgacctggctttcctcttaacaggaagaaacccatacgagccc

SEQ ID NO: 350931 - DNA, 811 bp, Homo Sapiens
attggtctcttcgtgttagatggaagccagtcatccaatactttcaacacagcaagtttagaagataaacgtccaaacagttgacttggttgtagtccataatttagcaattcaatgccactggcattacagtgctgtggagcgcaagtgtatctcctatatttcagtcagatttgtctttcttctttcctgttaagggcactttgtttacaacagcagacccaacagctgtaacacctccagccacagcagagacaccccctttcaccagccctattcccatggaaggcacagttgtaacagctgttttggtcacttccagactctttccaccaatccaagccacaccaccaatggtggcaccaacagctccctttgtaacactgaagatacccccagtcacacgggacaacatgcctggctgctgctgtgggtgatctttcattgaaccttctggtggttcatcattaaggtatgatgggatttcttgttgatttttatctgtctgattcatgatctcctgttggtgttgtatcgatattcctggggaacccctgagggcactcacaccagcagaagtttcaaaggcgccggggtcgcggccagcgctagggctggggccgggcggagtgagcgggccggcgcagaggagagctgaggcggcctgggcggcagcggcggccggcacaaccccgggcagtcgcggctccagaggcgtcctctcaggatgtggagctggaagactgtggcggcggtggtggaggcggaggcctctggctgcggacgtggcgcccgacgcgacccgcccgct

SEQ ID NO: 350932 - DNA, 822 bp, Homo Sapiens
tcactcaattaccttgctgagtaccttcaacccaaagcagcagaagggtgtgtgatgtccagccagccccagaatgaggaagtacacatcatcgagctaatcacccccaactctaacccctacagtgctttccaggtggatataacaattgatataagaccttctcaagaggatcttgaagtggtcaaaaatctcatcctgatcttgaagtgcaaaaagtctgtcaactgggtgatcaaatcttttgatgttaagggaagcctgaaaattattgctcctaacagtattggctttggaaaagagagtgaaagatctatgacaatgaccaaatcaataagagatgacattccttcaacccaagggaatctggtgaagtgggctttggacaatggctatagtccaataacttcatacacaatggctcctgtggctaatagatttcatcttcggcttgaaaataatgcagaggagatgggagatgaggaagtccacactattcctcctgagctacggatcctgctggaccctggtgccctgcctgccctgcagaacccgcccatccggggaggggaaggccaaaatggaggccttccatttcctttcccagatatttccaggagagtctggaatgaagagggagaagatgggctccctcggccaaaggaccctgtcattcccagccatacaactgtttcctggtctcagagagccagaagaggtgcaagggagcgtggatattgccctgtctgtcaaatgtgacaatgagaagatgatcgtggctgtaagaaaaagattcttttcaggccagtggtactcggggat

SEQ ID NO: 350933 - DNA, 817 bp, Homo Sapiens
agcggaagcggggaggagcgaccgctacaatggatcctcccgcaggctttgtgcgcgctgggaatccagctgtcgccgccccgcagagccccctgtccccggagggcgctcatttccgggccgcccaccacccgcgtagcaccggcagccgctgtcccggcagtctccagccgtcccgcccgcttgtggccaactggctccagtcactccccgaaatgccagtcgacttcactgggtactggaagatgttggtcaacgagaatttcgaggagtacctgcgcgccctcgacgtcaatgtggccttgcgcaaaatcgccaacttgctgaagccagacaaagagatcgtgcaggacggtgaccatatgatcatccgcacgctgagcacttttaggaactacatcatggacttccaggttgggaaggagtttgaggaggatctgacaggcatagatgaccgcaagtgcatgacaacagtgagctgggacggagacaagctccagtgtgtgcagaagggtgagaaggaggggcgtggctggacccagtggatcgagggtgatgagctgcacctggagatgagagtggaaggtgtggtctgcaagcaagtattcaagaaggtgcagtgaggcccaggcagacaaccttgtcccaaggaatcagcaggatgtgtgggccaggatccccctctttgcacagcatgaggcaaaaatgtccagccacccccaggcatctgttagcagagtctgtctcttggctttgtcacttttccttttcttaaaacaaagccatgccaataaagtgatctgtgttcaaaacgtca

SEQ ID NO: 350934 - DNA, 731 bp, Homo Sapiens
aacttaggctaggtacgaggcccaggtggtgaattcggcacgaggcacccgcgtagcaccggcagccgctgtcccggcagtctccagccgtcccgcccgcttgtggccaactggctccagtcactccccgaaatgccagtcgacttcactgggtactggaagatgttggtcaacgagaatttcgaggagtacctgcgcgccctcgacgtcaatgtggccttgcgcaaaatcgccaacttgctgaagccagacaaagagatcgtgcaggacggtgaccatatgatcatccgcacgctgagcacttttaggaactacatcatggacttccaggttgggaaggagtttgaggaggatctgacaggcatagatgaccgcaagtgcatgacaacagtgagctgggacggagacaagctccagtgtgtgcagaagggtgagaaggaggggcgtggctggacccagtggatcgagggtgatgagctgcacctggagatgagagtggaaggtgtggtctgcaagcaagtattcaagaaggtgcagtgaggcccaggcagacaaccttgtcccaaggaatcagcaggatgtgtgggccaggatccccctctttgcacagcatgaggcaaaaatgtccagccacccccaggcatctgttagcagagtctgtctcttgggcctttgtcacttttccttttcttaaaacaaagccatgcccattaagtgatctcgtgttcaac

SEQ ID NO: 350935 - DNA, 763 bp, Homo Sapiens
gcggcgacccccgcgtttacatacattatacgaagtaatcgatcaggcgcaatcggccgagctccaattcgtcgagagcggagtggactggacgtcattgccgggaacgagcgagtcgccgctgcagacctagtgactgcggcctgcatcccgattgtcttctcctccaaggtctacatgattacctgaagtttaataagtaagaccatgaattatggcatttcttaaatgaagcgttcaagaagtgagagaatgtcactagaaaatagacatgatttcaaagttatgtctcattaatctgactgtagatatatatatttacctccttagtaatgcaagaagtgtttgtgggaagcagagaagcaagcaactgtatttcttgttctcacctaagcattactggaggataagccacatcagtctacaaagaggttttcatacaaacataataagatgtaaatggaccaaaagtgaagcacattcttgcagtaagcactgttactctccaagcaaccatggtttacatattgggattttgaaacttagcacttctgctcccaagggacttacaaaagtgaacatttgtatgtcccgtattaaaagtactttgaactctgtttaaaggctgtttttggcaatcaaaatgaaatgatttcacgtttagctcaatttaagccaagttcccaaattttaagaaaagtatcggatagtggctggttaaaacagaaaaacatcaaacaagccatcaaatctctgaaaaaat

SEQ ID NO: 350936 - DNA, 1915 bp, Homo Sapiens
cgacctagctgctgcgccagtgtttgtgttggaagctcagctgatgcaggccggttggagtggacgtcattgccgggaacgagcgagtcgccgctgcagccctagtgactgcggcctgcatcccggtaagaccatgaattatggcatttcttaaatgaagcgttcaagaagtgagagaatgtcatagaaaataaatgatttttaagttatgtctattaatctgactgtagatatatatatttacctccttagtaatgcaagaagtgtttgtgggaagcagagaagcaagcaactgtatttcttgttctcacctaagcattactggaggataagccacatcagtctacaaagaggttttcatacaaacataataagatgtaaatggaccaaaagtgaagcacattcttgcagtaagcactgttactctccaagcaaccatggtttacatattgggattttgaaacttagcacttctgctcccaagggacttacaaaagtgaacatttgtatgtcccgtattaaaagtactttgaactctgtttcaaaggctgtttttggcaatcaaaatgaaatgatttcacgtttagctcaatttaagccaagttcccaaattttaagaaaagtatcggatagtggctggttaaaacagaaaaacatcaaacaagccatcaaatctctgaaaaaatatagtgacaaatcagcagaaaagagtccttttccagaagagaaaagtcacattatagacaaaggaagaagatataggtaaacgcatctttttcattacacaagttctataaccacaaaatttggagactcattctactttttatcaaatcatattaattcatatttcaaacgtaaggaaaaaatgtctcaacaaaaggaaaatgaacatttccgggacaaatcagaacttgaagataaaaaggtagaagaggggaaattaagatctccagatcctggcatcctggcttataagccaggctcagaatctgtacatacggtggacaagcctacaagtccttctgcgatacctgatgttcttcaagtttcaactaaacaaagtattgctaactttctttctcgtcccacggaaggtgtacaagctttagtaggtggttatattggtggacttgtccccaaattaaagtatgattcaaagagtcagtcagaagaacaggaagagcctgctaaaactgatcaggctgtcagcaaagacagaaatgcagaggagaaaaagcgtttatctcttcagcgagaaaagattatcgcaagggtgagtattgataacaggacccgggcattagttcaggcattaagaagaacaactgacccaaagctctgcattactagggttgaagaactgacttttcatcttctagaatttcctgaaggaaaaggagtggctgtcaaggaaaagaattattccatatttattacgactgagacaaattaaggatgaaactctttcagctgcagttagaagaattttgggccctaatgggctatgtgggatccagtggaaagggagaaggaatccgaaatctctccaatggatggtgggaggaaacaaggggccgtggtttggccttcccccacactacctacaaaattcgctggcccttcctcccgaaagcccccaaccacaccacgctttgcctaccttctcccgtgccgaccctcctcgtcggccgacaatccactctgcattgcccgctacttccctctctccagcctccttgtgctgttatccgacgtcccactgtctagccgagtagcagatgcatatcgcgtgttctgcccagactgcgacacattctcgtgtgtccgaatatataatggtctttgtctcttcactcatatactaaatctctaacacacacaaacatcaaacaacacctacttaccacacccc

SEQ ID NO: 350937 - DNA, 1149 bp, Homo Sapiens
  misc_feature (798)..(810): n is a, c, g, or t
  misc_feature (892)..(892): n is a, c, g, or t
ctcacttaattttaaaacataactgttacagaagaaagctacatcacagtacagtacagaacataaaattcaccctagtctggaagccattatggaatggcacatcacctacacttagaccttctaatgtaggttggaattacagtatttatcacagctttattttcttaaaacggataaaatttgaatacactttctgtttttcaggagtgtgcagatggggcccatatgttggtattacagtaattacaacagtaaataacattgcacagtcaacctccaaggctaattcagtataaaataacaagtattaaaatgtacctttactagtggttttacatcgcatatatcactaattatgaaagaaaagtaggcaaatgcccaaccacaaagcggcacattataggcataatgatgtggaataaatacaagaaatctggcaaaatatttaaaacaaacgagttacatgggaacaaactgaacaaccacataagcataaatcaatcatatactgttataaatagtatgttttgctcacaagtctcttaagtacttatagatattacagtggcaggggtgaatgaagaggatagcaggagaatgaggcaaatgttcccaatgccagttaattcctgaggtggcattatttcttaactgatgcattgatcaacactgtaaagatgagtttgtgctgtgaaacagtcccaatattattatattcccgcaattaaattgcggtattctgaaggcagcaaacctacgtgacagtttatgttataatagccagataaagtatgnnnnnnnnnnnnnaaattttgttgctacagttagcagtgggtcagaaaacacttcaaagttcaaaagaaacttgatgtagatttaacttttttcnccggtacttcctagttagctcaaggcaatgctattactgaatttcatgtacttgaatttaaaaactctaagtgccaacactgtaaacattttgtatcttctcaactaaaacttgcgggataacaaggaaaagagcaaagataagcagtaataattttgtgtataataaagctgatctatttttcagcttctggtttaaatttaaataagattttaaaacaatttttaaaggtatgccgggaattccggaccggtcca

SEQ ID NO: 350938 - DNA, 592 bp, Homo Sapiens
  misc_feature (536)..(536): n is a, c, g, or t
  misc_feature (547)..(547): n is a, c, g, or t
  misc_feature (556)..(556): n is a, c, g, or t
gatttctgcacctgaatgtatgtttgatgctttgatttgaaaatgttcttccctgttatttacattctggtgggtttttaaaattcttacctccatcatgcaattttgaaaattgtgtccagaattaaaagtgcatagaaatagcctttacaattgtagcatggacctttaaaaattgttttaaaatcttatttaaatttaaaccagaagctgaaaaatagatcagctttattatacacaaaattattactgcttatctttgctcttttccttgttatcccgcaaggtttagttgagaagatacaaaatgtttacagtgttggcacttagagtttttaaattcaagtacatgaaattcagtaatagcattgccttgagctaactaggaagtaccgggaaaaaagttaaatctacatcaagtttcttttgaactttgaagtgttttctgacccactgctaactgtagcaacaaaatttaaaagaaaattcagaataccgcaatttaattgcgggaatataataatattgggactgtntcacagcacanactcatctntacaagtgtgatcaatgcatcagttaagaaataatg

SEQ ID NO: 350939 - DNA, 891 bp, Homo Sapiens; identical to SEQ ID NO: 91859

SEQ ID NO: 350940 - DNA, 246 bp, Homo Sapiens
gcctcccaaagtgctgggattacaggcatgaaccgccatgcctggcccttgatttttctttttaagaaaaaaatatctaggagtttcttagaccctatgtagattattaatgaacaaaagattaaactccaaatattaaatagtaagcctgaaggaatctgaaacacttgtacttccaattttctttaaataatcccaaatagaccagaattggcccataccatagaagaaagaattggcagtcaa

SEQ ID NO: 350941 - DNA, 919 bp, Homo Sapiens
  misc_feature (627)..(641): n is a, c, g, or t
ggaaactatagagtttgggccttggaactgttactgccttgtcctagagttgtcctgatcaggcttggggcctagttacagattagtcttaaagaattgcattaacttaaaaaaaatcaaaccttggcaagagctgaagaaaggagagtctaagtgagactctggcctacttcctaacaatgtcttggaagtgggatgatggtaaaggagaaaggccacagtccaatccctctgccttcagatagggaactcaaatcctgaaattactgttttctttctggccttttctcctggttagaggaggaagcggaaagtagttttgagtaatactttgttcatattaccccccttttggtttttgtttctggcccctctaccaatagggcagtagcctcctgccctggatgggtataaggtgggcttggtccaacaggttcccagagggtacatactcctttcttgggagagaatgctccctaccatatagttgacagtggttaggaactctccctttccctacctaccttccttttaaatagcagaattcctatttttcccttgattatgtgtaattgaatcaccctgcaatcctattatgtatctgagtgtgtgtatgtgtgtgttatnnnnnnnnnnnnnnnttctttaaaatttctgtggtttgtggctttttcttccatacattagttcccaccatcgcatgcccagggaccactgcctggcattatcgcatgctgggatcatcgggggagggtagtgaagctcaccactgtcctttgttttggagatttttatttttgcataagtagtccatcctatacagatagctgattaactgtattcccctttcccctatggctgctggtgtaaataaactgcatctccccattggtaaacagtaataaaattttaaaaaatg

SEQ ID NO: 350942 - DNA, 1536 bp, Homo Sapiens
  misc_feature (143)..(194): n is a, c, g, or t
  misc_feature (1228)..(1235): n is a, c, g, or t
agcggtcgggcttggccctgtgttcctcctgtcccctgctccactgcctatctggtgccccaggtgctgcttgccactccagctgtcacattgaacagtttcaattcagctcttaatgctcctgcttccgaagcctgcccaannnnnnnnnnnnnnnnnnnnnnnnnnnnnnnnnnnnnnnnnnnnnnnnnnnngtagaagactcagaggagaatctttcttatggctccctctgttgagattggaattggaagagaacttaattttgtatttaaaatgcagtgtcatgcctataagcatttctcctatataggactgctttgctagtgtgccctcttgctgtgtcttacttcataaggagttgtatcttcccacctccatttcaatactgccggttaggacctaagtagaaaagcagtaaaggctgattgacacacagggggatggagttggtccttgtccattctctcacccttgctgtgcatgtatcaatccttatcccagaaggtactatttagactgtatagactgatttagattacatactttagaggattaaggaaaccatagagtttgggccttggaactgttactgccttgtcctagagttgtcctgatcaggcttggggcctagttacagattagtcttaaagaattgcattaacttaaaaaaaatcaaaccttggcaagagctaaaataatttggagatatctttgcccttgacttgtagacgacatctaagaggatgaagaaaggagagtctaagtgagactctggcctacttcctaacaatgtcttggaagtgggatgatggtaaaggagaaaggccacagtccaatccctctgccttcagatagggaactcaaatcctgaaattactgttttctttctggccttttctcctggttagaggaggaagcggaaagtagttttgagtaatactttgttcatattaccccccttttgttttttgtttctggcccctctaccaatagggcagtagcctcctgccctggatgggtataaggtgggcttggtccaacaggtgcccagagggtacatactcctttctggggagagaatgctccctaccatatagttgacagtggttaggaactctccctttccctacctaccttccttttaatagcagaattcctatttttcccttgattatgtgtattgatcaccctgcaatcctattatgtatctgagtgtgtgtatgtnnnnnnnngtgtgttatgggggaagggggggttctttaaaatttctgtggtttgtggctttttcttccatacattagttcccaccatcgcatgcccagggaccactgcctggcattatcgcatgctgggatcatcgggggagggtagtgaagctcaccactgtcctttgttttggagatttttatttttgcataagtagtccatcctatacagatagctgattaactgtattcccctttcccctatggctgctggtgtaaataaactgcatctccccattggtaaacagtaataaaattttaaaaaatg

SEQ ID NO: 350943 - DNA, 785 bp, Homo Sapiens
  misc_feature (39)..(39): n is a, c, g, or t
  misc_feature (74)..(74): n is a, c, g, or t
  misc_feature (107)..(159): n is a, c, g, or t
ataggcatgaacactgcatttttaaatacaaaaaatttnaagttctcttccaattccaatctcaacagaggganccataagaaagattctcctctgagtcttctacnnnnnnnnnnnnnnnnnnnnnnnnnnnnnnnnnnnnnnnnnnnnnnnnnnnnnttgggcaggcttcggaagcaggagcattaagagctgaattgaaactgttcaatgtgacagctggagtggcaagcagcacctggggcaccagataggcagtggagcaggggacaggaggaacacagggccaagccagacagatgaggctggaccccctactggggcacagaatgaggtaagaaaacatttcaaataaagcagcaccgttcccgctcacctcggggctcccacccctttatacttcataaaccctcgctcagggaataaagtggagggtagttttgatatgtgactcttacttcccatcttcccctataccattccctaaagtcaggagattctggaggtctttctctgacttctaacaataaaaggactgctcctgttgtcaagaagatccaaaggggaccgagtggtaaaggactatccctttcgagcggcagacagaaagtggtgacagtctggatgttcaccatagcagagctctgcccaaccaaagaaaacagggacattcaacaggattctgcacacagtcagatgagataatccagtcctgctccttggcttcctagcactaatccggacgcgtggtcgacggatatcccggtattccgggccgtaccagc

SEQ ID NO: 350944 - DNA, 823 bp, Homo Sapiens
  misc_feature (629)..(681): n is a, c, g, or t
cgtgtttatcgactgccacttcagacatagttaggaagtaggccagagtctcacttagactctcctttcttcatcctcttagatgtcgtctacaagtcaagggaaaagatatctcaaaattattttagctcttgccaaggtatgataaattttaagttaatgcaattctttaagactaatctgtaactaggccccaagcctgatcaggacaactctaggacaaggcagtaacagttccaaggcccaaactctatggtttccttaatcctctaaagtatgtaatctaaatcagtctatacagtctaaatagtaccttctgggataaggattgatacatgcacagcaagggtgagagaatggacaaggaccaactccatccccctgtgtgtcaatcagcctttactgctcttctacttaggtcctaaccggcagtattgaaatggaggtgggaagatacaactccttatgaagtaagacacagcaagagggcacactagcaaagcagtcctatataggagaaatgcttataggcatgacactgcattttaaatacaaaaaattaagttctcttccaattccaatctcaacagagggagccataagaaagattctcctctgagtcttctacnnnnnnnnnnnnnnnnnnnnnnnnnnnnnnnnnnnnnnnnnnnnnnnnnnnnnttgggcaggcttcggaagcaggagcattaagagctgaattgaaactgttcaatgtgacagctggagtggcaagcagcacctggggcaccagataggcagtggagcaggggacaggaggaacacagggccaagcccgaccgct

SEQ ID NO: 350945 - DNA, 475 bp, Homo Sapiens
  misc_feature (93)..(93): n is a, c, g, or t
  misc_feature (150)..(175): n is a, c, g, or t
gggagagaatgcctcccctaccataatagttgaccagtggttaggaactctcccctttccctacctaccttccttttaatagcagaaattccnaatttttccccttgattatgtgtattgatcaccctgcaatcctattatgtatctgannnnnnnnnnnnnnnnnnnnnnnnnntatgggggaagggggggttctttaaaatttctgtggtttgtggctttttcttccatacattagttcccaccatcgcatgcccagggaccactgcctggcattatcgcatgctgggatcatcgggggagggtagtgaagctcaccactgtcctttgttttggagatttttatttttgcataagtagtccatcctatacagatagctgattaactgtattcccctttcccctatggctgctggtgtaaataaactgcatctccccattggtaaacagtaataaaattttaaaaaatgaaaaa

SEQ ID NO: 350946 - DNA, 849 bp, Homo Sapiens
  misc_feature (19)..(19): n is a, c, g, or t
acaccttcgacacactttntggggcaagcccggcatctctttctgggtagaagccctcaccacaggctggcacacacttccagtcgtggaagtggaagtttttcgcacagtgaatgcacctcttctctgcctggccccacgcaggttccgcaggtgtgatggcattccccacatctgatcagctctgagtcaaagtaggtgcctggctcacagtcaggaatgcagctgccccgtgcaaggctgaatccttctttacagacagtacatttctcaggttcatccacgcactttttacagcttgggtggcatttaaggcaatttttctgactttcatcagcataaaatcctgcaggacagagggtcacacaggtgttcatctcctggtggtgatagaacccgcggcggcaagacaggcactgcgtcgcagctctgctggagcaggtctcacaccccttgtggcaccggcgacagcgtcttgctgctgtgtccccaaagtagcccaaggggcacacactcacgcacttcctgctggtcttgacactccccaggctgaagtggacgcagttcaagcactggtctgcattggggccatcacagcctttgtcaccacactccggatggcacacactggtctgtaaaatattagcagagcctgggtctcttgtccgaggcggccacacacatgtgctgcgatggcactgctgtccacttctttgcctccacaacgagagcttctgcgtccaccaaaccaaatccatagaaatggctaactttatgacccgcgccgttcactttccagtcgctcgctttcaggtgggccggccgggatgtcttcactagcaggtgctg

SEQ ID NO: 350947 - DNA, 3611 bp, Homo Sapiens
  misc_feature (3414)..(3431): n is a, c, g, or t
gcctgggtggcgaattcggcacgaggccggcttcgagaacgcctggctgggcttttcaatgagcagcgcaagggtcagagagcaaaggatgtgcgggagaacccgcgtgccatggccaagctgctgcgtgaggctaatcggctcaaaaccgtcctcagtgccaacgctgaccacatggcacagattgaaggcctgatggatgatgtggacttcaaggcaaaagtgactcgtgtggaatttgaggagttgtgtgcagacttgtttgagcgggtgcctgggcctgtacagcaggccctccagagtgccgaaatgagtctggatgagattgagcaggtgatcctggtgggtggggccactcgggtccccagagttcaggaggtgctgctgaaggccgtgggcaaggaggagctggggaagaacatcaatgcagatgaagcagccgccatgggggcagtgtaccaggcagctgcgctcagcaaagcctttaaagtgaagccatttgtcgtccgagatgcagtggtctaccccatcctggtggagttcacgagggaggtggaggaggagcctgggattcacagcctgaagcacaataaacgggtactcttctctcggatggggccctaccctcaacgcaaagtcatcacctttaaccgctacagccatgatttcaacttccacatcaactacggcgacctgggcttcctggggcctgaagatcttcgggtatttggctcccagaatctgaccacagtgaagctaaaaggggtgggtgacagcttcaagaagtatcctgactacgagtccaagggcatcaaggctcacttcaacctggatgagagtggcgtgctcagtctagacagggtgggagtctgtatttgagacactggtagaggacagcgcagaagaggaatctactctcaccaaacttggcaacaccatttccagcctgtttggaggcggtaccacaccagatgccaaggagaatggtactgatactgtccaggaggaagaggagagccctgcagaggggagcaaggacgagcctggggagcaggtggagctcaaggaggaagctgaggccccagtggaggatggctctcagcccccaccccctgaacctaagggagatgcaacccctgagggagaaaaggccacagaaaaagaaaatggggacaagtctgaggcccagaaaccaagtgagaaggcagaggcagggcctgagggcgtcgctccagccccagagggagagaagaagcagaagcccgccaggaagcggcgaatggtagaggagatcggggtggagctggttgttctggacctgcctgacttgccagaggataagctggctcagtcggtgcagaaacttcaggacttgacactccgagacctggagaagcaggaacgggaaaaagctgccaacagcttggaagcgttcatatttgagacccaggacaagctgtaccagcccgagtaccaggaagtgtccacagaggagcagcgtgaggagatctctgggaagctcagcgccgcatccacctggctggaggatgagggtgttggagccaccacagtgatgttgaaggagaagctggctgagctgaggaagctgtgccaagggctgttttttcgggtagaggagcgcaagaagtggcccgaacggctgtctgccctcgataatctcctcaaccattccagcatgttcctcaagggggcccggctcatcccagagatggaccagatcttcactgaggtggagatgacaacgttagagaaagtcatcaatgagacctgggcctggaagaatgcaactctggccgagcaggctaagctgcccgccacagagaagcctgtgttgctctcaaaagacattgaagctaagatgatggccctggaccgagaggtgcagtatctgctcaataaggccaagtttaccaagccccggccccggcctaaggacaagaatgggacccgggcagagccacccctcaatgccagtgccagtgaccagggggagaaggtcatccctccagcaggccagactgaagatgcagagcccatttcagaacctgagaaagtagagactggatccgagccaggagacactgagcctttggagttaggaggtcctggagcagaacctgaacagaaagaacaatcgacaggacagaagcggcctttgaagaacgacgaactataacccccacctctgttttccccattcatctccacccccttcccccaccacttctatttatttaacatcgagggttgggggaggggttggtcctgccctcggctggagttcctttctcacccctgtgatttggaggtgtggagaaggggaagggagggacagctcactggttccttctgcagtacctctgtggttaaaaatggaaactgttctcctccccagccccactccctgttccctacccatataggccctaaatttgggaaaaatcactattaatttctgaatcctttgcctgtgggtaggaagagaatggctgccagtggctgatgggtcccggtgatgggaagggtatcaggttgccggggagtttccactcttctctggtgattgttccttccctcccttcctctcccaccatgcgatgagcatcctttcaggccagtgtctgcagagcctcagttaccaggtttggtttctgagtgcctatctgtgctctttcctccctctgcgggcttctcttgctctgagcctcccttccccattcccatccagctcctttccccctgggtttccttggcttcctgcagcaaattgggcagttctctgccccttgcctaaaagcctgtacctctggattggcggaagtaaatctggaaggattctcactcgtatttcccacccctagtggccagaggagggaggaggcacagtgaaagaagggagcccaccacctctccgaagaggaaagccacgtagagtggttggcatggggtgccagcatcgtgcaagctctgtcataatctgcatcttcccagcagcctggtaccccaggttcctgtaactccctgcctcctcctctcttctgctgttctgctcctcccagacagagcctttccctcaccccctgaccccctgggctgaccaaaatgtgctttctactgtgagtccctatcccaagatcctggggaaaggagagaccatggtgtgaatgtagagatgccacctccctctctctgaggcaggcctgtggatgaaggaggagggtcagggctggccttcctctgtgcatcactctgctaggttgggggcccccgacccaccatacctacgcctagggagcccgtcctccagtattccgtctgtagcaggagctagggctgctgcctcagctccaagacaagaatgaacctggctgtgtcagtcatttgtcttttccnnnnnnnnnnnnnnnnnngccacattggcagagatggacctaagggtcccacccctcaccccacccccacctcttctgtatgtttgaattctttcagtagctgttgatgctggttggacaggtttgagtcaaattgtactttgctccattgttaattgagaaactgtttcaataaaatattcttttctacagttaaaa

SEQ ID NO: 350948 - DNA, 749 bp, Homo Sapiens
gttccacctgttggcccccttccccttctttttggccccactagggggttgggaaaataacgaattgagaatcccttcccaaattttacttccgcccaatcccagaggtacaggccttttaggcaaaggggcagagaactgccccaatttgctgcaggaagccaaggaaacccagggggaaaggagctgcatgggaatggggaagggaggctcagagcaagagaagcccgcagagggaggaaagagcacagataggcactcagaaaccaaacctggtaactgaggctctgcagacactggcctgaaaggatgctcatcgcatggtgggagaggaagggagggaaggaacaatcaccagagaagagtggaaactccccagcaacctgatacccttcccatcaccgggacccatcagccactggcagccattctcttcctacccacaggcaaaggattcagaaattaatagtgatttttcccaaatttagggcctatatgggtagggaacagggagtggggctggggaggagaacagtttccatttttaaccacagaggtactgcagaaggaaccagtgagctgtccctcccttccccttctccacacctccaaatcacaggggtgagaaaggaactccagccgagggcaggaccaacccctcccccaaccctcgatgttaaataaatagaagtggtgggggaagggggtggagatgaatggggaaaacagaggtgggggttatagttccc

SEQ ID NO: 350949 - DNA, 2003 bp, Homo Sapiens
  misc_feature (1545)..(1554): n is a, c, g, or t
  misc_feature (1569)..(1590): n is a, c, g, or t
  misc_feature (1661)..(1669): n is a, c, g, or t
  misc_feature (1850)..(1899): n is a, c, g, or t
tctctggtccctgcggctggcggccgagccgtgtgtctcctcctccatcgccgccatattgtctgtgtgagcagaggggagagcggccgccgccgctgccgcttccaccacagtttgaagaaaacaggtctgaaacaaggtcttacccccagctgcttctgaacacagtgactgccagatctccaaacatcaagtccagctttgtccgccaacctgtctgacatgtcgggacccgtgccaagcagggccagagtttacacagatgttaatacacacagacctcgagaatactgggattacgagtcacatgtggtggaatggggaaatcaagatgactaccagctggttcgaaaattaggccgaggtaaatacagtgaagtatttgaagccatcaacatcacaaataatgaaaaagttgttgttaaaattctcaagccagtaaaaaagaagaaaattaagcgtgaaataaagattttggagaatttgagaggaggtcccaacatcatcacactggcagacattgtaaaagaccctgtgtcacgaacccccgccttggtttttgaacacgtaaacaacacagacttcaagcaattgtaccagacgttaacagactatgatattcgattttacatgtatgagattctgaaggccctggattattgtcacagcatgggaattatgcacagagatgtcaagccccataatgtcatgattgatcatgagcacagaaagctacgactaatagactggggtttggctgagttttatcatcctggccaagaatataatgtccgagttgcttcccgatacttcaaaggtcctgagctacttgtagactatcagatgtacgattatagtttggatatgtggagtttgggttgtatgctggcaagtatgatctttcggaaggagccatttttccatggacatgacaattatgatcagttggtgaggatagccaaggttctggggacagaagatttatatgactatattgacaaatacaacattgaattagatccacgtttcaatgatatcttgggcagacactctcgaaagcgatgggaacgctttgtccacagtgaaaatcagcaccttgtcagccctgaggccttggatttcctggacaaactgctgcgatatgaccaccagtcacggcttactgcaagagaggcaatggagcacccctatttctacactgttgtgaaggaccaggctcgaatgggttcatctagcatgccagggggcagtacgcccgtcagcagcgccaatatgatgtcagggatttcttcagtgccaaccccttcaccccttggacctctggcaggctcaccagtgattgctgctgccaacccccttgggatgcctgttccagctgccgctggcgctcagcagtaacggccctatctgtctcctgatgcctgagcagaggtgggggagtccaccctctccttgatgcagcttgcgcctggcggggaggggtgaaacacttcagaagcaccgtgtctgaaccgttgcttgtggatttatagtagttcagtcatnnnnnnnnnnttataataggctgannnnnnnnnnnnnnnnnnnnnnaactcgaacttttcataactcaggggattccctgaaaaattacctgcaggtggaatatttcatggacaaannnnnnnnnctcccctcccaaatttagttcctcatcacaaaagaacaaagataaaccagcctcaatcccggctgctgcatttaggtggagacttcttcccattcccaccattgttcctccaccgtcccacactttagggggttggtatctcgtgctcttctccagagattacaaaaatgtacctttctcnnnnnnnnnnnnnnnnnnnnnnnnnnnnnnnnnnnnnnnnnnnnnnnnnnccccaatctaatagggagcagtggggacctgctttgcctggttcgcctttaacattcacctttaacctcccataaaggcggcctttccagtggggggggcttat

SEQ ID NO: 350950 - DNA, 834 bp, Homo Sapiens
gggccatattgtctgtgtgagcagaggggagagcggccgccgccgctgccgcttccaccacagctctatcaaggcttgtcaagcagtgtgctcatcacatggtaaatcatgcagcgtggaacctcataaaatctccaagaaacatcattcacccatactgactagtttcacatctctttgtttgaagaaaacaggtctgaaacaaggtcttacccccagctgcttctgaacacagtgactgccagatctccaaacatcaagtccagctttgtccgccaacctgtctgacatgtcgggacccgtgccaagcagggccagagtttacacagatgttaatacacacagacctcgagaatactgggattacgagtcacatgtggtggaatggggaaatcaagatgactaccagctggttcgaaaattaggccgaggtaaatacagtgaagtatttgaagccatcaacatcacaaataatgaaaaagttgttgttaaaattctcaagccagtaaaaaagaagaaaattaagcgtgaaataaagattttggagaatttgagaggaggtcccaacatcatcaccctggcagacattgtaaaagaccctgtgtcccgaacccccgccttggttttttgaacacgttaaacaaccccagactttcaaggcaattggtaccagaccgttaaccagacttatggattattccaatttttacctggaatgaagaattctggaagggccccctgggaattattgggtccaccaggcattgggggaaatttattgccccagcaggaatggtcaaaggcccccccataaatgggtccctttgaattttc

SEQ ID NO: 350951 - DNA, 1000 bp, Homo Sapiens
  misc_feature (457)..(457): n is a, c, g, or t
  misc_feature (934)..(955): n is a, c, g, or t
ggcctgggtggcgaattcggcacgagggaggggagagcggccgccgccgctgccgcttccaccacagctctatcaaggcttgtcaagcagtgtgctcatcacatggtaaatcatgcagcgtggaacctcataaaatctccaagaaacatcattcacccatactgactagtttcacatctctttgtttgaagaaaacaggtctgaaacaaggtcttacccccagctgcttctgaacacagtgactgccagatctccaaacatcaagtccagctttgtccgccaacctgtctgacatgtcgggacccgtgccaagcagggccagagtttacacagatgttaatacacacagacctcgagaatactgggattacgagtcacatgtggtggaatggggaaatcaagatgactaccagctggttcgaaaattaggccgaggtaaatacagtgaagtatttgnaagccatcaacatcacaaataatgaaaaagttgttgttaaaattctcaagccagtaaaaaagaagaaaattaagcgtgaaataaagattttgggagaaatttggagaaggaagtccccaacattcaccacactgggcagacattggtaaaaaacccctgtgtcacgaaccccccgccttgggttttttgaaacacgtaaaccaaccccgacttccaaagcaatggaacccaaaactttaacggacctatggataattccaatttttaacatgggatggaaaaattcctgaaagggccctggggatttattggtccccaggcattgggggaaaattatgccccccaaaaatgttaaaagccccccaataaagggcccgggaattgggaccctgggagccccccgaaagggttaaaaaaacccccccggaacccttcaaaaaaataactggggggaatttaccaaaagcccccaatgtnnnnnnnnnnnnnnnnnnnnnnaaaaaaacccccggaaggggtttttcccccaattggggggttccc

SEQ ID NO: 350952 - DNA, 857 bp, Homo Sapiens
gtgtggggcgtggtgtgtgggtttgcgttgcgcatgtgtaaaggaaaaaagcagggtcccttgagataatggtttcccaacctgaatcgtacccggaccccaaagaatgtaatccaaatctatttttctcacgtgtttaaaaaactgaaaagtgactactcagatatgttggaagtcacatcgaagactatcagaatattaccttgtgttcataggttaacttgtttttgtacacgtcttagttatttcaggcatctctttgcttaaaattgagtttcttgtaaatgtgactgatgagcgaggttagaagtggaagaaattcctgtgcatgttctataatctgacaccctgaaagcaagtttcctttcgtcattcacatgctcttgttctgccgtgactgttcaggtgtatggtagtaagtaaatgtattaacatggtgaacagtagtaatattctatcatagagtattagcccttgcaagttttcagggcgtcttttccgacttcagtttttgtgataaagaatgtgaacagttgttagatgttctcagtgattcaactttaaaacaaatttctcgtgatgattcatttcaaaatcctgagtgagtctgactgaaaaatacgagagaaaagagagtggtttccgtttgcagctacacagctgtgtgcatcgacgttctcctggggtgtgtgccaagcgaaacccaggggtgaattggattcttgaagagaccaaagcctgtaactgtccagcttctaatttcaaaacgggtccattagggcttcgttgtgttaacaagttgacaccatgactagtaaatgtaaacgtgtatgtataaaataaagtttagcaaatta

SEQ ID NO: 350953 - DNA, 533 bp, Homo Sapiens
  misc_feature (349)..(349): n is a, c, g, or t
cattcctggattaaagcacttgtaatcagtaaccagaaagttccagagcgggagagaccggaaggcactggagtgctatcggacgggtgtctggggcagagccaggagggcgagcctcttctctccccgcctgcccttgctcacttccccctccatgccaggtgctgtgggagcagctgggcctggccggggtcggcgggtgaagctatccgcatggtgtctggagcaccgtttctttgcttcctggatgggctggatgggctcccgtgttcttcaccaatggcagcgttaccagcaccaatggcagcgttaccagcaagaaggcaaaggcaggagcacatcgagggtngggagccagggctgtggggtcaggagtcccgctccttgccgcgggaagcctggctcagccacctccagcacacttcggctttgtccagcataaaaggcagagcgacgttttcactgcaggctgtttcccaccagggcaagtgggacagggcgagtgctgacgtctgcaggcatggtgtgcattt

SEQ ID NO: 350954 - DNA, 674 bp, Homo Sapiens
  misc_feature (536)..(536): n is a, c, g, or t
  misc_feature (573)..(573): n is a, c, g, or t
ctgtgtcttaggttggcattcaggtcacatgaaaggtgtgtggaaagtggccagcattctgcctgcagaccctgagcactgagtcaacaaggtttgtgatgatgtctgtactagttagctattgttattaacaagatctccatggcagacaagctaaagcatctgcctaagtcgtgagtctgtgggttgcctcgggttaagctgagcttggctgggcttggcagcaagtctcagatttgatcaagtcatattcgttttcttcttcggctggtgggctacccagagcgagcacgcttctctcgtggtcatgccaagaacacaggagggtgagtctaacaagcacacctcaagcctctgcttgggtcacattgccaatgtcctctcagcccatacaagtggcaggaccaggcccaatattaaggagtggaaaagtgtaggctgcccttggtgaagctgtgacaagggagtgaccatccatcccctccacaggaggtcgaggaattgggacaggtaattccagccaatacctgggtccntagttctttcacattgtgagttatatggattacgggnaaattaggaaccccttccccaccacctacacacattgttgtttttaactttccaaggattgggacttgtgcaaaaattagggtttccgattcgtgagggtt

SEQ ID NO: 350955 - DNA, 752 bp, Homo Sapiens
  misc_feature (234)..(235): n is a, c, g, or t
tttatcgatgccactagcttaagtcagagtctagacaggaaaatgggtcactgaaagctctctgctcagatcagctagccccctggagcttttcctggattcacaagctcctctttggtaatgtctgtgagtcaaatctgttctcagctgaaagcatctcagtttggaggcattttcatgggcggagaggagggaaaggggcagcttggcccttgaagtacttcatgggggggnngataattcagggatccaggatgcccagaggaagagtgtgatttcacaccttctgctctttgcaagcctatgcctttgggaggcctgaagggagggtgttaacctggcaggaactgtgtaccctctgcacagtgcttggcacacactgagcacaaaatcaatgcttgcttttgtgggtgctgctctgggaagagcatgggctctgtagagttctgcgcaatgcaatagccacctctctgagttccaatatcctcatgtctaagatgggatgagaatatcaccttcacaggattattatggggattaatgccattactctgtgacagtgcctgctatgtggtagagcctcaagaaatgttagctgcttttccacctccttaatcctgctgggatctatacaccctaaaacccacttgggaagatttatgtgtgaagttcagggagcagaattgagggcaaattaatcagctatcaagattccaacagacacagatatcactttgatcagtagcatccta

SEQ ID NO: 350956 - DNA, 1210 bp, Homo Sapiens
  misc_feature (29)..(29): n is a, c, g, or t
  misc_feature (88)..(241): n is a, c, g, or t
  misc_feature (252)..(252): n is a, c, g, or t
  misc_feature (283)..(283): n is a, c, g, or t
ctggctttcaagactatggacaagtgtcnattcaacagttatcaaccctggcaggaagcagatatctttctgtgtatatctggatccnnnnnnnnnnnnnnnnnnnnnnnnnnnnnnnnnnnnnnnnnnnnnnnnnnnnnnnnnnnnnnnnnnnnnnnnnnnnnnnnnnnnnnnnnnnnnnnnnnnnnnnnnnnnnnnnnnnnnnnnnnnnnnnnnnnnnnnnnnnnnnnnnnnnnnnnnntgggatttgtncctaggtcccctgaactcccaagcacagtgnctatctccactagacccaagctgcccttgtctctgggactcaagagaagcctgcataggagctgaaggtcaagaggttgcaggcttatctcatatgcacatacttggacctccctaccacacagctgccagcgacaagaaagggcttcttttccttccagccaggtccagaattcaatgtcatttttctagcttagattatctaaaaaaaatgccacaacaggggatacaaattttaacatattttattgatttaggggccaaacaaggcagcatttggtcagttaagaaaggcacctcattgaaaataatacatcacagtgctgttgagtgatcccagtcacaggatttgagaatggaaaggacaatctttggatgacatagcttaggacacttgctcatttatttaaaagagtcccttcacacagtgcagataaaagaaggcaagagcataggattgtggcatgtgctgggtagctgtgagaggttactcatgaaagtaggtagcctagtaaattagtggtaagtcaggggaagggaatcagcctccctttccatttcattcccttccccctccccttgattccagtttgcttgatttgttgagccaccatccctatgaatacaccttacatctctttcaaatgtggagatggttttttgatcttacagtgtgtggaaccggagtcagtaatcaaagctccctgttccaagctatagacagacaggacaacaatttgatttcctgtactcttggtctggaacccatggggttctgagataaaagctgaggtcttagagcactggctttaaaaaatattttcaccagtccagagtaaatgaaaacccgattccttagaaataatattgtgtctatttctacccccaccctccaagcatggtgttttttaaaaaattaatttttccc

SEQ ID NO: 350957 - DNA, 771 bp, Homo Sapiens
ggccgcgcccctggccccggggccgcgggcgccgcgcgtggaggccgctttcctctgccgcctgcgccgggacgcgttggtggagcggcgcgcgctgcacgagcttggcgtctactacctgcgctcggggagccgccgaggagggggccgccgcgcccccgggaccacctgcgcctgctcatctgcatccagtcccggtgccagcgcaacgcctccctggaggccatcatgggcctggagagcagcagtgagctcttcaccatctctgtgaatggcgtcctgtacctgcagatggggcagtggacctccgtgttcttggacaacgccagcggctgctccctcacagtgcgcagtggctcccacttcagtgctgtcctcctgggcgtgtgagcggccaccacaggcccttcctctcaggggcaaatggagcacagatctagacaatgtgtggacagtgtcagagtagcagtggccacatggaggaggaggcccacccggaactctgcccacactggccactgcagttcagcccacagagccactgcaggcaggcctacggacgtgacacgcacgctggtggtcccggagccagggttgattcaggacaccatcttggactctttcctggccttgctcagcacctgcccagatggcctctgcgtcttttcctgttgcccagccccaccttttccacctcttttcatgttctcatggagtgcaaagtgcaccagccagggcccctacctgggaagagggtcagctgacgcaggg

SEQ ID NO: 350958 - DNA, 1371 bp, Homo Sapiens
ttcacccggatctggtccatgttgcggcgacgtcccgctcgggctgatccaagtcctctgcgtatctctgcaccagggcttcaggaatcccacagcggccatgcttatcagaatacggctcctccgtgagatcgatgccttcagcgtgcagcttgttttcagtgagcgtttctagatccactccccgggcacaggagaccttcctggtcaaagccgggcccagcttcacaccgtgctcctggaggcttgtgttctcggggagctctgagagccaggggggcggccttgtgcttggtgggctgccaggcgcctgccctgagagaggcctgggagccagtgctgggggacagtcgctaggcctggtggggctggcggggctgccccttttcactggcaggcatggcgcatcgggacctggggaggaccccactggggcccatgggaacagggtggagtccgttagcaaggcgttctctgctctttttggcaggaacaggtggaggctgtgatggaattttgggctgcattctctgctcagcatctaccccttctttggtgcccaggggatggtgtgttccttcaaactcgtgtccttttctgtggccctccagaggcgtccttgctaaaccgtgtttagctccaggaggctgagcatcatagtttctgggcaaacactgagggggtgacaggccgcgaccagaggctgcgattgagccctccagtttcttagttgtcaatttctgaggttcagaaaatctcttgctttggctcagtagcaatgcatggtcgacagcagagtcttgctccaggggcctgggccttcgtggaagaggcggctcgtcttctgtggcacttcaggtacaatctgagggggcggttctgtcacctcggtaggcacgtcttgctcagcaccaggctccacttgaaggtcatccagggaatgggatcggggccaagtgtccacagtctgggggccctccagggtctcacagctccggcagatggaaactgggaggcttcttcggtttttattcaaaccagtcacaccaggtgggtcacagctcttggacgtgtctggggcaaggccaccacccagcctgccctcctcctgtccctgcttcagtgcatcccctgatttcattaaaggcaatgttgggtaattgcccaactggtttctgctaaaagacttcaagctgggctcggtggatgacttggcagataggaggctagctttccgagtcttgccattttccaggttctcactgctttcgtagcatcctgagtctcggggtgagcatccactcaggccctggctgtcaacgagcagcttctcctgggatcctgactggtcgctgttactgtcatactctt

SEQ ID NO: 350959 - DNA, 410 bp, Homo Sapiens
  misc_feature (52)..(73): n is a, c, g, or t
cccggctcgtctgcccaccctaaatttctctttcccagctgctgttttgttnnnnnnnnnnnnnnnnnnnnnnccccaaactagtgagagtaatatctaattatctcattttttgtaggtctgtgataaagaacttagtcatcccttccacctcctactgtgaagaacagaccctgggtcccacactgaaatcccctctagtcacccattcccaccccccagggagctgcctcccaggcagggggtgcagaaaatgattgatgggctggggaaccctggagagcctcgactccggaagtctcaaggtgcctcctcctctccttagctggcccgttggttttctgagcagggggctgaactgtgaacaagtcagacaaataaagcaagggtctgcaccatctgcaatgtca

SEQ ID NO: 350960 - DNA, 992 bp, Homo Sapiens
agcggggcggcaggcgtgcccttgacaggcagggagggctaggctgtgcatccctccgctcgcattgcagggagatggctcagcgacttcttctgaggaggttcctggcctctgtcatctccaggaagccctctcagggtcagtggccacccctcacttccagagccctgcagaccccacaatgcagtcctggtggcctgactgtaacacccaacccagcccggacaatatacaccacgaggatctccttgacaacctttaatatccaggatggacctgactttcaagaccgagtggtcaacagtgagacaccagtggttgtggatttccacgcacagtggtgtggaccctgcaagatcctggggccgaggttagagaagatggtggccaagcagcacgggaaggtggtgatggccaaggtggatattgatgaccacacagacctcgccattgagtatgaggtgtcagcggtgcccactgtgctggccatgaagaatggggacgtggtggacaagtttgtgggcatcaaggatgaggatcagttggaggccttcctgaagaagctgattggctgacaagcagggatgagtcctggttcccttgcccgcgtgggaccccaatagaactcagcccttccatgccagcccttcctgctgcctccctcctgtctggctcctggggcccatgcttagagcccaggctccagccctgagtgcttccgagctggcggactgcccaggggccatcagaggatggtggtgctgctgctgatccggggaccgctgtcttccctcccatacgcctttcatccctccttctagggcctatggcagttctcccaggatgtgtggcgagagcctgggccagcccacagcgttcctagtcaggcagccacaccttggtcctcatcttggtcccttccaatctgaaacctcgtgcctggctcgtctgccacctacatttctctttccagctgctgttttgtaaaaaga

SEQ ID NO: 350961 - DNA, 1833 bp, Homo Sapiens
  misc_feature (144)..(144): n is a, c, g, or t
  misc_feature (162)..(163): n is a, c, g, or t
  misc_feature (178)..(178): n is a, c, g, or t
  misc_feature (216)..(216): n is a, c, g, or t
  misc_feature (223)..(223): n is a, c, g, or t
  misc_feature (1203)..(1203): n is a, c, g, or t
tataatttcaggaacctttaaaaattaccaccattccaaaaaatgcttgaaccccagaataaattacattttttaaaaaaggtaaatgactccattatcaagtgaatttaccccagtcttgttctatcaaaagtagtagttaanggtcaccaaaataatgtnnggtgcctttgttctnggaattataactagctgtactgtaggagcatcagcgcntaagttntaagccagtgggaatactctgctgcctggcttcacaggcactgaatacacttaaaatggtaagaaactgaatggatttaataagttttgaataatacaataaccaactgtatatttattatgaagtaaaagccaatctcctacccaatccctcttctatcagctgcacatttccaagtaagtgagataaaatgactcaatctaaaccacgtgaaggaatgtattaacattaatccaaccaaaaatgaaataaaacaatccagagttttgagtgttttttcacacttgtaataaactgaaaaaatatttcaattaaaacaaccatatgccacaaaaagccactcccatcatccacaatactaaagtccttatacaacactagataaatttttatataaaacagtagaaactagcataccattaattagaaacctcaaaatattcagaaaacagtatcaagtactcaagagaaaggctcaagaagccaaaaacctcaagaatcccatacatcctgggttgttaccctaaattgtaattaactacccacacatttaatcataatcaactttttcaaagatatacaaatcaatgcatctatttaaaaggactactctttatagttcagaactttacattaacttttatattctactcagcagggtgtctgtctgtactccaaattagctctcatgttccaggaaataaatacaaactcatatgccttgtgatcactgatggcctgcttatgtaattctagtccactaaatgttaattccatagaatatgctcttgattatgtaaaaactctaatttcttgatgaaatactgtaattctccaaaggttacaattttgtaaagatatgcaataactgagtatcactcccatgaaagacaaaaaaagtataattttgttccaagattaacttagtctcatgtatctctattaagtctttcaaggattccagagaatcttttcatatnctcccatttctggaaagtgaaatcagtatagaagtaatttgggaacttgaaaatggcattcatttttttcagcagatgccaaatttttgaccgacatggttctcacaattactttgttaccaacagtccagtcagttaacaggttgtaggaaaagattcgtttttgcagacactgctaagctgttcaaagagaagagagagagattaatttagtgattataaaatgcacaaatatttaaaatattttgaacacttcttgttggattatatcagaggtgtgactacattttaacaaaagtggactttttaagataagtctggtcaaagaagtgcagaaacagtaagtcaatatgatagaaatagtaggtcaaaatatgatgtgttagttcaattaatgtatgaactcctgccaccatcaaaagacaaatattaaaaagctacatctttagtctagttctgtattttaccagaggcacatttagaagaaaaacaaaagggtcacccaaatactaaattgttttcaaccattacagtaaatagagccaaacctagaaatttcaaaaacaatccattttatattccagaaatctcctttacccatgtgctaatcatccaggacacaattttctc

SEQ ID NO: 350962 - DNA, 1322 bp, Homo Sapiens
  misc_feature (260)..(320): n is a, c, g, or t
  misc_feature (645)..(645): n is a, c, g, or t
  misc_feature (651)..(651): n is a, c, g, or t
  misc_feature (693)..(693): n is a, c, g, or t
  misc_feature (696)..(696): n is a, c, g, or t
agcccatggtacctggattcagatgacccatcccccttaggatctccttccacacccccagcactcaatggtaaccccccgcggcctagcctggagcccgaggagcccaagaggcctgtccccgcagagcgcggtagcagctctgggacgcccaagctgatccagcgggcgctgctgcgcggcaccgccctgctcgcctcgctgggccttggccgcgacctgcagccgccgggaggcccaggacgcgagcgcggggagtnnnnnnnnnnnnnnnnnnnnnnnnnnnnnnnnnnnnnnnnnnnnnnnnnnnnnnnnnnnnngctcatctgcttctcgctcaaaacgcccaactccccgcccactcctgcacccctgttgctggacctgggtatccctgtgggccagcggtcagccaagagcccccgacgtgaggaggagccccgcggaggcactgtctcacccccaccggggacatcaagctctgctcctggcaccccaggcaccccacgttcaccacccctgggcctcatcagccgacctcggccctcgccccttcgcagccgcattgatccctggagctttgtgtcagctgggccacggccttctcccctgccatcaccacagcctgcaccccgccgagcaccntggacnttgttcccgtactcagaccccttctgggactccccacctgcnaancccttccaggggggcgccccagcactgcagggcacagacaaaaaacatgggtgcccaggccccgtgggtgccggaagcggggccttgagtgggccaggccactcccccgagctccagctgccttaggaggagtaacagcatacactggaacaggagctgggtcagcctcagcagctgcctcagtttccccagggaccccacccccctttgggggtcaggaacactaaactgaacaggaagccttcacactggaagggggacctgcgcccccacatctgaaacctgtaggtccccccagctcacctgccctactggggcccaacactgtacccagctggttgggaggaccagagcctgtctcagggaattgcctgctggggtgatgcagggaggaggggaggtgcagggaagaggggccggcctcagctgtcaccagcacttttgaccaagtcctgctactgcggcccctgccctagggcttagagcatggacctcctgccctgggggtcatctggggccagggctctctggatgccttcctgctgccccagccagggttggagtcttagcctcgggatccagtgaagccagaagccaaataaactcaaaagctgtctccccaaaaa

SEQ ID NO: 350963 - DNA, 1421 bp, Homo Sapiens
  misc_feature (196)..(196): n is a, c, g, or t
  misc_feature (1056)..(1056): n is a, c, g, or t
  misc_feature (1185)..(1185): n is a, c, g, or t
acgtctggaagaactcaaagcaatgctagaccgccgaggcatcctgggcttggggtacccagtccccccaaagcctggtgaagcccagaatggaagcagaaggtcccgcatggacgaagccacatggtacctggattcagatgactcatcccccttaggatctccttccacacccccagcactcaatggtaacccnccgcggcctagcctggagcccgaggagcccaagaggcctgtccccgcagagcgcggtagcagctctgggacgcccaagctgatccagcgggcgctgctgcgcggcaccgccctgctcgcctcgctgggccttggccgcgacctgcagccgccgggaggcccaggacgcgagcgcggggagtccccgacaacaccccccacgccaacgcccgcgccctgcccgaccgagccgcccccttccccgctcatctgcttctcgctcaagacgcccgactccccgcccactcctgcacccctgttgctggacctgggtatccctgtgggccagcggtcagccaagagcccccgacgtgaggaggagccccgcggaggcactgtctcacccccaccggggacatcacgctctgctcctggcgccccaggcaccccacgttcaccacccctgggactcatcagccgagctccgccctcgccccttcgcagccggattgatccctgcagctttgtgtccaggtgagccaaggaagttctccccctgcggaaccaccccacgcgtgcacaccggcgaagcgagctgggacccttggctccgcgcgacctcacaccccccgtgctcgggaaccccccccagccctagcctgaatcccgctctccacgtttggcccccccctatcttagcttctccattacaccaagagggggaaggaaagtgttgaaatagacacccaaggggcgccctaaacaccgccgaaccaccttgccaccacccaatccgtataccacagctctagtgccccccctgagcaaaagagctcgccgttatacaaatatatctctctctattaggagctcggtttgacngccgccgccgtctcccgaggtgttgagccgtcgaccgctagcacaccaacggaaatcctacgattcatacgcaccgcccgtcaacatcgaccgataaattattccgcagaaaaatctgaaaaatatgantacttctcgagatggctcagcaccggcacaactgagtccacgtgcaccatgccgctcgacgtcgaccacgtggacccttaatcgacgccccttctctccccgctttctcttccatcgatgtaactccatcggctgcgacagatgctctagtcttgatagcgaaatccttcgtagggccacccagagcgacttgccacgcccctactcatattttgtccccacccactaaccccgcg

SEQ ID NO: 350964 - DNA, 1301 bp, Homo Sapiens
gtgcgaggcctgggtggcgaattcggcacgagggcttatggccgactgctgggcgcaggacccccaccgcaggcccgacttcgcctccatcctgcagcagttggaggcgctggaggcacaggtcctacgggaaatgccgcgggactccttccattccatgcaggaaggctggaagcgcgagatccagggtctcttcgacgagctgcgagccaaggaaaaggaactactgagccgcgaggaggagctgacgcgagcggcgcgcgagcagcggtcacaggcggagcagctgcggcggcgcgagcacctgctggcccagtgggagctagaggtgttcgagcgcgagctgacgctgctgctgcagcaggtggaccgcgagcgaccgcacgtgcgccgccgccgcgggacattcaagcgcagcaagctccgggcgcgcgacggcggcgagcgtatcagcatgccactcgacttcaagcaccgcatcaccgtgcaggcctcacccggccttgaccggaggagaaacgtcttcgaggtcgggcctggggattcgcccacctttccccggttccgagccatccagttggagcctgcagagccaggccaggcatggggccgccagtccccccgacgtctggaggactcaagcaatggagagcggcgagcatgctgggcttggggtcccagttcccccaagcctggggaagcccagaatgggaggagaaggtcccgcatggacgaagccacatggtacctggattcagatgactcatcccccttaggatctccttccacacccccagcactcaatgggtaaccccccgcggcctagcctggagcccgaggagcccaagaggcctgtcccccgcagagcgcgggaacagctctggggacgcccaagctgatccagcgggcggctgctgcgcggtaaccgccctgctcgcctcgctggggccttggccgcgaacctgcaaccgccggggaagcccaggaacccaagcgccggggaaatcccctgaaaacaacccccccacggcaacggcccgggcccctggcccaaacggaagccgccccccttttccccgcttcattctgccttcctcggctccaagaacgcccgaaaatcccccgggccaacttcctggaaacccctggatggcttgggaacctggggatttccccctgtgggggccccagggggtccagccccagaaaaccccccgaacgttggagggaggggaggcccccgccgcgggaggcaaactgtgttctccccccaccctccccgcgggggaaaaataccacgc

SEQ ID NO: 350965 - DNA, 1254 bp, Homo Sapiens
  misc_feature (91)..(91): n is a, c, g, or t
  misc_feature (219)..(219): n is a, c, g, or t
  misc_feature (442)..(450): n is a, c, g, or t
  misc_feature (464)..(514): n is a, c, g, or t
  misc_feature (969)..(1030): n is a, c, g, or t
ctctgggcgcgctactaggtggtgcgatgcctggggtgacgtgtgtcgaggcgggggtgcaccccatcacccaccgatgtctctttccctnacgactcgggaagcgtgagtgtgcgcctagagcttcgctcccacccccctgttacgttagagagtgtgagcacaatgaggttcttctccctcgccggtgtgccccccaccgtgtatacggtcttggcnagccagagtgggccgccccccctcacctaagccgacgcggtgtggtgtggagggtatctcccccgtgggcggcgaacaagctctgggagggcgcccaggctctgacccggtacggctttgtgacagccccccgcgttctcccccgttgttcccgcgggtgcttaatgccactggtgggacctccccttccccctaaagggggccaggcgtgggaagctcttcnnnnnnnnnagatgtggtccttnnnnnnnnnnnnnnnnnnnnnnnnnnnnnnnnnnnnnnnnnnnnnnnnnnnggggggccgggggcctgcccaggttcttttggtgggtgccccggccattcctggggggccccccctggaaaggggttgccagggggggagtcccagaaaggggttggagtccggggaacaagggtccagggttgctcggcgggggtgcaggcctgtggtgatggcaggggagaaggccgtggcccagctgacacaaagctccagggatcaatgcggctgcgaaggggcgagggccgaggtcggctgatgaggcccaggggtggtgaacgtggggtgcctggggtgccaggagcagagcgtgatgtccccggtgggggtgagacagtgcctccgcggggctcctcctcacgtcgggggctcttggctgaccgctggcccacagggatacccaggtccagcaacaggggtgcaggagtgggcggggagtcgggcgtcttgagcgagaagcagatgannnnnnnnnnnnnnnnnnnnnnnnnnnnnnnnnnnnnnnnnnnnnnnnnnnnnnnnnnnnnngactccccgcgctcgcgtcctgggcctcccggcggctgcaggtcgcggccaaggcccagcgaggcgagcagggcggtgccgcgcagcagcgcccgctggatcagcttgggcgtcccagagctgctaccgcgctctgcggggacaggcctcttgggctcctcgggctccaggctaggccgcggggggttaccattgagcctcgtgccgaattcgccacccaggcc

SEQ ID NO: 350966 - DNA, 1612 bp, Homo Sapiens
ttccgggatggggttggtctttggaatcggagaggcagattcgctgctccgcagcacggccggagctggtcgggtcaagagtcgggatttgtggggagaggttttccactggtcaagagaaggctttaagaaagacggtattaatctcccgttgcggctcccgcctggtcccatcttctgcccgctcctccaggaaatgaatctgctgccgaatattgagagtccagtgactcggcaggagaagatggcgaccgtgtgggatgaggccgagcaagatggaattggggaggaggtgctcaagatgtccacggaggagatcatccagcgcacacggctgctggacagtgagatcaagatcatgaagagtgaagtgttgagagtcacccatgagctccaagccatgaaggacaagataaaagagaacagtgagaaaatcaaagtgaacaagaccctgccgtaccttgtctccaacgtcatcgagctcctggatgttgatcctaatgaccaagaggaggatggtgccaatattgacctggactcccagaggaagggcaagtgtgctgtgatcaaaacctctacacgacagacgtacttccttcctgtgattgggttggtggatgctgaaaagctaaagccaggagacctggtgggtgtgaacaaagactcctatctgatcctggagacgctgcccacagagtatgactcgcgggtgaaggccatggaggtagacgagaggcccacggagcaatacagtgacattgggggtttggacaagcagatccaggagctggtggaggccattgtcttgccaatgaaccacaaggagaagtttgagaacttggggatccaacctccaaaaggggtgctgatgtatgggcccccagggacggggaagaccctcctggcccgggcctgtgccgcacagactaaggccaccttcctaaagctggctggcccccagctggtgcagatgttcattggagatggtgccaagctagtccgggatgcctttgccctggccaaggagaaagcgccctctatcatcttcattgatgagttggatgccatcggcaccaagcgctttgacagtgagaaggctggggaccgggaggtgcagaggacaatgctggagcttctgaaccagctggatggcttccagcccaacacccaagttaaggtaattgcagccacaaacagggtggacatcctggaccccgccctcctccgctcgggccgccttgaccgcaagatagagttcccgatgcccaatgaggaggcccgggccagaatcatgcagatccactcccgaaagatgaatgtcagtcctgacgtgaactacgaggagctggcccgctgcacagatgacttcaatggggcccagtgcaaggctgtgtgtgtggaggcgggcatgatcgcactgcgcaggggtgccacggagctcacccacgaggactacatggaaggcatcctggaggtgcaggccaagaagaaagccaacctacaatactacgcctagggcacacaggccagccccagtctcacggctgaagtgcgcaataaagagggttaaggctccggaggttaaggctcccggaggttaaggctcccgggg

SEQ ID NO: 350967 - DNA, 1041 bp, Homo Sapiens
  misc_feature (637)..(637): n is a, c, g, or t
  misc_feature (694)..(694): n is a, c, g, or t
ggcctgggtggcgaattcggcacgaggagatggcgaccgtgtgggatgaggccgaggtgggcacctgggcgagctggcgtgtccgggaaccggggcccgcagggagacgccattgacaagagggaaggagcaagatggaattggggaggaggtgctcaagatgtccacggaggagatcatccagcgcacacggctgctggacagtgagatcaagatcatgaagagtgaagtgttgagagtcacccatgagctccaagccatgaaggacaagataaaagagaacagtgagaaaatcaacagtgaacaagaccctgccgtaccttgtctccaagcgtcactcgagctccttggatgttgatcctaatgaccaagaggaggatggtgccaagtattgacctggactcccagaggaacgggcaagtgtgctgtgatcaaaacctctacacgacagacgtacttccttcctgtgatcggcgtcggtcggatgctgacaaaagctaaagccaggagacctggtgggctgtgaaccaaatgactcctatctgatcctggagcaccgctgcccacagagtatgactcgcgggtgaaggccatggaggtagacgagaggcccacggagcaatacaggacatttggngggtttggacaagcagatccaggaagctggtggaggccattgtcttgccaatgaacnacaagggagaagtttgagaaacttggggatccaacctccaaaaaggggtggctgatgtatgggcccccaggggacgggggaagaccctccctggccccgggcctgtgccgcacagactaaggccactttccttaaagctggctggcccccagcttggtgcagatggtcattggagaatggggcccagcctagttccgggatgcctttggccctggccaaaggaaaaagcggccctctatcatccttcattgaatgaatgggatggccatcgggcaccccagcgcttttttaccggggaaaaaaggctggggggcccggggagagggccacaagagacatatggtgtt

SEQ ID NO: 350968 - DNA, 1138 bp, Homo Sapiens
agcggtcttccggtcccggctcagcctccgacccaggtggtctggagcctgccgggagagtggtggcatctgagaggctggtcgtggactgtggttgggggaggtgggagctgttttaaccgtgtgccccctctcctgtgccggcgtgggcatcccccggggcagtggaacgcgggcgctcctccagcttccgagtccagccagcctgggcgcggggcgccgcccccgagacacccgaggagtccgttcctccctggttacgtggactgtggagctggtctcttgtggctcagcgccgtgcggaggttgaagcgtacctgcggaggtcgcaccagggcgtgaggaggaggaggaagggcatgagccgagcttgaggaatccgtgctccaaactctacactcaagggtggcccttgggtagggtgaagatcccctgtctttatcctagttccacaccttggtgtgggttactgggtgcaggatgaactgtcgctcggaggtgctggaggtgtcggtggaggggcggcaggtggaggaggccatgctggctgtgctgcacacggtgcttctgcaccgcagcacaggcaagttccactacaagaaggagggcacctactccattggcaccgtgggcacccaggatgttgactgtgacttcatcgacttcacttatgtgcgtgtctcttctgaggaactggatcgtgccctgcgcaaggttgttggggagttcaaggatgcactgcgcaactctggtggcgatgggctggggcagatgtccttggagttctaccacaaaaagaagtctcgctggccattctcagacgagtgcatccaatggaaagtggggacggtcaaggtgcatgtggtagccctggccacggagcaggagcggcagatctgccgggagcaacgtgggtgagaaactctgcgcagaagatcatcaacatcccgccaggcgaatgcatcggcatgcacccactggcccacgaggcccacacaggccggaggagcgctacacgcggtacgacaccagcgcacgcgggaaggcgaaaggccctacctggtacaaggatcccctaccagaaccactgaatgccctggggcccctcacggccacccaccgacaagcgccagcgcca

SEQ ID NO: 350969 - DNA, 1000 bp, Homo Sapiens
  misc_feature (62)..(89): n is a, c, g, or t
gggtccggaattcccgggatcagacgttccctcgcggccctggcacctccaaccccagatannnnnnnnnnnnnnnnnnnnnnnnnnnnctgggggagggagagggtggaaggacagaagagtaaccggaaggattactcgctgacgatgcagagttccgtgaccgtgcaagagggcatgtgtgtccatgtgcgctgctccttctcctacccagtggacagccagactgactctgacccagttcatggctactggttccgggcagggaatgatataagctggaaggctccagtggccacaaacaacccagctcgggcagtgcaggaggaaactcgggaccgattccacctccttggggacccacagaccaaaaattgcaccctgagcatcagagatgccagaagaagtgatgcggggagatacttctttcgtatggagaaaggaagtataaaatggaattataaacatcaccggctctctgtgaatgtgacagccttgacccacaggcccaacatcctcatcccaggcaccctggagtccggctgcccccagaatctgacctgctctgtgccctgggcctgtgagcaggggacaccccctatgatctcctggatagggacctccgtgtcccccctggacccctccaccacccgctcctcagtgctcaccctcatcccacagccccagcaccacggcaccagcctcacctgtcaggtgaccttccctggggccagcgtgaccacgaacaagaccatccaactcaacgtgtcctacccgcctcagaacttgaccatgactgtcttccaaggagaaggcacagcatccacagctctggggaaaaggctcatctctgtcacgcccagagggccagtctctgcgctttggtctgtgctggtgacagcaatccccctgccaggctgagctgggaacccggaggaatctgaccctgtacccctcacaggccttcaaaccctcctggtactgggagctgcaagtgccc

SEQ ID NO: 350970 - DNA, 1892 bp, Homo Sapiens
  misc_feature (1659)..(1659): n is a, c, g, or t
gtggatgaaggcttttggaggagaaccaaaacgacaagttccaagaagaagatgaagctccgcctccgccgcttagtcccaaccctgcccaggaagaagggcccgtggggctttgcctgtgcccgtccaccaaaggctgtcatgtgtctcgaaatcagcagccctccccatcccaatcccaggcagcttgtgtgtacaatcagcttctctagcaactctgtatctgttggcttcaagagaatattttgcctccacatatgtaccccttctcctttttttaaagatggatttaaaccaagatgcctccaggaaagaggacgaaatgagtatattcacagaggaatccaaaaaatacagtttgggggaaaatgcaataatttttgatgagatgggtgaaggacaagaagtgagttgtgtcaattattgtagatacaattttctgattaaatctggaaaaataaaaggcagcctgttttttctgcctttattgtattaacagctgaggtagctaaagttatttaaaataaaattaaatttatgatccaagtagcttatttttccctttaaatctcattgtaaatatatttgatttcttgtagaaattgatttccttctgtttaattttatgcttttattatactcttgatttttctaaatttgtgtgtgaaatataacattgattgaattgcagttacatttggttagtaatatttcattattttaataactgtgatgtcatgtatggatttactttggggttcaaatcaaaatgtcactgccagaaagagctgttccagctgatctagagcatactgccctagagtgtccctgggatcatctgaacagaagtgcacaggctacttgtacagagaaaaaattaatactcaaaggaaatcttcattttttagattgactttgggaatttgaattttcatcagtgcaaatataaatttctctatcctgctctgaggctaattggtaccatattttccctttgtgtcttgtgactctgccacatcccatctcatcctggcctctgagtcaagaacccagtgaactgactttctagttctagaagttccgctgcaaggccaggaaagcttgagaaaggtattgtggaagaagcaaaggtagacccccatcactcacctttgtctgcatccctgggcctgtgaatgatgacagcacctgacattctgcaccagctacctctgcctccatggcagagaaaaggccataagaacagtggaagaggagcatggactcagacttcaaggaagaagccatttccccaggtccttccttctgcatctcaccacccctagttacaaataactccattgaacagcatctattcagaaactatgccgaataaaaagattggtggaagggctcatgtggttagcaactatgaaacagaaatagggacactcagttacaaacattatctcctttagtttttcagaaaatgcatccctgatttcattcatttccagcttgaaagccagccatattactctagtccctaccaaactgctctagaaggtcatttccattttgtttgtgatatttagacgcgcagacttcaggaagttcacctttaacttcagcattccagatgaagtttcctgactcagtgcttttgcataaggaactagnaaaaaaaagtaaggaaaattggagatgctaacatcctcccccatcccaactgcaccttaaaatatgcatgtcaccttcaaggttttataattgcactgtttgttttatgtatgtacagattaaaattattgctacatttgaggaaaataaaattgcttgcttctatgtaattcctgtcattccacaggaaattcacttttccagctactgaatagaatttgtttaacaacctc

SEQ ID NO: 350971 - DNA, 1014 bp, Homo Sapiens
  misc_feature (822)..(822): n is a, c, g, or t
  misc_feature (939)..(939): n is a, c, g, or t
  misc_feature (950)..(950): n is a, c, g, or t
  misc_feature (973)..(973): n is a, c, g, or t
  misc_feature (1004)..(1004): n is a, c, g, or t
ttgcatttaggactcccatctacttggagtttattcttgggcatggtgtgagaaatggatctaattttatcttttttgcaaatggttttccacttgtcccagtaccattttatgtgaaataccaagaccgttctagtgactggagcgccccctcctcacacacggcgtcagcggggggcctgtctctgtccctcctctcccacggccctgtgtatttttgtgtcattaggcactgttctcattaaagaggccccactgcgtgctttagcgtctgatagggctggccccgttcaccccgcccttccctggcaaggcttgtttatttttccatgtgaacgttagtatcagttctagctctctttgaaagagaaacgcatggggttgttattagaatcgcattaaatttataccctaaattagggagagctgacatctcggtgatgctggaacatcctaactgttctatttcgggttttttttgtgtcttcaggagtgttttatgattgccttcgtataggttatgaacacttattgttaagtttctgttgacgggttagagagcacgggtttggctgtgtgctggttattctctgtgtgccccccagacacccccacccagccttacccgtatcccgtatggctgtgtcaaggggcgcccctgcccaccagctgctcatcgtgtatggctaagaggaagctcacagaaaataatggggtggggcgagagagatcggggttttatccccagaccccttctcccggtcctggggcaggagcgcctgcgtctccctgccatggacttgctgggcggcccgggccctncctctggggtctgcctgcgtccctcctgttcctcagggcgtggggtcagcccgggttccccggctaactaacccaaggttcttgctctggtccttttcctaagtttcccctgaattntaacccattanccttagaagaacgggcccctttnttttaaaacccttttggggttcaattcttgnttgggtgttg

SEQ ID NO: 350972 - DNA, 910 bp, Homo Sapiens
ccacctaagtacagagcattgattggtgtgcaagaaccctatggggtcatacaatcttcgtgtaagacagaaaagttctacaagggcaccattggacccaggaaagtccaactggcttcaacctctcactaatacaccaattacatattatgttatttttacagtttgaaacaaatatatagaaaaatatgtatgtaattaatttacactgaatgatacattttcaaagcattctctggtttgggaacattaaccattaacatttcaagaggaccttgcgccactgtatgtttccagggctgtgtttgtggtgggggctgagttgcagggacctgaagttcattaaccttttcctccaggaaagctgctcgaccagctttggatcacaaggaaggaatgatttttatctctatttctaccttactgcctggccctttgctctctgttgagaaaacttggcttggatctaatctagtttagataactgagatgtggcatacatttttgccttgctttatgcagtgtttatgacctcatttgtcttcttagagagtacataaatatctctctttataagtaaactcaatgtctgaaaagtcactaataggaagtgttaagaacagggggaaattgttagtaaatccagcaaatcctatacccatttacctggatcctttttatgtcactgagcctaataaaaagccagctaaaaagagcagccaaaaaagcagatggctcctccaaagctatgagactttgagaaaatgtgaatttatttcagctcccctaagggaactgctggtggaaatgacatcttgtaatagacacgctctgcaaggtgctttagtacttggcatgccttgaaaacagaacccccttaattcttcggggagtgcttatgtggatgaga

SEQ ID NO: 350973 - DNA, 855 bp, Homo Sapiens
  misc_feature (768)..(768): n is a, c, g, or t
  misc_feature (828)..(828): n is a, c, g, or t
  misc_feature (843)..(843): n is a, c, g, or t
caaaagagaaagaaacactgattactatcatgaaaacactgattgactttgtgaagatgatggtgaaatatggaacaatatctccagaagaaggtgtttcctaccttgaaaacttggatgaaatgattgctcttcagaccaaaaacaagctagaaaaaaatgctactgacaatataagcaagcttttcccagcaccatcagagaagagtcatgaagaaacagacagtaccaaggaagaagcagctaagatggaaaaggaatatggaagcttgaaggattccacaaaagatgataactccaacccaggaggaaagacagatgaacccaaaggaaaaacagaagcctatttggaagccatcagaaaaaatattgaatggttgaagaaacatgacaaaaagggaaataaagaagattatgacctttcaaagatgagagacttcatcaataaacaagctgatgcttatgtggagaaaggcatccttgacaaggaagaagccgaggccatcaagcgcatttatagcagcctgtaaaaatggcaaaagatccaggagtctttcaactgtttcagaaaacataatatagcttaaaacacttctaattctgtgattaaaattttttgacccaagggttattagaaagtgctgaatttacagtagttaaccttttacaagtggttaaaacatagctttcttcccgtaaaaactatctgaaagtaaagttgtatgtaagctgagattttgtatacaggaatccttatttcctcatagncttattattttataatcaggaatatgttgctttggaaaaagcctcttaatgggctgaccntaaaaactcaatccntcttccactgtc

SEQ ID NO: 350974 - DNA, 321 bp, Homo Sapiens
aatcgagccggacctccatatagacatccttcacgtaaaactatctgaaagtaaagttgtatgtaagctgagattttgtatacagaatccttatttcctcatagacttatattttataatcagaacatgttgctttgaaaaagcctctaatggactgaccttaaaactcatccttcttccactgtctcatccacataagcactccccgaagaattaagggggttctgttttcaaggcatgccaagtactaaagcaccttgcagagcgtgtctattacaagatagaagatttaatcaatgctgtaatagatgtctaataggg

SEQ ID NO: 350975 - DNA, 948 bp, Homo Sapiens
  misc_feature (37)..(37): n is a, c, g, or t
  misc_feature (40)..(40): n is a, c, g, or t
  misc_feature (89)..(89): n is a, c, g, or t
  misc_feature (172)..(172): n is a, c, g, or t
  misc_feature (530)..(650): n is a, c, g, or t
  misc_feature (661)..(672): n is a, c, g, or t
  misc_feature (730)..(852): n is a, c, g, or t
  misc_feature (892)..(906): n is a, c, g, or t
atctttgagcagtcagagagttcatctctgccctggnctngtttacctgttagagtgagccacacaagaaggaattcaacgtggcagantcttgccagagggagctgaccatcttcaaatgttaaaaaaggtagacagaagagagcccttagcccaacccctatgggtttgnagggacttgatttgcattcaccttgcttggacactgaaccagctgaggaaggagtttcacccaagattgtgggttttccctttcagtttcagttatcatttgttattgattcttttctcttttttcaaggggtctgaatccagggaaagctattgcagagatcaagaaaatgatggcaacctataaggagaagaaagcttcagtttaactgtttccatgctaaacatgatttataaccagctcagagctgaacataatttatatctaatttgagttcctttaaagatcttggttttccatgaatacagcatgtataataaaaattttaagaaataaatgttattctactttattaacnnnnnnnnnnnnnnnnnnnnnnnnnnnnnnnnnnnnnnnnnnnnnnnnnnnnnnnnnnnnnnnnnnnnnnnnnnnnnnnnnnnnnnnnnnnnnnnnnnnnnnnnnnnnnnnnnnnnnnnnnttttggggccnnnnnnnnnnnnaaaaaatttttaaaaacctttttttggggccggggccccaaaaggaaaggaaaagggnnnnnnnnnnnnnnnnnnnnnnnnnnnnnnnnnnnnnnnnnnnnnnnnnnnnnnnnnnnnnnnnnnnnnnnnnnnnnnnnnnnnnnnnnnnnnnnnnnnnnnnnnnnnnnnnnnnnnnnnnnntctttcaaagagggccccagggggtttcaatttaaattannnnnnnnnnnnnnnttctcgggaaagggggggaatttctaaaaacttcggccccca

SEQ ID NO: 350976 - DNA, 1199 bp, Homo Sapiens
atcaggccaaatcggccgagctcgaattcgtcgagagcgggccttccctccgcccacccgggaaaccggaagccgcctcccacttggttgctcgtacgcggctagtgggtcctcagtggatgtaggctgggcgccgcgatgttcgacgggacaccggcggagagcgacctcggggttaaggggtggggctgacgtcaggagccaagatggcggcggtggtcgcactctccttgaggcgccggttgccggccacaacccttggcggagcctgcctgcaggcctcccgaggagcccagacagctgcagccacagctccccgtatcaagaaatttgccatctatcgatgggacccagacaaggctggagacaaacctcatatgcagacttatgaagttgaccttaataaatgtggccccatggtattggatgctttaatcaagattaagaatgaagttgactctactttgaccttccgaagatcatgcagagaaggcatctgtggctcttgtgcaatgaacatcaatggaggcaacactctagcttgcacccgaaggattgacaccaacctcaataaggtctcaaaaatctaccctcttccacacatgtatgtgataaaggatcttgttcccgatttgagcaacttctatgcacagtacaaatccattgagccttatttgaagaagaaggatgaatctcaggaaggcaagcagcagtatctgcagtccatagaagagcgtgagaaactggacgggctctacgagtgcattctctgtgcctgctgtagcaccagctgccccagctactggtggaacggagacaaatatctggggcctgcagttcttatgcaggcctatcgctggatgattgactccagagatgacttcacagaggagcgcctggccaagctgcaggacccattctctctataccgctgccacaccatcatgaactgcacaaggacctgtcctaagggtctgaatccagggaaagctattgcagagatcaagaaaatgatggcaacctataaggagaagaaagcttcagtttaactgtttccatgctaaacatgatttataaccagctcagagctgaacataatttatatctaatttgagttcctttaaagatcttggttttccatgaatacagcatgtataataaaaattttaagaaataaatgttattctactttatgacca

SEQ ID NO: 350977 - DNA, 2039 bp, Homo Sapiens
  misc_feature (71)..(71): n is a, c, g, or t
  misc_feature (73)..(73): n is a, c, g, or t
  misc_feature (75)..(75): n is a, c, g, or t
cggcgtctccatggcacgaccctggcctccgacttcaacgacttcataaggcggcgtttctgggcgcacgntngntcgctcctggtttccatcgtgtgggaagaacggagtaacgagtctcacgcagaaaaaggtcttgagagcaccttgtggcgcacccagtgtaactgtgacgatcaaccatttttgtgttgtcctcccccacctgccagaagccaaccatgaaggaccgctcttcaactccccccttacatgttcacgtggatgagaacacccctgtccacgtccacataaaaaaactcccgaaaccatcagcgaccagcagccagaaatctcacaagcgaggaatgaaaggggacactgtgaatgtgcggcggagtgtccgggtgaaaaccaaggtaccttggatgccccctggaaaatcatctgcccggcctgtgggatgcaagtgggagaatccacctcattgcctggagatcacgccaccatcttcagaaaagctggtctcagtgatgcggttaagtgacctctctacagaagatgatgactcaggtcactgtaaaatgaaccgttatgataagaagattgatagtctaatgaatgcggttggttgtctgaagtctgaggtcaagatgcaaaaaggtgagcgccagatggccaaaaggttcctggaggaacggaaggaagagctggaggaggtggcccacgaactggctgagactgagcacgagaacacggtgttgaggcacaacatcgagcgcatgaaggaggagaaggacttcaccatacttcagaagaaacacctacaacaggagaaggagtgcctcatgtccaagctggtggaggcggaaatggatggggctgcggctgccaagcaggtcatggccttgaaggataccatcgggaagctgaaaacggagaaacaaatgacctgcacggacatcaacaccctgacaaggcagaaggaacttctcctgcagaagctgagcacatttgaggagaccaaccgcaccctccgagacctcctgagggaacagcactgcaaagaggattctgaaagactaatggagcaacaaggagcactgctgaaacggctggcggaggccgactcagagaaagcgcgcctgctgttactgctgcaagacaaggacaaggaggtggaagagctccttcaggaaatacaatgtgagaaggctcaagcaaagacagcctctgagctttctaaatccatggagtccatgcgtgggcatttgcaggcacagcttcggtccaaagaggctgagaacagtcgcctgtgcatgcagattaagaatctggagcgcagcgggaatcagcataaggcagaagtggaggccatcatggagcagctgaaggagttgaagcagaagggagaccgagacaaagagagcttgaagaagggcatccgagcccagaaggagcgagccgagaagagcgaggagtatgctgagcagctacacgtgcaactcgctgacaaggatctttatgtcgctgaagctttatccactctgggaatccctggaggagccgctacaaccaaggtggaaaaagaaaagggagaccttgaagctggaaattattgtcctgaatgaccgggtaacagatcttgtaaaccaacaacaaaccctggaggagaagatgcgggaagaccgggatagcctggtggagagactacaccgtcagactgctgagtattccgcattcaagctggagaatgagaggctgaaggccagctttgctccaatggaggacaaactcaaccaggcacacctcgaggtccagcagctgaaagcctcagtgaagaaactatgaggggatgattgaccactataagagtcaggtgatgaagaccaaattgggagctgatgaagtacctgcccagctagaacgctgtgacaaaaaagaacaagatccctaaaggatgggatggaaccaggagtttgggggcggcaccaaaggaatttcccaatcttccagcgtgggtgtggacctgccaaccaactttccccttgaaatagatg

SEQ ID NO: 350978 - DNA, 774 bp, Homo Sapiens
ggcaatgggcgactgcgacgggtgtcggaaaaggaggcggaagcgggaggagccgctgccagagccagactgcatccgccgcggcgtctccatggcacgaccctggcctccgacttcaacgacttcataaggcggcgtttctgggcgcagccgtgtcgctcctggtttccatcgtgtgggaagaacggagtaacgagtctcacgcagaaaaaggtcttgagagcaccttgtggcgcacccagtgtaactgtgacgaaatctcacaagcgaggaatgaaaggggacactgtgaatgtgcggcggagtgtccgggtgaaaaccaagaatccacctcattgcctggagatcacgccaccatcttcagaaaagctggtctcagtgatgcggttaagtgacctctctacagaagatgatgactcaggtcactgtaaagatgaaccgttatgataagaagattgatagtctaatgaatgcggttggttgtctgaagtctgaggtcaagatgcaaaaaggtgagcgccagatggccaaaaggttcctggaggaacggcaaggaagagctggaggaggtggcccacgaactggctgagactgaggcacgagaacacggtgttgaggcacaacatcgagcgcaatgaaggaggagaaggacttcaccatacttcagaagaaacacctacaacaggagaaggagtgcctcatgtccaagctggtggaggcggaaatggatgggggctgcggctgccaagcaggtcatggccttgaaggatacca

SEQ ID NO: 350979 - DNA, 1193 bp, Homo Sapiens
ggattccgggatccgccaccggcgcggggcctctcctcctcccgctaacgggcggtcggccgcctccttcctctcttggctaccacggggctctgcccctcctctgccgcccgcgggcagggcttcacctttctctctatgggcagaaaccggtaccctcctgcctgctggacagttgctgtgcgacttggacagtagaggagcgcctcccaagttttcatccaactgccaaccccaaagcttccaccctcctcccctcagagagaggacgtttgatgccgggccccttgagaggctcattgacaagcctgcccctctgggtccccctgagcagagcctgctgacccaattgcccacctttgcggctttgatgcctagccatgtctgcctcatcctcaggcggctcccccaggtttccatcgtgtgggaagaacggagtaacgagtctcacgcagaaaaaggtcttgagagcaccttgtggcgcacccagtgtaactgtgacgaaatctcacaagcgaggaatgaaaggggacactgtgaatgtgcggcggagtgtccgggtgaaaaccaaggtaccttggatgccccctggaaaatcatctgcccggcctgtgggatgcaagtgggagaatccacctcattgcctggagatcacgccaccatcttcagaaaagctggtctcagtgatgcggttaagtgacctctctacagaagatgatgactcaggtcactgtaaaatgaaccgttatgataagaagattgatagtctaatgaatgcggttggttgtctgaagtctgaggtcaagatgcaaaaaggtgagcgccagatggccaaaaggttcctggaggaacggaaggaagagctggaggaggtggcccacgaactggctgagactgagcacgagaacacggtgttgaggcacaacatcgagcgcatgaaggaggagaaggacttcaccatacttcagcaagaaacacctacaacaggagaacggagtgcctcatgttccaagctggtggacggcggaacatggatggggctgcggctgcccagccaggtcaatgggccttgcagggatacccatcgcggacgctgaaaacggagaaacaaatgaactgcacggacattcaacatcctgacaaggccaacggaacttttctgcacagaatgcttgacccatttgaggagaaca

SEQ ID NO: 350980 - DNA, 819 bp, Homo Sapiens
cggggctctgcccctcctctgccgcccgcgggcaggcttcacctttctctctatgggcagaaaccggtaccctcctgcctgctggacagttgctgtgcgacttggacagtagaggagcgcctcccaagttttcatccaactgccaaccccaaagcttccacccttctcccctcagagaggacgtttgatgccgggccccttgagaggctcattgacaagcctgcccctctgggtccccctgagcagagcctgcatgacccaattgcccacctttgcggctttgatgcctatgccatgtctagcctacatcctcaggcggctaccaccaggtatccatcgtgtgggaagaacggagtaacgagatctcacagcagaaaaaggtcttgagagcaacttgtggcgcaaccagtgtaactgtgacgaaatctcacaagcgaggaatgaacaggggacactgtgaatgtgcggcggagtgtccgggtgaaaaccaagaatccacctacattgcctggagatcacgccaccatcttacagaaaagctggtctcagtgatgcggttaagtgacctctctacagaagatgatgactcaggtcactgtaaaatgaaccgttatgataagaagattgatagtctaatgaatgcggttggttgtctgaagtctgaggtcaagatgcaaaacaggtgagcgccagatggccaaaaggttcctggaggaacggaaggaagagctggaggaggtggcccacgaactggctgagactgagcacgagaacacggtgttgaggcacaacatcgagcgcatgaacgagggacacggc

SEQ ID NO: 350981 - DNA, 1096 bp, Homo Sapiens
ctggtacggccggaattttgggatcctccttcctctcttggctaccacggggctctgcccctcctctgccgcccgcgggcaggcttcacctttctctctatgggcagaaaccggtaccctcctgcctgctggtttccatcgtgtgggaagaacggagtaacgagtctcacgcagaaaaaggtcttgagagcaccttgtggcgcacccagtgtaactgtgacgaaatctcacaagcgaggaatgaaaggggacactgtgaatgtgcggcggagtgtccgggtgaaaaccaagaatccacctcattgcctggagatcacgccaccatcttcagaaaagctggtctcagtgatgcggttaagtgacctctctacagaagatgatgactcaggtcactgtaaaatgaaccgttatgataagaagattgatagtctaatgaatgcggttggttgtctgaagtctgaggtcaagatgcaaaaaggtgagcgccagatggccaaaaggttcctggaggaacggaaggaagagctggaggaggtggcccacgaactggctgagactgagcacgagaacacggtgttgaggcacaacatcgagcgcatgaaggaggagaaggacttcaccatacttcagaagaaacacctacaacaggagaaggagtgcctcatgtccaagctggtggaggcggaaatggatggggctgcggctgccaagcaggtcatggccttgaaggataccatcgggaaagctgaaaacggagaaacaaatgacctgcacggacatcaacaccctgacaaaggcagaaggaacttctcctgcagaagctgaagcacatttgaggagaccaaccggcaccccttcgaagaacctccctggagggaacagcacttgcaaaggaggattccttgaaagaactaatgggaacaaccaagggacccctgcctgaaaacggcctgccggagaggccccaactcataagaaaaccgccgcccggcctggttactgcttggccaaacaaagaacaaagggaagtgtggaaaaaactctcctttcagggaaataacaatggttgataaaaggcttctagccacaaaaaagg

SEQ ID NO: 350982 - DNA, 1149 bp, Homo Sapiens
  misc_feature (916)..(916): n is a, c, g, or t
  misc_feature (946)..(946): n is a, c, g, or t
  misc_feature (951)..(951): n is a, c, g, or t
  misc_feature (957)..(957): n is a, c, g, or t
ggaattctcgggatcggggctctgcccctcctctgccgcccgcgggcagggcttcacctttctctctatgggcagaaaccggtaccctcctgcctgctggacagttgctgtgcgacttggacagtagaggagcgcctcccaagttttcatccaactgccaaccccaaagcttccacccttctcccctcagagaggacgtttgatgccgggccccttgagaggctcattgacaagcctgcccctctgggtccccctgagcagagcctgctgacccaattgcccacctttgcggctttgatgcctagccatgtctgcctcatcctcaggcggctcccccaggtttccatcgtgtgggaagaacggagtaacgagtctcacgcagaaaaaggtcttgagagcaccttgtggcgcacccagtgtaactgtgacgttgagatcactgtgtagaaggatccgcctgctttccgctgtgcttcactaaatccaaggaggagctgtgcattccagcaggtttagaggagatccagccctaaggaccctggggccggcgtctgggatctgttctggaacggatcaaccatttttgtgttgtcctcccccacctgccagaagccaaccatgaaggaccgctcttcaactccccccttacatgttcacgtggatgagaacacccctgtccacgtccacataaaaaaactcccgaaaccatcagcgaccagcagccagaaatctcacaagcgaggaatgaaaggggacactgtgaatgtgcggcggagtgtccgggtgaaaacaagaatcacctcattgcctggagatcacgccaccatcttcagaaaagctggtctcagtgatgcggttaagtgacctctctacagaagatgatgactcaggtcactgtaaaatgaaccgttatgantagaaagatgatagtctaatggaatgcggngtggntgtctngaagtctgaaggcaagaatgcaaaaaggtgagcgccagatggcccaaaaggtcctgggaaggaccggaaggaaaaaacttggaggaagggggcccacgaaactggctgagaattgaaccccaaaaaccgggggttgaagggcccacctccaacgcgcctttaaagggagaggaaagggacttcccccatact

SEQ ID NO: 350983 - DNA, 1112 bp, Homo Sapiens
aattcccgggatgggcgagctgccgaccgggtgtcggaaaaggaggcggaagcggggaggagccgctgccagagccagactgcatccgccgcggcgtctccatggcacgaccctggcctccgacttcaacgacttcataaggcggcgtttctgggcgcagccgtgtcgctcctggtttccatcgtgtgggaagaacggagtaacgagtctcacgcagaaaaaggtcttgagagcaccttgtggcgcacccagtgtaactgtgacgaaatctcacaagcgaggaatgaaaggggacactgtgaatgtgcggcggagtgtccgggtgaaaaccaaggtaccttggatgccccctggaaaatcatctgcccggcctgtgggatgcaagtgggagaatccacctcattgcctggagatcacgccaccatcttcagaaaagctggtctcagtgatgcggttaagtgacctctctacagaagatgatgactcaggtcactgtaaaatgaaccgttatgataagaagattgatagtctaatgaatgcggttggttgtctgaagtctgaggtcaagatgcaaaaaggtgagcgccagatggccaaaaggttcctggaggaacggaaggaagagctggaggaggtggcccacgaactggctgagactgagcacgagaacacggtgttgaggcacaacatcgagcgcatgaaggaggagaaggacttcaccatacttcagaaaaaacacctacaacaggagaaggagtgcctcatgtccaacctggtggaggcggaaatggatggggctgccgctgccaagcaggtcatggccttaaagggttccatcgggaagccttaaaacggagaacaaattgacctgcccgggacatcaacacccctgacaagccaaaaggaattttcccctgcccaaactgagcctcttttggagggagacaaccccgacccctcctaaacctctccgtagggacaacgctatgaaaataggtcttccctgaacacccttgtcggggcccttcgggaacccctgctgcaaaccgtctagctcggtggctcaattctctttcacacgtccctctcctttttacccattacaccacaaa

SEQ ID NO: 350984 - DNA, 479 bp, Homo Sapiens
acatggtgactgttcggtctaattcagaaacagaagtactaaaagaatactaaaaagtttttacccattatctctatccctgttttctttttgcaattctcagctgcagggagcaagaaaatacacagcagataggaaatgtttgtttgcatcctggctttctcaactgcactttacgtccttgaatattctagatatttactccttcaagaagtcaggagtatatccaggcctacctatcatccttgccatccccattaaccctcatttttcagtatgtgttttacatttatggttatttttcagtctatagtatctgttcactcattgctctatcacatctgagtttctccgtctttctttccactagattgtaagctccttaagggcaaggtcggcatataagcaaagttctgtaaacaccgtgaaggtaccatgagttctatgggtactcaataaatgcttgtgataatgatgca

SEQ ID NO: 350985 - DNA, 780 bp, Homo Sapiens
aagaatagctccgattagcaagtcagccaatccaatacatctcttcacccattctgctggtccaccctgactgccatcccattactgccatcccttcactgctgagataaactgccttctgttctgtcaggctttaaagtttcaccctttgcctccagaaagaaggaaagggaaggttctgaatttttctagaaaccagagctgctactttcccacagattgtgagttggagtgggaacattttggcccttgaaaatgaacgtctgagaagtagatataagaagcccacagttggaaagaaaggatgatatctcagatagagcctgagaagtacaggtggctgacaacagctgcagtctagcaactggatgtcctgagtcctgcactgaggccccccaacaggcccaagagtttcttatttccaggtaacagtctttagtgcttgcctatgaaactcagtggggcagaattaacacacagcaatgccataccagtcttgggataagaagcaggggctggaagtgccaaacagggaagaagtgcccaggaaagaggataaaaatagctacaactatgccttgccccaggtctcaattaaaaaattcaatgttcacaaagtcacatatcacatagattaaggttcatacacatcaaaacaggagcatcagtgttacataaaattttaaagaggaagcaagtcccagtgggctaatggtgaggtagtagcaggtcacttttaaacaaacacatgcaatcttgggagtagccgcctgtgccgaa

SEQ ID NO: 350986 - DNA, 1055 bp, Homo Sapiens
  misc_feature (83)..(97): n is a, c, g, or t
  misc_feature (713)..(735): n is a, c, g, or t
  misc_feature (984)..(995): n is a, c, g, or t
agcggtcggtcttacttctcactaatttgtaggaaaaagcaagttcgtctgttgtgcgaatgactgaatgggacagagttgannnnnnnnnnnnnnnccctttgtgcttagttaggaaggcagtaggatgtggcctgcatgtactgtatattacagatatttgtcatgctgggattcccaactcgaatctgtgtgaaactttcattccttcagatttggcttgacaaaggcaggaggtacaaaagaagggctggtattgttctcacactggtctgctgtcgctctcagttctcgataggtcagagcagaggtggaaaaacagcatgtacggattttcagttacttaatcaaaactcaaatgtgagtgtttttatctttttacctttcatacactagccttggcctctttcctcagccttaagaaccatctgccaaaaattactgatcctcgcatgatggcagccatagtgcatagctactaaaatcagtgaccttgaacatatcttagatggggagcctcgggaaaaggtagaggagtcacgttaccatttacatgttttaaagaaagaagtgtggggattttcactgaaacgtctaggaaatctagaagtagtcctgaaggacagaaactaaactcttaccatatgtttggtaagactccagactccagctaacagtccctatggaaagatggcatcaaaaaagatagatcnnnnnnnnnnnnnnnnnnnnnnntctattacattttcagtgagtaattttggattttgcaaggtgcatttttactattgttacattatgtggaaaacttatgctgatttatttaagggggaaaaagtgtcaactctttgttatttgaaaacatgtttatttttcttgtctttattttaacctttgatagaaccattgcaatatgggggccttttgggaacggactgggtagtaaaagaaaatccggttatcgagccagcatttttattttannnnnnnnnnnnatttccccggggggcgttttttccgccgtagaaaaaaggccccccccggaggggttcctc

SEQ ID NO: 350987 - DNA, 1030 bp, Homo Sapiens
  misc_feature (37)..(37): n is a, c, g, or t
  misc_feature (45)..(45): n is a, c, g, or t
  misc_feature (54)..(54): n is a, c, g, or t
  misc_feature (65)..(65): n is a, c, g, or t
  misc_feature (140)..(140): n is a, c, g, or t
  misc_feature (143)..(157): n is a, c, g, or t
  misc_feature (777)..(824): n is a, c, g, or t
ccctcctttgtcctcctgccttgtcagccaatctganggatgaantttcacacnattcgagtggnaaatcccgcttgacaaatatctgtaatatacggtacatgcggccacatcctatgccttccctaactaagccacanggnnnnnnnnnnnnnnntccaactctgtccccattccagtcaattcgccacaacagacgaacttgctttttccctacaaattaagtgaagaagtaaggccgattgggaaaggtggatggaatcatttggaacagaaacaaccagagcagaactgtatttcccccctccctacttcccctcctgtggcaactcaaaatttgtccacttatataaaaggaacagacctcacctgtcaggtctgtttagggcatggaaaaaggaggagtcctttctgccccaaacctttctggacagcgtagggtatctatactgagccgtctacagatacagaattaaagacagtgaaattcaatctcattgtgacacacctcacttgcagataaccctgtacagtaatgtagttccacagcaaacagaacattttctgaatcacagtctaattttctagtcttcactgctctaagtatttgaaacatgggcagcagcaaagagttttccattgtttgttcaccccaaatcctttacgacaacagagaagaatgcattatggatacactaaattctgaactatgaaatcctaagctgtgctggttctccttttatgaaactgaatttggaacagaaagcagttaccatnnnnnnnnnnnnnnnnnnnnnnnnnnnnnnnnnnnnnnnnnnnnnnnngtctaaggaatcccagcaggcaaattccaaaatgggagattttggaaaaaatccgaaattggggtagagggaggaaataaatgtgcacaaagggggaaaagaaaggaacgcaacaaacaaacaaaaaagaaggcacagaattttctgcaatctactgaaactaaatccaagtatccaagtttgacttggtaggaagaaataaaaat

SEQ ID NO: 350988 - DNA, 461 bp, Homo Sapiens
attcctaattacattttccagtggagtaattttggattttgccaaggtgccattttacctattgttaccattatgtggaaaaacttaaggccgatttatttaagggggaaaaagtgtcaaactcctttgttatttgaaaacatgtttatttttccttgtcctttattttaacctttgatagaacccattgcaatatgggggccttttgggaacggactggtatgtaaaagaaaatccgttatcgagcagcattttatttacccctcccctatccctaggcacttaaccaagacaaaaagccacaatgaacatccctttttcaatgaattttataatctgcagctctattccgagcccttagcacccattccgaccatagtataatcatatcaaagggtgagaatcatttagcatgttgttgaaaggttttttttcagttgttctttttagaaaaaaagaaa

SEQ ID NO: 350989 - DNA, 917 bp, Homo Sapiens
  misc_feature (66)..(66): n is a, c, g, or t
  misc_feature (82)..(118): n is a, c, g, or t
aaactgtatactgaaaacctcaattaaataaggggcgccaccctcgcgggaagttttttaatcggncaggggatggcggcgnnnnnnnnnnnnnnnnnnnnnnnnnnnnnnnnnnnnnatcaggccaaatcggccgagctcgaattcgtcgagagcggctacatcaaggccccaggacatgcagaaccttcctctagaacccgacccaccaccatgaggtcctgcctgtggagatgcaggcacctgagccaaggcgtccagtggtccttgcttctggctgtcctggtcttctttctcttcgccttgccctcttttattaaggagcctcaaacaaagccttccaggcatcaacgcacagagaacattaaagaaaggtctctacagtccctggcaaagcctaagtcccaggcacccacaagggcaaggaggacaaccatctatgcagagccagtgccagagaacaatgccctcaacacacaaacccagcccaaggcccacaccaccggagacagaggaaaggaggccaaccaggcaccgccggaggagcaggacaaggtgccccacacagcacagagggcagcatggaagagcccagaaaaagagaaaaccatggtgaacacactgtcacccagagggcaagatgcagggatggcctctggcaggacagaggcacaatcatggaagagccaggacacaaagacgaccaaaggaaatgggggccagaccaggaagctgacggcctccaggacggtgtcagagaagcaccagggcaaagcggcaaccacagccaagacgctcattcccaaaagtcagcacagaatgctggctcccacaggagcagtgtcaacaaggacgagacagaaaggagtgaccacagcagtcaatcccacctaacgagaagaaacctcagggccacc

SEQ ID NO: 350990 - DNA, 782 bp, Homo Sapiens
gggtcctgggcagttaccgctctataccggcagcagccgcggagagcatgccccgcccccgtggagcccaccccgggcggttaacctcgggtctcagtcccgggctgtgaccctccccgaggccccgcccccacggcgaaggcccggggcagttaacccttctcttgctgcggcagagtccgcacccgggcaggcccatctcagaattaacgctttgatggcatcaccgcgtcgggaatccctggggatggtgttctccaccgtcaagacctttgagccgcctgagctgactaactcctgcgcccctgaggggacattttattcagaaacttaaatccattcagagttccagcactgtcgggggtcatccggctctgtccaccgccatacgcctagcattgtcaccaaccggagccatagagggacctcagcccaagctggggcctcttcattgtcgaaagaaggcctcttgccagaccatggatctgtgggcgccggccaggctgggaggactatggccggcgggcactggacaagaagcccttgagcccccatgaagggaaaacaggttctggctgacgaaatcctaactggcatactcagctgacaagggaccagcaaatgcccattccggcaatgtcctaccaagggacaaagccccgaatcatcccctgccctacggaggaaaaactcccccgggctttgataagtcctttgtttggccccacgccaaaccccccagttttttccgccatattaaggcgcaacgcagcccaaggaaa

SEQ ID NO: 350991 - DNA, 1245 bp, Homo Sapiens
cgggattcctccgtgagctccgggcctgtttgcctgctgaagtagagtcttagggtgaccccagggggacgtaatgtttccgagaagaaggacagaaagaagactgggagacaccggaactcgaaagaaaatcgcatacagaaaggctgtacctggaggaaggaagtgcggagccagcctgagtttggagaagagctccagagagtgtgaatgacagaggtggtgccatccagcgcgctcagcgaggtcagcctgcgcctcctctgccacgatgacatagacactgtgaagcacctgtgtggcgactggttccccatcgagtacccagactcatggtatcgtgatatcacatccaacaagaagttcttttcccttgctgcaacctacagaggtgccattgtgggaatgatagtagctgaaattaagaacaggaccaaaatacataaagaggatggagatattctagcatccaacttctctgttgacacacaagtcgcgtacatcctaagtctgggcgtcgtgaaagagttcaggaagcacggcataggttccctcttacttgaaagtttaaaggatcacatatcaaccaccgcccaggaccactgcaaagccatttacctgcatgtcctcaccaccaacaacacagcaataaacttctatgaaaacagagacttcaagcagcaccactatctcccctattactactccattcgaggggtcctcaaagatggcttcacctatgtcctctacatcaacggcgggcacctccctggacgattttgcactacatccagcacctgggctctgcactagccagcctgagcccctgctccattccgcacagagtctaccgccaggcccacagcctgctctgcaccttcctgccatggtcgggcatctcttccaagagtggcatcgagtacagccggaccatgtgatgtcggctgggcagccgccaccaggccccacccttcagccgcccgcagagcccgccttcctgtccatctgaccccttctgttttctgcaaggagctgccagccatctaactgggctcgtcggcctgccccagctgcaggcccggtgctacacgggctcgggaacagaacatcgtgggcatgcgcagagcatgcccatccgtggcaggctcttcagctcccctccctgcttctggaaacctctgcctgctgccctggccctgcccccctgcgcatgcaccatccccagggctgacccagtgtggctgc

SEQ ID NO: 350992 - DNA, 1432 bp, Homo Sapiens
  misc_feature (1400)..(1400): n is a, c, g, or t
taggtagcgaggcctgggtggcgaattcggcacgagggcgctgagccctacaacacccccagcggccgccggctcccccacgaggtgtgaatgacagaggtggtgccatccagcgcgctcagcgaggtcagcctgcgcctcctctgccacgatgacatagacactgtgaagcacctgtgtggcgactggttccccatcgagtacccagactcatggtatcgtgatatcacatccaacaagaagttcttttcccttgctgcaacctacagaggtgccattgtgggaatgatagtagctgaaattaagaacaggaccaaaatacataaagaggatggagatattctagcatccaacttctctgttgacacacaagtcgcgtacatcctaagtctgggcgtcgtgaaagagttcaggaagcacggcataggttccctcttacttgaaagtttaaaggatcacatatcaaccaccgcccaggaccactgcaaagccatttacctgcatgtcctcaccaccaacaacacagcaataaacttctatgaaaacagagacttcaagcagcaccactatctcccctattactactccattcgaggggtcctcaaagatggcttcacctatgtcctctacatcaacggcgggcaccctccctggacgattttggactacatccagcacctgggctctgcactagccagcctgagcccctgctccattccgcacagagtctaccgccaggcccacagcctgctctgcagcttcctgccatggtcgggcatctcttccaagagtggcatcgagtacagccggaccatgtgatgtcggctgggcagccgccaccaggccccacccttcggccgcccgcagagcccgccttcctgtccatctgaccccttctgttttctgcaaggagctgccagccatctaactgggctcgtcggcctgccccagctggcaggcccggtgctacacgggctcgggaacagaacatcgtgggcatgcgcagagcatgcccatccgtggcaggtacgccacagcagacacaaaggctcttcagctcccctccctgcttctggaaacctctgcctgctgccctggccctgcccccctgcgcatgcaccgtccccagggctgacccagtgtggctgcattcacgggaggggcctgccctcactgggcctctcccactccgctgcctgttcttgcagctccttcctggaaagctggaggggactttctcctgcaagggaggaacgcaagtattatggacacacttgaccgtaaaggcacaggagcctcggaacaagggggcgcaataaagggaatggcccgtccccttccagaaccagcccaaagaaacctggggggggtgaaggagtggccccccactccctccatgnagggggctgaattgaggggtggggccagccct

SEQ ID NO: 350993 - DNA, 1120 bp, Homo Sapiens
  misc_feature (15)..(16): n is a, c, g, or t
  misc_feature (31)..(31): n is a, c, g, or t
  misc_feature (61)..(61): n is a, c, g, or t
  misc_feature (65)..(65): n is a, c, g, or t
  misc_feature (91)..(91): n is a, c, g, or t
  misc_feature (97)..(97): n is a, c, g, or t
  misc_feature (117)..(117): n is a, c, g, or t
  misc_feature (119)..(119): n is a, c, g, or t
  misc_feature (123)..(123): n is a, c, g, or t
  misc_feature (999)..(999): n is a, c, g, or t
cctgggaattgattnnctcatcaaagccccnaaacagagcacagtaataaagaaattaagncccncctagtaacataaacatatacaatangtaaanaaatccagcttctttaactnantgtngtcgtgttaatgtagcacaaaaaatatattttaatgaagattaaatattataattttgaggttttggggactggtgctgatcccaaaaagttaatttaataatatataccaacagattgtttgtcacgcttctgaaccaatgactgaatgtcaagatgttcgttaatttctagatgtttgtttcaagaccagctgtttcagatctattaatgtagggaatttttccctaagattgaattcctatatttacttggtaagatccactaatctgttatagggagttgttttctcttgccttatagttgagctatttggtttgacaaagctcagcagaaacttgatgtgaaaaatctacgattttcttctacattcattgatgccccttgtaatgtttgcatacactagaaaatgccttcaatttgtgttttaccagaattttgatactggtcagaaattttatactgccaacaaagaagactcaacttctcagatctataatgggatacattgtcatcctctagcaactcctatatagaaagttttaactgaatatgttacatataagaattaaattcttctcaaataattcttaacctcagtaatgagcctaaatttactctgcttggctctctacacatggcatttcagggtataagatgtagcatttcaatgtgtaagatatatgtactaaacatatgtgttgctatcttcatcattaacatccttcttttctattgcttggctgtaatttttgtaaagataaattatattgtttttttgtatgtgtgtttgtagtatatgttcagaaggcaagcatcttcattttgctagctttgcagaatcttaaaatgtgtactcgttatttctaatgatgtnaaaaaaaatccctagtcctgtttagcatttgacttttttatatgttttaaatgttgctggatttttgtgctgtttgccaaacttatacaataaataaatgaaatattgtgctgattttcaa

SEQ ID NO: 350994 - DNA, 335 bp, Homo Sapiens
aacatgggacctcccaactgtagccaaagaaaaagcaatttctgataacatctcatttcattcccctttatcacttcttcagtgctttctttgtcctccttcctcagctactataattcatcttcattatcttaaaaagaagtctgcattaggaaagggtgagagataatgaagtaacagaaaaataatctcaaacactttactattcccccaatgcatctattttgtaaatgctgtttcacatatgaggtttgtaaaaaagcaaaatatatgtataaaatggcgtacataaagatgttctacaaatatagccagaagttattgttttactgtat

SEQ ID NO: 350995 - DNA, 389 bp, Homo Sapiens
gttatttcactagcaacatataattacccataaaacaaaggagggttttaaatgaactacacatgcaaaatacactagaaaagctagatatttttaaaaacgtggtgaattatttggtaaagccaaaatattttaattcataagttactattcccccaatgcatctattttgtaaatgctgtttcacatatgaggtttgtaaaaaagcaaaaatatatgtataaaatggcgtacataaagatgttctacaaatatagcccagaaattattgttttactggtatgcaaagagggatggcaatttttaatttcaaatgttttttaaaatatttcgaaactgaaaactaaatccttacccaatggtaaaattgcccacaaaaaacggcctgg

SEQ ID NO: 350996 - DNA, 756 bp, Homo Sapiens
agcgggtccgggctggggcggaggagcgggcggggaccaaaggttggtgtctttgcgctcggaccttcgccagaggggccgggacatcatgacggtgggagccaggctccgaagcaaggcggagagcagcctcctgcgccgcgggccccgagggcgagggcgaaccgagggggacgaggaggcggccgccatcctggagcacctggagtacgcggacgaggcggaggcggcggccgagagcgggacgagcgcggcggacgagcggggcccggggacccggggcgcgcggagggtgcacttcgccctcctgcccgagcgctacgagccactggaggagccggcgccgagcgagcagcccaggaagaggtaccggaggaagctgaagaagtacggcaagaatgtcgggaaggtcatcatcaaaggatgccgctacgtggtcatcggcctgcaaggcttcgctgcagcctactccgccccgtttgcggtagccaccagcgtggtatccttcgtgcgctaatgggaagctgctggtggcagggtgcccccagagtgaacgggagccccttgttgtggggaaccttggtgaatccttggagcatctcagaccttgaacacacagcatattgggaagaagaaaacatgcctttccttggtggaatcacattagtatgatgagtgagtccatccctgcccatctgctgagcttctcacatctctcagtcacacgtggacccagtggtcaatcctgcagagaat

SEQ ID NO: 350997 - DNA, 1019 bp, Homo Sapiens
  misc_feature (943)..(943): n is a, c, g, or t
  misc_feature (978)..(978): n is a, c, g, or t
  misc_feature (991)..(991): n is a, c, g, or t
acagtcgcacgcagccaggcgcgcactgcacagctctcttctctcgccgccgcccgagcgcacccttcagcccgcgcgccggccgtgagtcctcggtgctcgcccgccggccagacaaacagcccgcccgaccccgtcccgaccctggccgccccgagcggagcctggagcaaaatgatgcttcaacacccaggccaggtctctgcctcggaagtgagtgcttctgccatcgtcccctgcctgtcccctcctgggtcactggtgtttgaggattttgctaacctgacgccctttgtcaaggaagagctgaggtttgccatccagaacaagcacctctgccaccggatgtcctctgcgctggaatcagtcactgtcagcgacagacccctcggggtgtccatcacaaaagccgaggtagcccctgaagaagatgaaaggaaaaagaggcgacgagaaagaaataagattgcagctgcaaagtgccgaaacaagaagaaggagaagacggagtgcctgcagaaagagtcggagaagctggaaagtgtgaatgctgaactgaaggctcagcattgaggagctcaagaacgagaagcagcatttgatatacatgctcaaccttcatcggcccacgtgtattgtccgggctcagaatgggaggactccagaagatgagagaaacctctttatccaacagataaaagaaggaacattgcagagctaagcagtcgtggtatgggggcgactggggagtcctcattgaatcctcattttatacccaaaaccctgaagccattggagagctgtcttcctgtgtacctctagaatcccagcagcagagaaccatcaaggcgggagggcctgcagtgattcagcaggccctttcccattcttgccccagagtggggtcttgggaccaggggcaagtgcatcttttgccttcaantccagggttttagggcctttaaacacattgggccnttctttatgtttnccagatgggcccccagttggtgttcctg

SEQ ID NO: 350998 - DNA, 1225 bp, Homo Sapiens
gctaagcagtcgtggtatgggggcgactggggagtctcattgaatcctcattttatacccaaaaccctgaagccattggagagctgtcttcctgtgtacctctagaatcccagcagcagagaaccatcaaggcgggagggcctgcagtgattcagcaggcccttcccattctgccccagagtgggtcttggaccagggcaagtgcatctttgcctcaactccaggatttaggccttaacacactggccattcttatgttccagatggcccccagctggtgtcctgcccgcctttcatctggattctacaaaaaaccaggatgcccaccgttaggattcaggcagcagtgtctgtacctcgggtgggagggatggggccatctccttcaccgtggctaccattgtcactcgtaggggatgtggagtgagaacagcatttagtgaagttgtgcaacggccagggttgtgctttctagcaaatatgctgttatgtccagaaattgtgtgtgcaagaaaactaggcaatgtactcttccgatgtttgtgtcacacaacactgatgtgacttttatatgctttttctcagatctggtttctaagagttttggggggcggggctgtcaccacgtgcagtatctcaagatattcaggtggccagaagagcttgtcagcaagaggaggacagaattctcccagcgttaacacaaaatccatgggcagcatgatggcaggtcctctgttgcaaactcagttccaaagtcacaggaagaaagcagaaagttcaacttccaaagggttaggactctccactcaatgtcttaggtcaggagttgtgtctaggctggaagagccaaagaatattccattttcctttccttgtggttgaaaaccacagtcagtggagagatgtttggaaaccacagtcagtggagcctgggtggtacccaggctttagcattattggatgtcaatagcattgtttttgtcatgtagctgttttaagaaatctggcccagggtgtttgcagctgtgagaagtcactcacactggccacaaggacgctggctactgtctattaaaattctgatgtttctgtgaaattctcagagtgtttaattgtactcaatggtatcattacaattttctgtaagagaaaatattacttatttatcctagtattcctaacctgtcagaataataaatattggaaccaagacatggtaaac

SEQ ID NO: 350999 - DNA, 2127 bp, Homo Sapiens
  misc_feature (1473)..(1477): n is a, c, g, or t
tgtgaagatggcggagctgcagatgctgctggaagaggaaatcccggggggccgccgggccctcttcgacagctacacaaatctggaacgggtggccgattactgcgagaacaactacatacagtcagcagataagcagagagccctagaagaaaccaaagcctacaccacccaatccttagcaagtgttgcctatctgataaacaccttggccaacaatgtcctgcagatgctggatatccaggcatcccagctacgaaggatggaatcttcaatcaatcatatttcacaaacagttgatattcataaagagaaagttgcaagaagagaaattggtattttgactaccaataaaaacacttcaaggacacataagattattgctccagccaaccttgaacgaccagttcgttatattagaaaacctattgactatacaattctagatgatattggacatggagtaaaggtgagtacccagaacatgaagatgggtgggctgccgcgtacaacacctccaactcagaagccccctagtccccctatgtcagggaaagggacacttgggcggcactccccctatcgcacactggagccagtgcgtcctccagtggtaccaaatgattacgtacctagcccaacccgtaatatggctccctcgcagcagagccctgtgaggacagcttctgtgaatcaaagaaatcgaacttacagcagcagtgggagtagtggagggagccacccaagtagtcggagcagcagtcgagagaacagtggaagtggtagtgtgggggttcctattgctgttcctactccatctcctcccagtgtctttccaggtcatcctgtacagttctacagcatgaataggcctgcctctcgccatactcccccaacaatagggggctcgttgccctatagacgccctccttccattacttcacaaacaagccttcagaatcagatgaatggaggacctttttatagccagaatccagtttcagatacaccacctccaccgccacctgtggaagaaccagtctttgatgagtctcccccacctcctcctcctccagaagattacgaagaggaggaagctgctgtggttgagtatagtgatccttatgctgaagaggacccaccgtgggctccacgttcttacttggaaaaggttgtggcaatttatgactatacaaaagacaaggaagatgagctgtcctttcaggaaggagccattatttatgtcatcaagaagaatgacgatggttggtatgagggagttatgaatggagtgactgggctttttcctgggaattacgttgagtctatcatgcattattctgagtaaagctcagcagggctgtgcttgcctcacaggaatagtcaggtcttcccagattatctgaaggccctggggattccactccagtaaagtagaatgaaggatacaaatgataaaaattacactttttnnnnnggtttattccccagtattaaaaacaaagcaagctgagtctgaacaaatggatctttctgccatcatttgtacaatgctgagctgtctggattgaaataaaatgaccatttttatgtatgtcaaaggtataacagcataactgtgtagccaaaacaaaatcagattaagactgattcagaaaaatctgggatctttctcaggaatactgtatacccttgggatttctcctcctgcagaatctgtggcattggatgttcttcattgcctgtgctaaaggggttaacctcatggcccagtgggtaccctagcccctccttttcttccacttgtatgaagaggagggaaccaaattttaaataccacaacttaaccatttttacaaattatgacagatggatataatcctcatgtgacactgtaaattctgcaatactctcagaacttgagtgcaccaaaagagtgaatgctgaactcacttgcatcccttcatgtttctgtttgtggattataaggatgatgaaatgtgaaagtctcccaacactctgagggtggtgaacgattgccacccgtttgattttaatgtgctgctgcatgagactgcattgttgctaatggccagtgtacccagatgtgaagtgtggtaggctggt

SEQ ID NO: 351000 - DNA, 338 bp, Homo Sapiens
cacccaggcgcacttctcatgaataggccagccctcgccatactcccccaacaaaagggggctcgtagcccgataaacgcccaccttccattacatcacaaacaagccttcagaataagatgaatggaggacctttttatagaccagaatccagtatctcttgctcctcctcctccctccatcctacaggtaactcctcagttacctgaaatgggatttgtggccagagtccaagaaaatatttcagatacaccacctccaccgccacctgtggaagaaccagtctttgatgagtcccccacacatcgctctcgtccagaagtgcgctaggggacggg

SEQ ID NO: 351001 - DNA, 929 bp, Homo Sapiens
  misc_feature (613)..(613): n is a, c, g, or t
  misc_feature (650)..(650): n is a, c, g, or t
  misc_feature (875)..(875): n is a, c, g, or t
tgtctgatgctcagggcagctacaaactggatgaagctcaggctgtcttgagagaaacaaaagccatcaaaaaggctattacctgtggggaaaaggaaaagcaagatctcattaagagccttgccatgttgaaggacggcttccgcactgacagggggtctcactcagacctgtggtccagcagcagctctctggagagttcgagtttcccgctaccgaaacagtacctggatgtaagctcccagacagacatctcgggaagcttcggcatcaacagcaacaatcagttggcagagaaggtcagattgcgccttcgatatgaagaggctaagagaaggatcgccaacctgaagatccagctggccaagcttgacagtgaggcctggcctggggtgctggactcagagagggaccggctgatccttatcaacgagaaggaggagctgctgaaggagatgcgcttcatcagcccccgcaagtggacccaggggaggtggagcagctggagatggcccggaagcggctggaaaaggacctgcaggcagcccgggacacccagagcaaggcgctgacggagaggttaaagttaaacagtaagaggaaccagcttgtnagagaactggaggaagccacccggcaggtggcaactntgcactcccagctgaaaagtctctcaagcagcatgcagtccctgtcctcaggcagcagccccggttccctcacgtccagccggggctccctggttgcatccagcctggactcctccacttcagccagcttcactgacctctactatgacccctttgagcagctggactcagagctgcagagcaaggtggagttcctgctcctggagggggccaacggcttccggncctcaggctgcatcaccaccatccacggaggatgaggtgggcaagacccagaag

SEQ ID NO: 351002 - DNA, 1267 bp, Homo Sapiens
aattcatatttgagtgggcggtggcgattggtgttggcggtctggctcagctgggcagggggtaactttactgatttgggggtggtttttagtttaatttttcttttctagcttcccatcgacggtcagtgcgcacgttgtaatcagctgaggccatgtcaggagacggagccacggagcaggcagctgagtatgtcccagagaaggtgaagaaagcggaaaagaaattagaagagaatccatatgaccttgatgcttggagcattctcattcgagaggcacagaatcaacctatagacaaagcacggaagacttatgaacgccttgttgcccagttccccagttctggcagattctggaaactgtacattgaagcagagattaaagctaaaaattatgacaaggttgaaaagctatttcagagatgccttatgaaggttttgcacattgatttatggaagtgttatctttcatatgtccgagaaaccaagggtaaactaccaagttacaaagaaaaaatggctcaagcatatgactttgcactggataaaattggaatggaaattatgtcctatcagatttgggtggattacatcaatttcctaaaaggcgtggaagctgtaggatcttatgcagaaaatcaaagaataacagctgtccgaagagtttatcaacgaggttgtgttaatccgatgatcaacattgaacagctctggagagactataacaagtatgaagagggtatcaatattcatttagctaaaaaaatgattgaagatcggagtagagattatatgaatgctagacgtgtagcaaaggaatatgagacagtaatgaaaggcttggaccgtaatgctccctcggtgcctcctcagaatactcctcaagaagctcaacaagtagatatgtggaagaaatatatacagtgggaaaagagcaaccctcttcgtacagaggatcagacccttataacaaaaagagttatgtttgcttatgaacagagccctgcttgtgctgggccatcaccctgatatttggtatgaaactgccccattaccttgagcaatcaagttaaactgccccccgaaaaagggagatatgaataatggcccaaattattataatgatgaagcctgctcaataatatattgaaaagaaccccctaaagcaccttttatttgaaggaaacaaaaatggcctctcttcttaatctttgccatcatggccacggattttttgtaaaagaagaacattctcccaccggaac

SEQ ID NO: 351003 - DNA, 533 bp, Homo Sapiens
  misc_feature (37)..(37): n is a, c, g, or t
  misc_feature (62)..(62): n is a, c, g, or t
gggcacattccaccataaccaggaatcccccaagtancctaccttcaaaaaatggaggaaancctatcctagtcatatgtgaagactgcccaagaaatacctaggtgaaaaaaatgaagtcgtatgtatatgatgtcaatttttgagtaaaaatgagagaaaaaataagactttccatttgtatatgtttgtacctgtctacaacagtgtgaatggaaacctaagaaaccaagagcacaggctattcatggtgggagatgagtgtgcagtggaggaagctgggccaaggacacaggaacacattcactgaataactttttatattgtttgtttcttttaaccatgtgaatgtattacctattcaaaaaattaaataagataagcatattttataagctttatgattcaatacaaatcaaacaatgcttttaattgttcccactttgtagctgaatggaaataggccaacttacaaaatgtcacaaaggttctagaatcagtctttctcgtctcaaattcttgctccacaacct

SEQ ID NO: 351004 - DNA, 867 bp, Homo Sapiens
  misc_feature (852)..(852): n is a, c, g, or t
atgggttccaaaaagagaactacccctctcctggtacatttccaggtgtttttcacagggcaagtggatttcacaatgtgagtgctgtcagcaccaaagggaatggccaacaggcatggagcagcctttgttaaagggaagcattcattaggaaattgactggctgcgtgtttacagactctgggggaagacactgatgtcctcaaactggttaactgtgacacggctcgccagaactctgcctgtctatttgtgacttacagatttgaaatgtaattgtcttttttcctccatcttctgtggaaatggatgtctttggaacttcattccgaggagataagctttaactttccaaaagggaattgccatgggtgtttttcttctgtggtgagtgaaacaatctgaggtctggttcttgctgaccttgttgccctgcaaacttcctttccacgtgtacgcgcacaccaacacgaaatgccatcactcctactgcggctgctatgaagcttactggttgtgatgtgttataatttagtctgtttttttgattgaatgcagtttaatgtttccagaaagccaaagtaattttcttttcagatatgcaaggctttggtgggtccaaaaaatgtctatcacaagccattttttccttttcctctctcgaaaagttaaaatatctatgtgttattcccaaaccctcttacctatgtatctgcctgtctgtccatcatcttccttcctccctatctctgtgtatctggatggcagccgctgcccaggggagtggctgtggggagggcaggtactgtctttgcctgtgggtccagctgagccatccctgctgggtgatgntgggcaagaccctgg

SEQ ID NO: 351005 - DNA, 1250 bp, Homo Sapiens
  misc_feature (50)..(362): n is a, c, g, or t
agtcgacggtaccggacatatgcccgggaattcggccattacggccgggnnnnnnnnnnnnnnnnnnnnnnnnnnnnnnnnnnnnnnnnnnnnnnnnnnnnnnnnnnnnnnnnnnnnnnnnnnnnnnnnnnnnnnnnnnnnnnnnnnnnnnnnnnnnnnnnnnnnnnnnnnnnnnnnnnnnnnnnnnnnnnnnnnnnnnnnnnnnnnnnnnnnnnnnnnnnnnnnnnnnnnnnnnnnnnnnnnnnnnnnnnnnnnnnnnnnnnnnnnnnnnnnnnnnnnnnnnnnnnnnnnnnnnnnnnnnnnnnnnnnnnnnnnnnnnnnnnnnnnnnnnnnnnnnnnnnnnnnnnnnnnnnnnnnnnnnngatatagtattaatgcctgtatttatgaagacagggccatgtgcactgctgctatgctgaaatgaacttttataaagtattatggactatagccaactacagatggcatatgccgttaaagatgcatttttctatgtatctaatattttgtgtacagtaaaagtcagaactcatttaaagaactttaagggatcctttagaaacatttttacttaatttcaaatgagtgggctgagcatgtagactagcagctttttatcaaacctggcattgtcaggttgaacttataaatacgaatagttactactctgacttgtaaatgtagctgctaaagtatgaggtatatttaagaagaatagattagtttcattatacctataagaacaagaattcaaaagtgaggtagtcatccaggtttccccctcccacaatatttttgtatcataaaatttagatgactttttttgggttacatttttatccatatattttgaactaaccagaacttggcagaatgtgtgttgaataattctttacatttaacaattaaaaaacaactaaaactgaatagcaaatagtttattggtaagtacacggtttcaacgggagtaataaattcacatgaaaaggagacaataatcaagtcaaaagaataaatgcttactaatcatcagaaaatctgtggccattagggctggcacgtaaaaatccaaaatcactcagaggccaaatcttaaagaagattcgtcctcttattagtccatatggaataggtccatagcacctggaatctgtagaattctgtagattgtcaccttctaaccaaacatgacccattggcacctcgggccccaaagaaccctggagacccttaaccaggacacaggt

SEQ ID NO: 351006 - DNA, 515 bp, Homo Sapiens
  misc_feature (359)..(418): n is a, c, g, or t
gtctgtcaagaaagattctgttgctgccggaaagccaaaggagaaggggaaaataaaagtcattaagaaggaaggcaaggccgcagaggctgtcgctgcagctgtcggcactggagccaccacagcagctgtcatggcggcagctggaatagcagccattggccctgccaaagaactcgaagctgagaggtcccttatgtcatctcctgaggatctaaccaaggactttgaagagttaaaggctgaagaggtcgatgtaacaaagggacatcaaagcctcaagctggagctaaatcgaagacgaagagaaactgaaggaaactgagccagtcgaagcctacgtcatccagaaggaagtnnnnnnnnnnnnnnnnnnnnnnnnnnnnnnnnnnnnnnnnnnnnnnnnnnnnnnnnnnnnatcatctactcctctgtctgaagcaaaaaaaccagctgctttaaaaccaaaagtacccaagaaggaagagtctgttaagaaagaaacaccgccaaag

SEQ ID NO: 351007 - DNA, 2078 bp, Homo Sapiens
cggcccggaaatcttcgggatatcgtcgacccacgcgtcggcggccggagcgagacacttcgccgaggcacagcagccggcaggatggcgaccgtggtggtggaagccaccgagccggagccgtccggcagcatcgccaacccggcggcgtccacctcgcctagcctgtcgcaccgcttccttgacagcaagttctacttgctggtggtcgtcggcgagatcgtgaccgaggagcacctgcggcgtgccatcggcaacatcgagctcggaatccgatcatgggacacaaacctgattgaatgcaacttggaccaagaactcaaactttttgtatctcgacactctgcaagattctctcctgaagtcccaggacaaaagatccttcatcaccgaagtgacgttttagaaacagtggtcctgatcaacccttctgatgaagcagtcagcaccgaggtgcgcttaatgatcactgatgctgcccgacacaagctgctcgtgctgaccgggcagtgctttgaaaataccggagagctcattctccagtccggctctttctccttccagaacttcatagagattttcaccgatcaagagatcggggagttactaagcaccacccatcctgccaacaaagccagcttaaccctgttctgtcctgaagaaggggactggaagaactccaatcttgacagacacaatctccaagacttcatcaatattaaactcaattcagcttctatcttgccagaaatggaaggactttctgagtttaccgagtatctctcagaatcagtggaagtcccatctccctttgacatcttggaacctcccacatcgggtggatttctgaagctctccaagccctgctgttatatttttccaggagggaggggcgattctgccttgtttgcagtgaatggtttcaatatgctcatcaatggcggatcagagagaaaatcctgcttctggaagctcatccgacacttagaccgagtggactccatcctgctcacccacattggggatgacaatttgcctggaataaacagcatgttacagcggaaaattgcagagctcgaggaagaacagtcccagggctccaccacaaatagtgactggatgaaaaacctcatctcccctgacttaggagttgtatttctcaatgtacctgaaaatctcaaaaatccagagccaaacatcaagatgaagagaagcatagaagaagcctgcttcactctccagtacctaaacaaattgtccatgaaaccagaacctctgtttagaagtgtaggcaatactattgatcctgtcattcttttccaaaaaatgggagtaggtaaacttgagatgtatgtgcttaatccagtcaagagcagcaaggaaatgcagtattttatgcagcagtggactggtaccaacaaagacaaggctgaattcattctgcctaatggtcaagaagtagatctcccgatttcctacttaacttcagtctcatctttgattgtgtggcatccagcaaaccctgcggagaaaatcatccgagtcctgtttcctgggaacagcacccagtacaacatcctggaagggttggaaaagctcaaacatctagactttctgaagcagccactggccacccaaaaggatctcactggccaggtgcccactcctgtggtgaaacaaacaaaactgaaacagagggctgatagccgagaaagtctgaagccagccgcaaaaccacttcctagcaaatccgtgcgcaaggagtcaaaagaagaaacccctgaggtcacaaaagtgaatcacgtggaaaagccacccaaagttgaaagcaaagaaaaggtaatggtgaaaaaagacaagccagtaaaaacagagaccaaaccttcagtgactgaaaaggaggttcccagcaaagaagagccatctccagtgaaagccgaggtggctgagaagcaagccacagatgtcaaacccaaagctgccaaggagaagacggtgaaaaaggaaacaaaggtaaagcatgaagacaagaaagaggcgaaagaaaagccaaagaaagaagtggctaaaaaggagga

SEQ ID NO: 351008 - DNA, 496 bp, Homo Sapiens
  misc_feature (61)..(121): n is a, c, g, or t
  misc_feature (137)..(331): n is a, c, g, or t
agccacagatgtcaaacccaaagctgccaaggagaagacggtgaaaaaggaaacaaaggtnnnnnnnnnnnnnnnnnnnnnnnnnnnnnnnnnnnnnnnnnnnnnnnnnnnnnnnnnnnnngacaaaacacctatcnnnnnnnnnnnnnnnnnnnnnnnnnnnnnnnnnnnnnnnnnnnnnnnnnnnnnnnnnnnnnnnnnnnnnnnnnnnnnnnnnnnnnnnnnnnnnnnnnnnnnnnnnnnnnnnnnnnnnnnnnnnnnnnnnnnnnnnnnnnnnnnnnnnnnnnnnnnnnnnnnnnnnnnnnnnnnnnnnnnnnnnnnnnnnnnnnnnctccctaaagacgcaaagaaatcatctactcctctgtctgaagcaaaaaaaccagctgctttaaaaccaaaagtacccaagaaggaagagtctgtcaagaaagattctgttgctgccggaaagccaaaggagaagggggaaattaaagtcattaagaatgaagca

SEQ ID NO: 351009 - DNA, 1942 bp, Homo Sapiens
agctggaatagcagccattggccctgccaaagaactcgaagctgagaggtcccttatgtcatctcctgaggatctaaccaaggactttgaagagttaaaggctgaagaggtcgatgtaacaaaggacatcaagcctcagctggagctaatcgaagacgaagagaaactgaaggaaactgagccagtcgaagcctacgtcatccagaaggagagagaagtcaccaaaggtcctgccgagtcccctgatgagggaatcactaccactgaaggggagggcgaatgtgaacagacacctgaggagctggagcccgtcgagaagcagggagtagacgacattgaaaaatttgaagatgaaggagccggttttgaagaatcttcagagactggagactatgaagagaaggcagaaactgaggaggctgaggagccagaagaggatggggaggaacacgtatgtgtgagcgcctccaagcacagccccactgaggatgaggaaagtgccaaggcggaggctgatgcatacatcagggagaagagggagtctgtggccagtggggatgaccgaggccgaagaagacatggatgaggccattgagaaaggagaggctgaacaatctgaagaggaggctgatgaggaggacaaagctgaagatgccagagaggaggaatatgagccggaaaaaatggaagctgaagactatgtgatggctgtggtcgacaaggctgcagaggctggtggtgccgaggagcagtatggattcctcaccacaccaaccaagcaactaggagcccagtctcctggccgagaacctgcatcttcaattcatgatgagactttacctggaggctcagagagcgaggccaccgcttctgatgaggagaatcgagaagaccagcctgaggaattcactgccacctctggctacactcagtctactattgagatatccagtgagcccacccccatggatgagatgtctacccctcgagacgtgatgagtgatgagaccaacaatgaagagacggagtccccttctcaggaattcgtaaatatcaccaaatatgaatcttcattgtattctcaggaatactctaaacctgctgatgttacaccgctcaatggattttctgaaggatcaaaaacagatgccactgatggcaaggattacaatgcttcagcctctaccatatcaccaccctcttccatggaggaagacaaattcagcagatctgctttacgtgatgcttactgctctgaagtgaaagccagcaccactttggacatcaaagatagcatctcagctgtttcaagtgaaaaggtcagcccatcgaagagcccgtccctgagtccatctccaccatcacccttagaaaagacccccctgggtgaacgtagtgtgaacttctctctgacgcccaatgagattaaagtctctgcagaggcagaagtagccccggtgtctcctgaggtgacccaagaagtagttgaagaacattgtgctagtcctgaggacaagactctggaagtggtgtcaccatctcagtccgtgactggcagtgctggtcacacaccttactatcaatctcctactgacgagaaatccagtcatctccctacagaagtcattgaaaaaccaccagcagttccagtgagttttgaattcagtgatgccaaagatgagaatgaaagggcttcagtaagccccatggatgagcccgtgcctgactcagagtctcctattgaaaaagttttgtctcctttacgcagcccgcccctcattggatccgagtctgcttatgaaagttttctaagtgctgatgacaaggcttctggcagaggtgccgaaagtccttttgaagaaaagagtggaaaacaaggctctccagaccaagtaagtccagtttctgaaatgacttctactagtctttaccaagacaaaca

SEQ ID NO: 351010 - DNA, 452 bp, Homo Sapiens
  misc_feature (425)..(425): n is a, c, g, or t
  misc_feature (431)..(431): n is a, c, g, or t
cgagacacttcgcgaggcacagcagccgacagatggcgagccgtggtggtggaagcccgaggccggagccgtccaagacatcgccaacccggcgcgtccacctcgcctagcctgtcgcaccgcttccttgacagcaagttctacttgctggttggtcgtcggcgagatcgtgaccgaggagcacctgcgacgtgccatcggaaccatcgagctcggaatccgatcatgggacacaaacctgattgaatgcaacttgggaccaagaactcaaactttttgtatctcgacactctgcaagattctctcctgaagtcccagggacaaaagatcctttcatcaccgaagtgaacgtttttaggaaacagtgggtccttgattcaaacccttcttgatggaagccagttcagccaccgaggtggcttttnaatggntccaatttgattgctgggccg

SEQ ID NO: 351011 - DNA, 501 bp, Homo Sapiens
gctgtgggctggctgcccttgccagctcagacaggctggcgagttttcagcttccctaagggactggcatagggttttgtggggacaatgccaggaacctgggggaaactgaatgcgttttatcctaagaagttcatccctcctgctcttactgtttccggccctggaggagaatgagggaggagagggttttctatgactgtgttagcttttattattagcaagagggctccttttgtaatttgtgcatgaaattcatgtcatttcctgggagaggagagggccgactggagagggtggggggcacactggggaagcaggcagaggtttccttcccttgtaagggggtggggagagtaaaaagagggggtgctatccagttcgcctgatgagggctctcgaaccagccgttttgggttgtgttaaaggtgagaccttcctccattaatgtacaatctcgaactaactgctaataaagtggggttctgtttgtaaaaaaaa

SEQ ID NO: 351012 - DNA, 1472 bp, Homo Sapiens
  misc_feature (101)..(128): n is a, c, g, or t
  misc_feature (598)..(640): n is a, c, g, or t
gcagttagtttgagattgtacattaatggaggaaggtctcacctttaacacaacccaaaacggctggttcgagagccctcatcaggcgaactggatagcannnnnnnnnnnnnnnnnnnnnnnnnnnntacaagggaaggaaacctctgcctgcttccccagtgtgccccccaccctctccagtcggccctctcctctcccaggaaatgacatgaatttcatgcacaaattacaaaaggagccctcttgctaaaataaaagctaacacagtcatagaaaaccctctcctccctcattctcctccagggccggaaacagtaagagcaggagggatgaacttcttaggataaaacgcatccagtttcccccaggttcctggcattgaccccacaaaaccctatgccagtcccttagggaagctgaaaactcgccagccgtctgagctggcaagggcagccagcccacagctgtcaagccaggaacccagtgttgcctcaacggcctgggcagcagggggtctaggccgccccctcatcctcacatcaactagaacagaggctgcctcctttgatgtgtgaaaatccctgctgtggccccnnnnnnnnnnnnnnnnnnnnnnnnnnnnnnnnnnnnnnnnnnnaagatggtcaggcagctactaaatgcacccggctgggatgaaacttcacagctcctgcctgccagccagggctcttctcacaccacagcttgcgggaggcagttccccatgtaggcttttccctgctgcaactgagagcctggctctgctccagtgcacacagaccacgggtctccaggaaatgaaaaccctgggaccccaaaatagaaagagagagacatatgatgtgtttggtgccctgtggcccatccccagggtcgaaggcccagccttcaggcatgcagcctcctccttccagagccctgtgtccttccttccaaggcccagatattacggccttctccagggagactttccggcccccccagagctcttgctctaactggcccctctgctgttttggcacttggtacaggtgacagtggaggcgcatcttaggcagaagtgaagctgtcaagtcagcacaaaaggcaaaatctcatgtagcctaaattatccttgaaagtacaggggatagaagaagtggttatgcgacaccatgagcaaacaatctgacaaattcagaatgtggggcttcaaaaagacagcaggcctagggcctcaaaaacaatgtcatttaaaaactcaaagtgagctgagggaagacctttcagcattcaaagaggttttaaaaacatagttagaaaatacaatgtgtgcaccgtgactggatgctgattccaaaccagacacataagttacctgggagacattggggggatttgaatacagattagatagcagacatcgctggcgacgcgtggtcgacgatatcccggaattccggaccgta

SEQ ID NO: 351013 - DNA, 923 bp, Homo Sapiens
  misc_feature (774)..(774): n is a, c, g, or t
  misc_feature (794)..(794): n is a, c, g, or t
ggtggtgatgtgatttacattcttagcaaggaatacaatagatatggctggtgggtaggagaaatgaagggagccattggcttggtgcctaaagcctacataatggagatgtatgatatttgagagtcctggaaaaggaaaattcttctgcttgtctgcaaatgctttggatttagaagcgtcatgaaagcacgagtgacagctcctaacctctccttgttttattaaacattacttatctttgactgttattttatgcagtcgctcattaaaatattcctctgatgtgaaattaaatgaaggatattaatgtaaattagatgcaaccagttaagttatacctgttgctattttgcaaagaaataattatagtttttatttacccatttgatttgtgtgaagaattcatcactattttatacgtaacatatagtctactatagcatagtatgctactattgctacttctggtgtgatttgtaatgtttcttaatcattggacatcaattatttttagagagtaatgtataatttcatagcattttaaatttagtgtatcatgcgagttttttttggtagatgctgaagaatgtggttgctaaacaaagaatgctaaagaatgttcaaactttatagataacctttattggtattatttattttcacacaatttaaattcctattaagtacagccgcaagaaagaaaaaatgatgaagttgcaaatggcagtgtgctgtcacctgcaacagaagtgcgtacccagaagtatgacntcatgcaaagcattttaccngtacaaactatccctggtgcgatgatgggcctggcaacattttctactgtacttttgtttaaatttaatgaaacaaaaaattcctaagaaataccaccctaccactaacaaaatggtataaagaatctc

SEQ ID NO: 351014 - DNA, 1890 bp, Homo Sapiens
  misc_feature (1214)..(1215): n is a, c, g, or t
accatctgcaggcgcttccagcgctttatagttctttccgggacagacggacagacagacagtgcggcccgctctgtcggcccgcatcattggcaccttggacacggccccaggcccaactcagtccctggtaccctaccgggaggattccggtcccgccccagctcagcacctcggacagttcccggcccagcctacccccctcccccctccctccgcaaacaaccaaataaattaaaaggggcagtggggaggagcaacaaaaaagctaaggataaggaagcgggatgtccctcctccaaggtaagaagttttcttttcctcccacctgtccactgaggcgccgcggccggggtggtctcccaggttgattttgcctccaaacctcagcctcctgaaagaagccggcagccccttcccccacaccccccagctcccagcatgcaacacgttggaaaaggtggggagaggcggtgggggtggggcgagggaccatcctggtggctgtctggatacctgggactgcagtttctcctggcacctcagtcgatccaaattaaaaactaatattccctttgatcaggggagaggggtgtggtgactcagtcaggaataaaaaaatgcaagctgacacaagtggaggaagaaggcagacaggagggaagatggtgacacatgacaggagcaacaagaagggcagatggggacacaggtgcaggaggagaaacaggggtctacggggtacagtcaggcaaggggtaagatggagatgcagacacacaaacccaaggaacggaaaatggaaaggcaggtagagggaggtaagaaagtagaggaacaggatagtagtagggagataaagaggaatgcagacaggaggaaaaatgaagacacaaaaaggaggcaaggaaatggataaaaccgagggggaatgggctgaagggaagggggagaccccggcagaaatggagaaatgggggcgcagacagacgggaagagtgaggttggagtgcctttcccgcgctcatcttccgtccccactccacgcccagcaaatccaaacaccgcggcctctggtgtcccggtctccactttcccctgaggggcatgggcgtctcctcctccgcccagccggggcgctgagcggcggtaacagcggcggtggctttgtggtcccggggggtccgagtgtgtgtcaggggctggggcggggnntgggcgcggcccctgggtatccctagcggtccaggttcatagtccagtgcttggttccggccgcgcagctgtccctggcggccgaggaggcggcgggcgcgcccccgctcggtgggcccccgccgctggcggcggcctcgccctcgttcttgaggtcttgaaagacctgcgtgaagaagtgggggtcggcgttgagccgcagcatctgcgggctgagccgctggatgaggcgcaggcagcgctgccagaagcgctccttgtcgggctccacgaggaagggcttgagtgggtaggagatctcgttgcccatgtaggagtaggcgaggtagaggcaggtgaggaaggcggcctgcagctcggcggccgacgccagctcgtccccacgcagcgactcgcggcacagcaggtacacgaacaccaggtttgcaggcgtaatgaaggcctggtcttgccagccctgcagcagcagcgagcggtccacaccgcggaaccagcccaccagctcgcccgggctcagctccttgaggcgatagcagcgtcggcacacgaagtcgcccagacagcgcagcagctcgccggtggacgcctgcacgatgacccgccgcggcgagccgccaggcaccggcggcgccacctgcggggctgggggaggcggcggcggaggctttcccccgc

SEQ ID NO: 351015 - DNA, 1007 bp, Homo Sapiens
  misc_feature (868)..(868): n is a, c, g, or t
  misc_feature (906)..(906): n is a, c, g, or t
  misc_feature (932)..(932): n is a, c, g, or t
  misc_feature (956)..(956): n is a, c, g, or t
  misc_feature (966)..(966): n is a, c, g, or t
actttaaaagtttactcgggccgggacgcagggcaaagcgagccatggctgtctacgtcgggatgctgcgcctggggaggctgtgcgccgggagctcgggggtgctgggggcccgggccgccctctctcggagttggcaggaagccaggttgcagggtgtccgcttcctcagttccagagaggtggatcgcatggtctccacgcccatcggaggcctcagctacgttcaggggtgcaccaaaaagcatcttaacagcaagactgtgggccagtgcctggagaccacagcacagagggtcccagaacgagaggccttggtcgtcctccatgaagacgtcaggttgacctttgcccaactcaaggaggaggtggacaaagctgcttctggcctcctgagcattggcctctgcaaaggtgaccggctgggcatgtggggacctaactcctatgcatgggtgctcatgcagttggccaccgcccaggcgggcatcattctggtgtctgtgaacccagcctaccaggctatggaactggagtacgtcctcaagaaggtgggctgcaaggcccttgtgttccccaagcaattcaagacccagcaatactacaacgtcctgaagcagatctgtccagaagtggagaatgcccagccaggggccttgaacgagtcagaggctcccagatctgaccacagtcatctcggtggatgcccctttgccggggaccctgctcctgggatgaagtggtggcggctggcagcacacggcagcatctggaccagctccaatacaaccagcagttcctgtcctgccatgaccccatcaacatccagttcaccttcggggacaacagggcagccccaaggggccanccctcttcccattacaacattgttcaacaattccaacnttttagggagagcgcttgaaattgcntgaggaggacaccagaggcatttncgggttgttncttgcccaacccctgttaccttttgttggggtttccttggg

SEQ ID NO: 351016 - DNA, 861 bp, Homo Sapiens
atggtctccacgcccatcggaggcctcagctacgttcaggggtgcaccaaaaagcatcttaacagcaagactgtgggccagtgcctggagaccacagcacagagggtcccagaacgagaggccttggtcgtcctccatgaagacgtcaggttgacctttgcccaactcaaggaggaggtgggtcctgacctggaaacctcaaagtgggcaagtactagctcccaagctgccctagctgggcagaaccaggagcgtgggcacctggctatggggcaatgtgctagggctgccagagaaccccgagggatggcaggagaaggagacaggactgacgcacaaggggtccaatgcctcctgtatcagcagctcctggggcacctgttaactatgcaggccccagggcagacccactgaggctgggaatctgcctgtccctttgtccccagtgactgtgatgagaactccgggctaagggctgagggtgggagtcttgggccccttcctgcttgccccctttcaccccttgcgccccatcttttacactaggtggacaaagctgcttctggcctcctgagcattggcctctgcaaaggtgaccggctgggcatgtggggacctaactcctatgcatgggtgctcatgcagttggccaccgcccaggcgggcatcattctggtgaggaggggcttgcttggcacagcttggtgtgcatggggggaacatcactgaaaggggagccccctcagggcccctcagcccccagggatcaaaaaccaggtggccctttgtttgggttttcaaaaacccaagggtaagtgggctttttttcctcccctggaaggccccccaacccaaaggggt

SEQ ID NO: 351017 - DNA, 1149 bp, Homo Sapiens
  misc_feature (9)..(9): n is a, c, g, or t
  misc_feature (14)..(14): n is a, c, g, or t
  misc_feature (17)..(17): n is a, c, g, or t
  misc_feature (23)..(23): n is a, c, g, or t
  misc_feature (28)..(28): n is a, c, g, or t
  misc_feature (34)..(34): n is a, c, g, or t
  misc_feature (37)..(37): n is a, c, g, or t
  misc_feature (43)..(43): n is a, c, g, or t
  misc_feature (45)..(45): n is a, c, g, or t
  misc_feature (51)..(53): n is a, c, g, or t
  misc_feature (63)..(64): n is a, c, g, or t
  misc_feature (70)..(70): n is a, c, g, or t
  misc_feature (76)..(76): n is a, c, g, or t
  misc_feature (87)..(88): n is a, c, g, or t
  misc_feature (94)..(95): n is a, c, g, or t
  misc_feature (97)..(97): n is a, c, g, or t
  misc_feature (103)..(103): n is a, c, g, or t
  misc_feature (107)..(108): n is a, c, g, or t
  misc_feature (113)..(113): n is a, c, g, or t
  misc_feature (116)..(116): n is a, c, g, or t
  misc_feature (119)..(119): n is a, c, g, or t
  misc_feature (126)..(126): n is a, c, g, or t
  misc_feature (129)..(129): n is a, c, g, or t
  misc_feature (133)..(134): n is a, c, g, or t
  misc_feature (138)..(138): n is a, c, g, or t
  misc_feature (144)..(144): n is a, c, g, or t
  misc_feature (147)..(147): n is a, c, g, or t
  misc_feature (150)..(150): n is a, c, g, or t
  misc_feature (153)..(153): n is a, c, g, or t
  misc_feature (160)..(160): n is a, c, g, or t
  misc_feature (171)..(171): n is a, c, g, or t
  misc_feature (188)..(188): n is a, c, g, or t
  misc_feature (203)..(203): n is a, c, g, or t
cttcccttnacctnaanctaaanggggnaaacancanccccgnanatttcnnntccttttgtnnccgccntttcanatcctcatttnnttccanncncctccncctnnagaantcnggngcaccanaanttannaggncccctnaancgnccnagcagantgagcccttgnccaggtaccttgatggntgagacagaaagggnaaggggcgtcctgggatgtggccctccctcgaggccctctgctccctctttgctgcccgtagcactgggagtcaggcccagtctgctccaaccccggcctgggatgaggacactgcacaaattggccccaagagaattaggaaagctgccaaaagagagctgatgccttgtgacttccctggctgtggaaggatcttctccaaccggcagtatttgaatcaccacaaaaagtaccagcacatccaccagaagtctttctcctgcccagagccagcctgtgggaagtctttcaactttaagaaacacctgaaggagcacatgaagctgcacagtgacacccgggactacatctgtgagttctgcgcccggtctttccgcactagcagcaaccttgtcatccacagacgtatccacactggagaaaaacccctgcagtgtgagatatgcgggtttacctgccgccagaaggcttccctgaactggcaccagcgcaagcatgcagagacggtggctgccttgcgcttcccctgtgaattctgcggcaagcgctttgagaagccagacagtgttgcagcccaccgtagcaaaagtcacccagccctgcttctagcccctcaagagtcacccagtggtcccctagagccctgtcccagcatctctgcccctgggcctctgggatccagcgaggggtccaggccctctgcatctcctcaggctccaaccctgcttcctcagcaatgagctctcctccagctttggctttgggaagccagactccagggactgaaaaggagcaacaaggagagggtctgcttgagaaatgccagatgcttggtccccaggaactaaggcgacagagtgcagggtgggggcaagactgggctgtaggggagctggactactttagtcttcctaaaggacaaaataaacagtattttatgcaggc

SEQ ID NO: 351018 - DNA, 2444 bp, Homo Sapiens
  misc_feature (2272)..(2272): n is a, c, g, or t
  misc_feature (2334)..(2334): n is a, c, g, or t
  misc_feature (2399)..(2399): n is a, c, g, or t
  misc_feature (2404)..(2404): n is a, c, g, or t
  misc_feature (2441)..(2441): n is a, c, g, or t
tctgtctgcctgcctcccacccgacgacactcacatggtagcgctgagcttcaacaccctgtatcatagaaggacggggtttggctccacacctgccactgctattgaaatagtttagtcttgccccagttcactgatgaggaaactgaggccctaacggcaggtggagccgggtccccgacccccgagatcggcagggcgctgaagacgtcccttccaccctccagcctctggtgcacatggcttcctccccggcggtggacgtgtcctgcaggcggcgggagaagcggcggcagctggacgcgcgccgcagcaagtgccgcatccgcctgggcggccacatggagcagtggtgcctcctcaaggagcggctgggcttctccctgcactcgcagctcgccaagttcctgttggaccggttaggggccgggagaagggcttgggggagggtacccaggcagcagcccctagcctcctctccagggcctgtcctgctgctcttttccaccctcaggtttctcactttaccaggacggcctgtgtgacttgtggcctccgagggtcctgctcccctcctcatggtctcagcgaatagcggcccttagggctggccccttacatgtgtgagtgcccagggctgagggtggctggccacctgagtcctgacctgcctcttctcctgctggcaggtacacttcttcaggctgtgtcctctgtgcaggtaggtaggggatggcagggggtgagagccagagggaagagggaccacagggtgacccagaaacaccctcctttcaaagggagccctgagtaagtttgggaagggtggggtgagttggggagcacagggtagtttgatggaggcaacctctgggtggggaagggagcaatgtctcaggatctagtgtgtctaggttctgaagaatgataaattggactggggctgaggttgccctggggtttgagggaacagggctccctgggtatggctctccagggtaagaggaggagacttcccagttcagcctgactgcttcccccacccctccaggtcctgagcctttgcctccaaaaggtctgcagtatctggtgctcttgtctcatgcccacagccgagagtgcagcctggtgcccgggcttcgggggcctggcggccaagatggggggcttgtgtgggagtgctcagcaggccataccttctcctggggaccctctttgagccctacaccttcagaggcacccaagccagcctcccttccacatactactcggagaagttggtgttccgaggccacgagtgggcaggagcttgcagatttggaatctgagcatgatgagaggactcaagaggccaggttgcccaggagggtgggacccccaccagagaccttcccacctccaggagaggaagagggtgaggaagaagaggacaatgatgaggatgaagaggagatgctcagtgatgccagcttatggacctacagctcctccccagatgatagtgagcctgatgcccccagactactgccttcccctgtcacctgcacacctaaagagggggagacaccaccagcccctgcagcactctccagtcctcttgctgtgccggccttgtcagcatcctcattgagttccagagctcctccacctgcagaagtcagggtgcagccacagctcagcaggacccctcaagcggcccagcagactgaggccctggccaggaaagctgccaaaagagagctgatgccttgtgacttccctggctgtggaaggatcttctccaaccggcagtatttgaatcaccacaaaaagtaccagcacatccaccagaagtctttctcctgcccagagccagcctgtgggaagtctttcaactttaagaaacacctgaaggagcacatgaagctgcacagtgacacccgggactacatctgtgagttctgcgcccggtctttccgcactagcagcaaccttgtcatccacagacgtatccacactggagaaaaacccctgcagtgtgagatatgcgggtttacctgccgccagaaggcttccctgaactggcaccagcgcaagcatgcagagacggtggctgccttgcgcttcccctgtgaattctgcggcaagcgctttgagaagccagacagtgttgcagcccaccgtagcaaaagtcacccagccctgcttctagcccctcaagagtcacccagtggtcccctagagccctgtcccagcatctctgcccctgggcctctgggatccagcgaggggnccaggccctctgcatctcctcaggctccaaccctgcttcctcagcaatgagctctcctccanctttggctttgggaagccaaactccagggactgaaaaggagcaacaaggagagggtctgcttganaaatnccagatgcttggtccccaggaactaaggcgacagagngca

SEQ ID NO: 351019 - DNA, 1237 bp, Homo Sapiens
agtagtccatctcccctacagcccagtctggcccccaccctgcactctgtcgccttagttcctggggaccaagcatctgccatgtctcaagcagaccctctcctggttgctccttttcagtccctggagtctggcttcccaaaagccaaagctggaggagagctcattgctgaggaagcagggttggagcctgaggagatgcagagggcctggacccctcgctggatcccagaggcccaggggcagagatgctgggacagggctctaggggaccactgggtgactcttgaggggctagaagcagggctgggtgacttttgctacggtgggctgcaacactgtctggcttctcaaagcgcttgccgcagaattcacaggggaagcgcaaggcagccaccgtctctgcatgcttgcgctggtgccagttcagggaagccttctggcggcaggtaaacccgcatatctcacactgcaggggtttttctccagtgtggatacgtctgtggatgacaaggttgctgctagtgcggaaagaccgggcgcagaactcacagatgtagtcccgggtgtcactgtgcagcttcatgtgctccttcaggtgtttcttaaagttgaaagacttcccacaggctggctctgggcaggagaaagacttctggtggatgtgctggtactttttgtggtgattcaaatactgccggttggagaagatccttccacagccagggaagtcacaaggcatcagctctcttttggcagctttcctaattctcttggggccaatttgtgcagtgtcctcatcccaggccggggttggagcagactgggcctgactcccagtgctggccagggcctcagtctgctgggccgcttgaggggtcctgctgagctgtggctgcaccctgacttctgcaggtggaggagctctggaactcaatgaggatgctgacaaggccggcacagcaagaggactggagagtgctgcaggggctggtggtgtctccccctctttaggtgtgcaggtgacaggggaaggcagtagtctgggggcatcaggctcactactgaaaggagaacaaagaggaagatggcattaactttctgggcagtcagccatcccctgcccgaccctagcccctaaactgaaaagatctcaaacttgaaacaaccctacccccaccctaggctccccattcatatctgcatcccagggaattcccggacccggtacccagcc

SEQ ID NO: 351020 - DNA, 1198 bp, Homo Sapiens
  misc_feature (65)..(65): n is a, c, g, or t
tcgcgaagggaatgactgtggtgccgcaccggggggagattaagcgcgggcgttggggccaaganttgacgggatcgactacaatataacacaagcggctgttcggggcggagaaaaggttcaagtgtccctagaagggttggcggaaacgcagtgcgcggttaaaggcggggaagagtcgcacatctaattcacgatgaggggaaaacgtgcttcatggggagtccctgttagccggcgaacccggcgggggaagctttcggagcccagggccggatatttacctttttttcaaaaacctaagacacagtaggatccggaaagacgtgggtcccttttccccaacacagaagttgccttccatcaaaattaccctgtggttccccaaactcacccccaccccttccccaaacttactcaggggctccctttgaaaggaggggtgtttctgggtcacccctgtggtccctcttccctctggctctcaccccctgccatcccctacctacctgcacagaggacacagcctgaagaagtgtacctgccagcaggagaagaggcaggtcaggactcaggtggccagccaccctcagccctgggcactcacacatgtaaggggccagccctaagggccgctattcgctgagaccatgaggaggggagcaggaccctcggaggccacaagtcacacaggccgtcctggtaaagtgagaaacctgagggtggaaaagagcagcaggacaggccctggagaggaggctaggggctgctgcctgggtaccctcccccaagcccttctcccggcccctaaccggtccaacaggaacttggcgagctgcgagtgcagggagaagcccagccgctccttgaggaggcaccactgctccatgtggccgcccaggcggatgcggcacttgctgcggcgcgcgtccagctgccgccgcttctcccgccgcctgcaggacacgtccaccgccggggaggaagccatgtgcaccagaggctgtgcgcccccacgcgccctcacccccactgcgcctgcgcctgcgcctcccgggcctagcgagcaggcccggagctgctggaagacaggggcccacctcgcgcgcgcagcgtttctcttttaagaagaaacggtgcctctcggcgtcggctgctgtagcccggaactgaggcccgcgccccagagatcccggga

SEQ ID NO: 351021 - DNA, 525 bp, Homo Sapiens
gactacatctgtgaattctgtgctcgatctttccgcactagcagcaaccttgtcatccacagacgaatccacacaggagagaaacccctgcagtgtgagatatgtggatttacttgccggcagaaggcctccctaaaactggcaccgacgcaagcatgcagagacagcagctgccctgcggattcccctgtgaattctgtggcaaacgctttgagaagccagacagtgtggtagctcactgtagcaaaagccacccagccctgctcccagcacaagagccacctggctctttggtgtctagtcccagcatttctgcccctgaatccctgcagtctcctgagggggctagcatctctaccacttctgactctaatccctgcctcctcaacatccatttcttcacctggggtgccagaccccaggaacagagagaaaagttaggtgagtgcagtggagggtagagcaccattgggctccagataccaggttttagccttcaaagaaataataaatggtattttatac

SEQ ID NO: 351022 - DNA, 685 bp, Homo Sapiens
  misc_feature (47)..(47): n is a, c, g, or t
aaagtgcttctccagatgatgaataagaacgttttttattccaatgngtacctctttacttcacttgtaaaggtgtctgggatagtgtttgcttggtaaactaatataaacttgtaaacataggctttgacatcatacacattttcaaatccttgtctagtttcttaataactaaattgcaaggcaaattcttttctgagctttggctttcctacatgtcaaatagaaatcacaccaggtatctttgtcatgatagaattgttagcatatcacatcatatgacacttaataaatattatttcctttctaattcttacctcctcttttgattataatgaatcatttagacaaaaggcaatatagtaattgtttaagttggtagtaattctaaggtaattaaggaatcaacatcatgagttagggttttatactgttagtacaaagtagttttccaaattagatgttcataacgtatatttgtttaattgcaattagcattaatatttcataattgactgctctgtctgccaacttctacaagcagtgatgacatgaagtgtgaaacagatgtcactgaggtctctgcctttaagaagttttacacttcttcgaaagtccaacgtggcaaacataggttactgtgttccgtgccctggctaacaataccagtatatgagtatgaatc

SEQ ID NO: 351023 - DNA, 2130 bp, Homo Sapiens
agcgggtcgcgcatgcggggctcacacggctgcagccggcgccgctgccactcccgggagcatgaaggaccgaacccaggagctccgcacggccaaggacagcgatgatgatgatgatgtcgctgtcaccgtggaccgagaccgcttcatggatgagttctttgagcaggtggaggagattcgaggcttcattgacaagatcgcagagaacgtggaggaggtgaagcggaagcacagtgccatcctggcatcccccaaccccgatgagaagacgaaggaggagctggaagaactcatgtccgacataaagaagacagcaaacaaagttcgttccaagttaaagagcatcgagcagtccatcgagcaagaggaaggcctgaaccgctcctccgctgacctgaggatccggaagacacagcactccacgctgtccagaaagtttgtggaggtcatgtcggagtacaacgccacgcagtccgactaccgcgagcgctgcaaaggccgcatccagaggcagctggagatcaccggcaggaccacgaccagtgaggagctggaggacatgctggagagtgggaaccccgccatctttgcctctgggatcatcatggactccagcatctcgaagcaggctctgagcgagattgagacgcggcacagtgagatcatcaagctggagaacagcatccgtgagctacacgacatgttcatggacatggccatgctcgtggagagccagggagagatgattgacaggatcgagtacaatgtggaacacgcggtagactatgtggagagggccgtgtctgacaccaagaaggccgtcaagtaccagagcaaggcgcgccggaagaaaatcatgatcatcatctgctgtgtgatcctgggcatcgtcatcgcctccactgttgggggcatcttcgcctagaagccacccaaactgccactccactccaggtgggccactccaaggaggccctggctgctgccacctggctgggctgccctcccaacccccgcctctggctcagagcaccctccctcccggcccccatgctcccttctctgccatgggccctccgtccccgccccgtgtcgtgtgcatgatctctgtgagtgtgcgtctgtacgggaagaggcagagggaggcagccagcggggcgtgatgcagtgtgcacagcgaggagcagacccaggcagggccgccagggtgacacaggccacccttccttgccttcagtaactcggtgggcccaggttctgctcttccctggggaccctaacctcgcctccagctgacctgccctgtcctctccagctgtccccacaagcagagccctgaggggtggggaccagctggccacatggtgctgcttttcaggttaggggagaggtggccctgagggacagcccagctctgagtctcagtcgctgatcactgccagggaggctcaggctgccatggctccaggctccctcccctgcctaggggcaaagtccatcgggtcctgggcctcagcttcccttcccacattcctccggccccaggagcaaccccttgggctaggtctgaccccaggtgtccctctggaaggggctggctggtgccctatttccagccaccccagcagctagggaggcaaagcaggctgcagtcagtccctcaagccagcgttgcatgtttgggatggtggctcctgttgtcttgcgctctgggaagtcagatgtcatttcaggcctgcagtctcatcctgcccttgccatcctcccatcgatgtgccacgtgggtgtcacgtgtcccagatgcagtattcggcagccagccggggagggctacctcctcctcctcaccaccttggggcttctcatgggaaatgtgcccccgccccaggaccctctcccttgtggacaggcagggagatgcatgcgagtgcatgcagcaggggatggggccgtgtccgtgtgccccaccctccctcggctttactcctgcccagtgactgtgaccactgtccgtgttgccttcttgaacagcgattccccccaaccccttcaccaaaggtcttggtacaaccagctgcccattttgtgaaatttttatgtagaataaacatttgtatctgtaccagg

SEQ ID NO: 351024 - DNA, 1790 bp, Homo Sapiens
  misc_feature (78)..(108): n is a, c, g, or t
gggatcggagcaactcgctccaagttgtgcagccgggaccgcctcggggtgtgcagccggctcgcggaggccctcctnnnnnnnnnnnnnnnnnnnnnnnnnnnnnnnccccctgagcaggtgagcccccgcttcctccgagcctggcacccccctcccgtctcagccaggatgccaacgaggcgctgggccccgggcacccagtgtatcaccaaatgcgagcacacccgccccaagccaggggagctggccttccgcaagggcgacgtggtcaccatcctggaggcctgcgagaacaagagctggtaccgcgtcaagcaccacaccagtggacaggaggggctgctggcagctggggcgctgcgggagcgggaggccctctccgcagaccccaagctcagcctcatgccgtggttccacgggaagatctcgggccaggaggctgtccagcagctgcagcctcccgaggatgggctgttcctggtgcgggagtccgcgcgccaccccggcgactacgtcctgtgcgtgagctttggccgcgacgtcatccactaccgcgtgctgcaccgcgacggccacctcacaatcgatgaggccgtgttcttctgcaacctcatggacatggtggagcattacagcaaggacaagggcgctatctgcaccaagctggtgagaccaaagcggaaacacgggaccaagtcggccgaggaggagctggccagggcgggctggttactgaacctgcagcatttgacattgggagcacagatcggagagggagagtttggagctgtcctgcagggtgagtacctggggcaaaaggtggccgtgaagaatatcaagtgtgatgtgacagcccaggccttcctggacgagacggccgtcatgacgaagatgcaacacgagaacctggtgcgtctcatgggcgtgatcctgcaccaggggctgtacattgtcatggagcacgtgagcaagggcaacctggtgaactttctgcggacccggggtcgagccctcgtgaacaccgctcagctcctgcagttttctctgcacgtggccgagggcatggagtacctggagagcaagaagcttgtgcaccgcagacctggccgcccgcaacatcctgatctcagagaacctggtggccaaaggtcaactgactttggcctggccaaagccgagacagtaaggagcgtctagactcaaaccagctgcccatcaagtggacagcgcccgaggctctcaaacacgggaagttcaccagcaagtcggatgtctggagttttggggtgctgctctgggaggtcttctcatatggacgggctccgtaccctaaaatgtcactgaaagaggtgtcggaggccgtggagaaggggtaccgcatggaaccccccgagggctgtccaggccccgtgcacgtcctcatgagcagctgctgggaggcagagcccgcccgccggccacccttccgcaaactggccgagaagctggcccgggagctacgcagtgcaggtgccccagcctccgtctcagggcaggacgccgacggctccacctcgccccgaagccaggagccctgaccccacccggtggggcccttggccccagaggaccgagagagtggagagtgcggcgtgggggcactgaccaggcccaaggagggtccaggcgggcaagtcatcctcctggtgcccacagcaggggctggcccacgtagggggctctgggcggcccgtggacaccccagacctgcgaaggatgatcgcccgataaagacggattctaaggcc

SEQ ID NO: 351025 - DNA, 1267 bp, Homo Sapiens
ggccgtcgcgcatgcggggctcacacggctgcagccggcgccgctgccactcccgggagcatgaaggaccgaacccaggagctccgcacggccaaggacagcgatgatgatgatgatgtcgctgtcaccgtggaccgagaccgcttcatggatgagttctttgagcaggtggaggagattcgaggcttcattgacaagatcgcagagaacgtggaggaggtgaagcggaagcacagtgccatcctggcatcccccaaccccgatgagaagacgaaggaggagctggaagaactcatgtccgacataaagaagacagcaaacaaagttcgttccaagttaaagagcatcgagcagtccatcgagcaagaggaaggcctgaaccgctcctccgctgacctgaggatccggaagacacagcactccacgctgtccagaaagtttgtggaggtcatgtcggagtacaacgccacgcagtccgactaccgcgagcgctgcaaaggccgcatccagaggcagctggagatcaccggcaggaccacgaccagtgaggagctggaggacatgctggagagtgggaaccccgccatctttgcctctgggatcatcatggactccagcatctcgaagcaggctctgagcgagattgagacgcggcacagtgagatcatcaagctggagaacagcatccgtgagctacacgacatgttcatggacatggccatgctcgtggagagccaggtgagtgccgggcccccctgccctccactccagcccacaccagcacccagggctgcactaacctcgccctttctgcccgacacgctgccctgccggggagggaccaagttctcagcctcagggtgctttcctgaagtcctgccccgagccccaacccaaacctgaggagggggccctctggagctcgggtgccccacggcacccgcagggagagatgatatgacaggatcgagtacaatgtggaacacgccgtaaactatgtggaaagggccagtgtctgacaaccaaagaaggccgtacaagataccaagagcaaggccgcgccggaaggaacagtcatgatcatacatctgctgtgtgatccatgggcaatcgacaatcgcactccaacatgtaggagggacatcataacagacatagaaagacgcacaccacaactgacacatccaactccagagtgaggcacaatcacaaaggaacgaaccatgacatgatgcacaacatggcatgcgacagcacaacacaaaaa

SEQ ID NO: 351026 - DNA, 960 bp, Homo Sapiens
  misc_feature (859)..(889): n is a, c, g, or t
atggatgactccaagaccacccccagcaccacacagcaaatgatgatcatgatgtttcttcctccgggccttgctctgatatttcactgctttcttggtgtcagacacagctcgctccacgtagtccacagaatgttccacgttgtactcgatgcggtccaatcatcttctccctggctctctacgagcatggccatgtccacaaacatatcgtgcagctcgcggatgctggtctccagcttgatgatctcattgtgcctcgtctcaatctcattcagcgcctgcttcgtcatctgtgagtccattttgatgtcatctgtgaagatggccagcttcccgctctccagcatgtcttccagttcttcgttggtggtggtccttccagtgatctccagttgccgctggatccggtccttgcagcggtcccggtacttggactggctcgcgttatattcggtcattacctccacgaacttccgggacagtgtggagtgctgggtcttgcggatgcgcaggtccgcggaggaacggttcagcccctcctcctgttcaatgctttgctcgatcgctttcaatttggaccgaaccttgttggccgtcttcttgatgtctgcagtgagatcctccagctcctgtttggtcttctcatctgggttgggtgcggccaggatggcgctatgctgttttttcacctgctccacatcctccgacagtttctcaatgcagccccggatctcttccacctgttcaaagaactcatccatgaagtggtcccgatccacgtggaccacctcctcttcatcatcactgtctttcgcactccgcagctcttgagtccgatccttcatcctgcgacggnnnnnnnnnnnnnnnnnnnnnnnnnnnnnnntgctgctgctccgggtctcccgcctctgtgccggaggccggggtctgggggcgccggggggcgccgcggcc

SEQ ID NO: 351027 - DNA, 948 bp, Homo Sapiens
  misc_feature (185)..(215): n is a, c, g, or t
  misc_feature (857)..(857): n is a, c, g, or t
cgcggaggagacgcagtgcggccggcgctaggacccgcgggggcctcccaggccgcggcgcctcccgctttcccccactccccgacccttcttcgcccccaaaatgaggaaacggagcaactcgctccaagttgtgcagccgggaccgcctcggggtgtgcagccggctcgcggaggccctcctnnnnnnnnnnnnnnnnnnnnnnnnnnnnnnnccccctgagcaggtgagcccccgcttcctccgagcctggcacccccctcccgtctcagccaggatgccaacgaggcgctgggccccgggcacccagtgtatcaccaaatgcgagcacacccgccccaagccaggggagctggccttccgcaagggcgacgtggtcaccatcctggaggcctgcgagaacaagagctggtaccgcgtcaagcaccacaccagtggacaggaggggctgctggcagctggggcgctgcgggagcgggaggccctctccgcagaccccaagctcagcctcatgccgtggttccacgggaagatctcgggccaggaggctgtccagcagctgcagcctcccgaggatgggctgttcctggtgcgggagtccgcgcgccacccggcgactacgtcctgtgcgtgagctttggccgcgacgtcatccactaccgcgtgctgcaccgcgacggcacctcacaatcgatgaggccgtgttcttctgcaacctcatggacatggtggagcattacagcaaggacaaggggcctatctgcaccaagctggtgagaccaaaggcggaaacacgcgacccaagtcggccgaaaaggagccggccaaggccggctggttactgaacctgcagcanttgacattgcgagcacagatcgcacagggagaatttggagctgttctgcaacgggtgcagtaccgggggcaaaggggccggaacatatccg

SEQ ID NO: 351028 - DNA, 1019 bp, Homo Sapiens
cgctaggacccgcgggggcctcccaggccgcggcgcctcccgctttcccccactccccgacccttcttcgcccccaaaatgaggaaacggagcaactcgctccaagttgtgcagccgggaccgcctcggggtgtgcagccggctctgcggagtgccctcctgggggctgggctgctggtggcgctggctctgggggcgccccctgtagcagaaaacaggaagaaccaggctcggtccagtggcacccagctccctacctcctgtgccagccgcctggcctgtggcaggccattccctagcgtccccgactgtgaccacttgctcagtgtgcctctcacctgcctcagtttccctctgggggcgatggcggggcgaggctctctggtttcctggctgggcatttcactggctgtgattctgctgaggaacttccccgggtgagcccccgattcctccgagcctggcaaccccgcctcccgtctcagccaggatgccaaacgaggcgctgggccccgggcacccagttgtatcaccaaatgcgagcacacaccgcccaaagccaggggagctggccttccgcaagggcgacgtggtcaccatcctggaggcctgcgaggaacaagagctggtaccgcgtcaagcaccacgacaagttggacatgtgaggggctgcttggcagctggggacgctgctgggagcgtggaggccctctccgcagaccccaagctcagcctcatgccgtggttccacgggaagatctcgggccaggaggctgtccagcagctgcagcctcccgaggatgggctgttcctggtgcgggagtccggcgccaccccggcgactacgtcctgtgcgtgagctttggccgcgacgttcatccactaccgcgtgctgcaccggacggcacctcacaatcgatgaggccgtgttcttctgcaactcatggacatggttggagcattacaggcagggacaggggcgcaatctgcaccaagctggttgagaccaagcggaaacc

SEQ ID NO: 351029 - DNA, 1016 bp, Homo Sapiens
  misc_feature (42)..(42): n is a, c, g, or t
  misc_feature (118)..(118): n is a, c, g, or t
  misc_feature (794)..(824): n is a, c, g, or t
ttggtcgcagatagcgccccttgttccttgcggtaatgtctnccaccatgtcccatgagtttgcagaagaaacacggcctccatcgattgtgaggtggccgtccgcggtgcagcacgncggtagtggatgacgtcgcggcccaaagctcacgcacagacgttagtccccggggtggcgcgcggactcccgcaccaggaccagcccatcctcgggaggctgcagctgctggacagcctcctggcccgagatcttcccgtggaaccacggcatgaggctgagcttggggtctgcggagagggcctcccgctcccgcagcgccccagctgccagcagcccctcctgtccactggtgtggtgcttgacgcggtaccagctcttgttctcgcaggcctccaggatggtgaccacgtcgcccttgcggaaggccagctcccctggcttggggcgggtgtgctcgcatttggtgatacactgggtgcccggggcccagcgcctcgttggcatcctgactggagacgggaggggggttgccaggctcggaggaagcgggggctcacccggggaagttcctcagcagaatcacagccgtgaaatgcccgccaggaaaccagagagcctcgccccgccagcgcccccagagggaaactgaggcaggtgagaggcacactgagcaagtggtcacagtcggggacgctgggaatggcctgccacaggccaggcggctggcacaggaggtagggagctgggtgccactggaccgagcctggttcttcctgttttctgctcagggggnnnnnnnnnnnnnnnnnnnnnnnnnnnnnnnaggagggcctccgcgagccggctgcacaccccgaggcggtcccggctgcacaacttggagcgagttgctccgtttcctcattttgggggcgaagaagggtcggggagtgggggaaagcgggaggcgccgcggcctgggaggcccccgcgggtcctagcgccggccgcactgcgatcccgagaattccggacc

SEQ ID NO: 351030 - DNA, 1149 bp, Homo Sapiens
  misc_feature (770)..(770): n is a, c, g, or t
  misc_feature (855)..(855): n is a, c, g, or t
agcgggctgtggttagcgaagggattcggtgcagatggatggaccgtctgggctgcggagtccacgggcctgaaacgcggtcgctcctgacccgtcctccgcaaccctcgtcccaccaggccgcggtccccggagcaggccggcgggtggcaggaagacaccaggctgcagggggctggagaagcaacaccactctccctccccgccagagaactggagcgcggggacatcggttgcggatgctggcggcgagccgggttgctaggcgacatcgagagaggaagaggagaaagtcttcatggggtgctagagcatcttaaatgtccctctcatgcagggacatttccctgctgaacgaagagaaggcagacctcggcgagggacccgtggtcagcagcagcttctggtgagcccccgcttcctccgagcctggcacccccctcccgtctcagccaggatgccaacgaggcgctgggccccgggcacccagtgtatcaccaaatgcgagcacacccgccccaagccaggggagctggccttccgcaagggcgacgtggtcaccatcctggaggcctgcgagaacaagagctggtaccgcgtcaagcaccacaccagtggacaggaggggctgctggcagctggggcgctgcgggagcgggaggccctctccgcagaccccaagctcagcctcatgccgtggttccacggggaagatctcgggccaggaggctgtccagcagctgcagcctccccgaggatgggctgttccntggtgcgggaagtccgcgcgccacccccggagactaactccctgtgcggggaactttggcccgcgaccgtcatccaactacccgncgtggctgcaaccgcgaacggccaccctcaaaattcgtaggagggccgtgatatttcagtaaaccctcaagggaaatgtgggggcatgttttctaccccacgccaccagggtgctctatactgccccacaaacttggtgaagcaccaaatccgctaacgcccgggatacccagtacccgcactatgaatgacacacgttccctcgatgccgatattgtgaattctccaccacacattctgtacaccccctacacatccatactcctctatcattcgcaaaatgaaacatccaat

SEQ ID NO: 351031 - DNA, 1087 bp, Homo Sapiens
attccccaacaaccaatatcaccgccccaacgagctccaaaaccgccgggaccggcccgggatatccgggattgagagtcggagccacagctttagccctgcccaggccgagccggagctgcagcccgagcgcggtggtgccctcagccccgtcctcttgtcctcctcagcctcggtgccttggaatttgtgtcgctgagtcagcaagcctttcagatttgcccggtttttgttgtttgtggtttgtatcaagatgggaactcaaacaagtcattcctcctaaggagctggtgtcttcatccagaagggacagtttgtgccagctctccagagagaaaagatctgccggaggcgctgggcaatgaccccgggactccaggccagaggggtctgaagctgtttgggaaagcagcgggactccttgggaagatggccatggccccaagcccttccctggtgcaggtgtacaccagccccgcagctgtggctatggcaggatgggctgggcacctggcacccctacagtgccaccatctgcagcttcatcgagcagcagtttgtccagcagaagggccaacgttttgggcttgggagcctggcccacagcatccccttgggccaggcagacccctcgctggccccttacattattgacctccccagctggacccagttccgccaggacaccggcaccatgcgggctgtgcggagacacctgttcccccagcactcagcccctggccgaggtgtcgtctgggagtggctgagcgacgatggctcctggactgcctatgaagccagcgtctgtgactatctggagcagcaggtggccaggggcaaccagctcgtggacttggccccccctggggtacaactacactgtcaactacaccacccacacgcagaccaacaagacttccagcttctgccgcagcgtgcggcgccaagcagggccgccttacccggtgaccaccatcatcgctccgccgggccacacaggcgtcgcctgctcttgccgccagtgcctcagtggcagcagaactggccccgtgtcaggccgctaccgccactccatgaccaacctccc

SEQ ID NO: 351032 - DNA, 614 bp, Homo Sapiens
ggaagattagcacatccatcaaaggctggtgaaaagatttagtattgacatgtttctctctaagaacagttggcttcacattcagcccctgccctgagacaaatgcattattttcatcagccctgggtgcttatttttctaagctctcattttattactggagtcacaatttgtgtgtaggtgttgccgacaaaaatgataattaactttcccttgaggtgacacataactaaaatttcaaatctttagtatttctccctttcattttaaattcatatgcctaactataaaataactgtgactgagatacaagtacaaaccaaagcctggaattgcagcaggtgctgaggcatttgaaagtgaaatgtttctcttcgcaaaggactcttataccctcccctaaagaaatcaccatgccggtctcacccctactggctttgttacctaaggcttcacctctcagtgcttctggttccttccttatccttaaaatgagtgttaataattctctcgtggggtcattgtgcggaccacattgagtagtgcctgtaaaacagggctggctacacggtaaatactcaataaatgttgacacgttcaaaacacaaaccaat

SEQ ID NO: 351033 - DNA, 1118 bp, Homo Sapiens
  misc_feature (58)..(70): n is a, c, g, or t
  misc_feature (668)..(668): n is a, c, g, or t
  misc_feature (1068)..(1068): n is a, c, g, or t
aaagggccaccaaaccccgcaacgagcgcccccctgcctctgtggggcgggagacgcnnnnnnnnnnnnntcccaccctaaaaagaggctggtaccggtccggaattttcgggaagcaggcggacccaggatttggcgccgcgatctcgaggcttggcctggagccgtggagctgcggagcctgtggcgggagcacgcgtgcgtggtggccgggctgcggcgcttcgggtgcgtggtgtgccgctggatcgcccaggacctcagcagccttgctgggctcctggaccaacacggcgtgcgcctggtgggcgtagggcccgaggccctgggtctgcaggagttcctggacggcgactacttcgcgggagagctctacctggatgagagcaagcagctttacaaggagctaggcttcaagcggtacaacagcctgagcatcctcccagcagctctggggaagcccgtgcgtgatgtggctgccaaggccaaggctgttggcatccaggggaacttgtctggggacctgctgcagagcggagggctgctggtggtcagcaaagaagtccccaggcgactacgtccccaaggagcacatcctgcaggtcctgggcatctctgcggaggtctgtgccagcgacccgcctcagtgtgacagagaggtgtgaggngaggcgaaggccctggcctccgaggatctgggtggcgtctgctgccctaggtgtgctggaagtccacttggaagaactgttccggaggccgctgggtcgggatgccgaacctctcctgatccgccggcagcaacgagccattaaaactgcagttcctgaccacgcactgcttcgcaggctcccgagccctgcatcccccacagcccccgcccttggctcactgttgggcccctcaagggcgggccaggggtggctgtgaagtcccaggtgtcatcttcctgctctgcgactttctctggagaccttgggccttttggcctgtgggggcaactgggggatgggtaaccttcactgcccccgtcactccccttcaaaggccgacagaacccaagccccaccntcagggaaaagggaaccgtgggggtcagcctcccacccaaggggtccggg

SEQ ID NO: 351034 - DNA, 1187 bp, Homo Sapiens
  misc_feature (123)..(163): n is a, c, g, or t
  misc_feature (350)..(350): n is a, c, g, or t
taccaccgagccctctgggtggaggctggagtaccccaggtttttctttgtccttggaggggggggcttgggtttcctctccgccctttgaaagggaaatgaccgggggaacgtggggttttnnnnnnnnnnnnnnnnnnnnnnnnnnnnnnnnnnnnnnnnnaggttttccagagaaaagtcgccagagcaggaagaatgcccccctgggattcacaacccccccctgcccggcccctgagggcccaacaatgagcaaaggcgggggctgtggaggatgcagggctcggagcctgcgaaggcaggtgcgtggtcaggaactgcagttttaatggctcgttgctgccggncggatcaggagaggttcggcatcccgacccagcgcttccggaacagttcttccaagtggacttccagcacacctagggcagcagacgccacccagatcctcggaggccagggccttcgcctccctcacacctctctgtcacactgaggcgggtcgctggcacagacctccgcagagatgcccaggacctgcaggatgtgctccttggggacgtagtcgcctggggacttctggacgaaatgcaggagcactttatcaccacctttgctgaccaccagcagccctccgctctgcagcaggtccccagacaagttcccctggatgccaacggccttggccttggcagccacatcacgcacgggcttccccagagctgctgggaggatgctcaggctgttgtaccgcttgaagcctagctccttgtaaagctgcttgctctcatccaggtagagctctcccgcgaagtagtcgccgtccaggaactcctgcagacccagggcctcgggccctacgcccaccaggcgcacgccgtgttggtccaggagcccagcaaggctgctgaggtcctgggcgatccagcggcacaccacgcacccgaagcgccgcagcccggccaccacgcacgcgtgctcccgccacaggctccgcagctccacggcctccccggtcaccgcatgcttcaggatgcacgcgcccacgcgagcaaggtccaccgtgctcatggcggccgctgccagccccggttcccggctccccgactccctgttccccgctcccggctcctcgctcctggatcccccgctctcgacgaattcgagctcggccgatttggcctgat

SEQ ID NO: 351035 - DNA, 2313 bp, Homo Sapiens
  misc_feature (45)..(53): n is a, c, g, or t
cccccttcggtgaggggacggttaaaatcttctgggggaaatggnnnnnnnnnacaggttgccccaaggcgctttggaaaaggggggtgatttcccccccctggaaattaattgcccccgcaaattgggaaatttaccaaaagccccctgcggggcgggaaatggcaggatttttccagggattccatttctgggggggccctgggccccattttggggtggggaggaagcctttcttgtcaaggagtttgctgggtgcggggtaacatgtgtgccctccagtgtggtgagtgagaccatgtgagtgtgtgtgcatgtcccataccaaaccgtaagaggcagctgggtcaggaggaaccccacttcttccttcatgggacaacaagtggagtgggaagaagcggggctctgagtcccagaaagaagggagaagcctgctccctactgtaacactcccaggccaatctatacccgcccacaccctttctactcaacatactgctccttgttcccagccagcccggcacacccaccatggacacagggcagctcttgctggccccattcacatgaaattcttctgtgtgaaactcactcgtctgcctctcccaggagatgagacaggactggaggagaatctcccaccctctcttcttccccctccctcaggagtgggatttaggcagggaccctagagaccttaggccaaactctaccccaatctatagaccttttaaaagaaatggttaaagtgctttgctctgcatgaatgccagagagggtggcaccacagcctgggacaggtggtctacctgcttcttctcccacttcagataccctctgccagtgtgccctgcacacggggtgccagcctaaacgcgtgcaatttagcccctcaccaaccttggaacatattctaactcaccctttccaaacagcaggcactacagacaggaaagcagattacaccaatctttctcctctctagtccaagcctgtgcccacctaccctgaagcgataagcaacactggccattgggccttgcctctatggggaatggaaggcctgaaaacacccacaaatccagcgagccaggatgctcacacctgccaggcatacccctaatgcttcttcaatagcagcataatgcttgcctgcagctgctaagccagaactttggaggagctggagcactggtgtctgttcccaggaatctgaaaacacttctccatctatctccagagtacacagagaaggctttctcaaagcctcctgggcccaagcttagcagtttaactactatcatctggctggttctccctctctggctaaggaaggatggcgtagctttccttcccccagccttgaatgcctgtacttagaacccacactctttcagtttgagccctgccacgagggaggaggtagtaaggtgacctgtctacctctgagttcagtctgtgctgcctgccaggctcgcctctaacccagaccacttgtaggctccagggaccacacttcacttagcctgtcctctccaggtcttaggaccacagaggtttgcctgcatcccaataacataaggactcttgatgtggaaagctacaattacaggctagcgcttgttgggaactgcctaagttgattcctgaggccacagcctggggagccgacacgaaatcacgcataagtcatccaccccagcctgtgctcgcttcttctgaggccagagaaacagtctcccatttctgtaactctctgtcctgggagaccaagccctagctgcctctgtctcccctctcattgagacagttttgtgccctctggacatggcagaggcctcactacagagggagtgggttggggggtttctcagtgtgggagacacagtgcaggagactcgagcagcagtggtgtgagcacgaaagccaagacagtgccgctaccataagtgctgccgtggggcctgggagggctaaaggacgtcggtctccctctcgatccccacgtacttgagagcatcagcttggctgtacctgtaatcaaagaagagctcttcgccagcttgaattgccctcttggcaaagatcccaatccgatggtctccattcaccatgaccactttggcataacagttgggattcactgaatgatttgcaaatcgaattttgtttcctttccgagtagcatccactaaaaaatcattattgaggttgaagaggaagctggacatgtatttgtcatagacctttccgcgtcgatcagcctcatcctgagagatgagctcactacagtattcagaaatgaattcg

SEQ ID NO: 351036 - DNA, 427 bp, Homo Sapiens
  misc_feature (85)..(85): n is a, c, g, or t
ctggaactgtgggtccccaaattactccataggggagaaaaaccagagaaagatgaagaggaggagttaggtcctatttgaaatncccaggggctcgctgtgaggaataggtgaaaaaaaacttttcaccagcctttgagagactagactgaccccacccttccttcagtgagcagaatcactgtggtcagtctcctgtcccagcttcagttcatgaatactcctgttcctcccagtttcccatcctttgtccctgctgtcccccacttttaaagatgggtctcaacccctccccaccacgtcatgatggatggggcaaggtggtggggactaggggagcctggtatacatgcggcttcattgccaataaatttcatgcactttaaagtcctgtggcttgtgacctcttaataaagtgttagaatcc

SEQ ID NO: 351037 - DNA, 993 bp, Homo Sapiens
caagagataatataatgcccggttgctactccaccttcaatatttccaagagatgggcattgaagacaaaagcattcactagcactctctccagtctgtaagataacattgtccacttgagactcgagctggtccactgtggtcatggatggagcaaggtggagctcactggaaacaatagtgagggccccagggtgaggcacttaagaggtccgtcatcaacagaaaggggatgtcagcataaaccctttcccaggtgctcaaacttggtagaaacaaatttaaccgcaacatcaaatggaaagactgtttcaattgttacagtttcatccttgtgacacttgcaaacaatttctttttcttcaacggttgtatttatcaggtaagaaacatatacaagaaacattctggaacccactgttccacagcgaacatacaacattttttccagctgttcccctggatgtaagtctccaacaggaatgtcagtgagtaaagccgggtaggattcatcacacagttctgttccatgaagagtcacgtgagtcttctgagttaaattggcatcctgtcctggttttaagccagcagtgagcttcacatctctgatttgggtcttttcatgggactgaacagtcacaaccaaacaatacatttcattagtcagtgcagggggttcatgtagcagatgtacagaaatgtttgggactctggatatgatcattgtgcttgcctgaattataatgctgtcccagtgaacttcattgtcaggtagcttaggtcgccttttgaaagaccgagctgcctgtaaggcttcttgggaggaagcagcatctcctcctcctccctgccaatttaaaaccacacatcttcccgtctcattgcccagagcaagatccactgaagtaatctcaattttctttcccacatcttcagtttttgcaacaaacttaaataacagttttcttgttttgccaggaactaggcacatct

SEQ ID NO: 351038 - DNA, 1592 bp, Homo Sapiens
  misc_feature (55)..(64): n is a, c, g, or t
  misc_feature (1257)..(1270): n is a, c, g, or t
cgctaacctcactgggacagagaaccgcagtctttcgagaatggaggctcttcannnnnnnnnnctcctttactccaaactcagccctccagtttcttcagatgtaaaccctgttaacgtcactgtttccaaaaggaaaaaaataagtcagtttttggcagcaccttcatctttctgacctcctcctattctgtccttgtggacttatgtttaacatagaaaatgaatgcgtttaaaacaaaaccactttctgcatttaaccagtcctggctctctctctgctgcctcttcatacgttttctcaagaacttcagtttataattggaagagaaatttttgctgttaatgccagaatgagcaacctcaaggaattgaacacttcttggaaaatctaggtaattcaagccctcatcaggtttacaagatcatcagagaaacagaggattttaatttttagttctggccggctacaggctccatttctctgccttcccattggaaatagtttatttccacattctccactgcgtgtggtcaaagttcctcacccagcaagggactatagatactcgtgtcccaattccaaaacacaatgcacaagctgaacttgggctgaacgtggcgtgttgagatttggaatgaggtttctaagagccgtgttcttcatggaattttccaggccacttggcagcttggtttaccgatggatgggctagagatcttgtcgtttcttggaagtcacagggaagattgaagagaacgcttgagcatccttggcaacagcccaggtgggacctggatgaagctttgcactcaagtattgtcaagggaagcttcctgtgaaccaaagttctcaggccaaggtctcgcccaccaaagccagaaagtgcaagcacccgtctacccagctctaacttgtatgtgtgagacagaccaggcttcgggggtaggaggatctgcagttgttcagccgtctttctgctggtgttgtctttctgccatcagagaagggacacacagcccgttcgaaggtgtgcagagggctctgagcgccaggatggccagggctgtttttgctactgaaggagcatgtgtcctgaacttcccacttgcaagggacagtccccaaccttctcttatagcccggcactgggaagcacccgccaccagggaaaattctggcctgaacacacaggatgctttagggagagatcacttcagtgtgtgtgtatatttatttgcagtacagtgcgcgcnnnnnnnnnnnnnnacgcgcacgtgtgggtgagtgcgtcttctgagtgggttctgtcagttgctaatgaggctcctccgctctggacacaacccttttatagattaatttctctgccaattaacttgtcattttcagtacatatttttactattccacaccaaacataattacaacagggattttcttatgcactcctatgctgttgaataacatgtggtgtaattctgcttcttacagaaagtattactgaaggtattattcccaatatttattgggttattatgcggtcttttatatatgcggccatccccttctgtgccctcaaaggcatccg

SEQ ID NO: 351039 - DNA, 1188 bp, Homo Sapiens
acagacgctggcggccaccagaagtttgagcctctttggtagcaggaggctggaagaaaggacagaagtagctctggctgtgatggggatcttactgggcctgctactcctggggcacctaacagtggacacttatggccgtcccatcctggaagtgccagagagtgtaacaggaccttggaaaggggatgtgaatcttccctgcacctatgaccccctgcaaggctacacccaagtcttggtgaagtggctggtacaacgtggctcagaccctgtcaccatctttctacgtgactcttctggagaccatatccagcaggcaaagtaccagggccgcctgcatgtgagccacaaggttccaggagatgtatccctccaattgagcaccctggagatggatgaccggagccactacacgtgtgaagtcacctggcagactcctgatggcaaccaagtcgtgagagataagattactgagctccgtgtccagaaactctctgtctccaagcccacagtgacaactgggcagcggttatggcttcacggtgccccagggaatgaggattagccttcaatgccaggctcggggttctcctcccatcagttatatttggtataagcaacagactaataaccaggaacccatcaaagtagcaaccctaagtaccttactcttcaagcctgcggtgatagccgacttcaggctcctatttctgcactgccaagggccaggttggctctgagcagcacagcgacattgtgaagtttgtggtcaaagactcctcaaagctactcaagaccaagactgaggcacctacaaccatgacatacccctttgaaagcaacatctacagtgaagcagtcctgggactggaccactgacatggatggctaccttgaagagaccagtgctgggccaggaaaagagcctgccctgtcttttgccatcatcctcatcatctccttgtgctgtatggtggtttttaccatggcctatatcatgctctgtcggaagacatcccaacaagagcatgtctacgaagcagccagggcacatgccagagaggccaacgactctggagaaaccatgagggtggccatcttcgcaagtggctgctccagtgatgagccaacttcccagaatctgggcaacaactactctgatgagccctgcataggacaggagta

SEQ ID NO: 351040 - DNA, 1162 bp, Homo Sapiens
  misc_feature (877)..(877): n is a, c, g, or t
ggggagagatatagggaaggaagggaagtaagcagtcacagacgctggcggccaccagaagtttgagcctctttggtagcaggaggctggaagaaaggacagaagtagctctggctgtgatggggatcttactgggcctgctactcctggggcacctaacagtggacacttatggccgtcccatcctggaagtgccagagagtgtaacaggaccttggaaaggggatgtgaatcttccctgcacctatgaccccctgcaaggctacacccaagtcttggtgaagtggctggtacaacgtggctcagaccctgtcaccatctttctacgtgactcttctggagaccatatccagcaggcaaagtaccagggccgcctgcatgtgagccacaaggttccaggagatgtatccctccaattgagcaccctggagatggatgaccggagccactacacgtgtgaagtcacctggcagactcctgatggcaaccaagtcgtgagagataagattactgagctccgtgtccagaaactctctgtctccaagcccacagtgacaactggcagcggttatggcttcacggtgccccagggaatgaggattagccttcaatgccaggctcggggttctcctcccatcagttatatttggtataagcaacagactaataaccaggaacccatcaaagtagcaaccctaagtaccttactcttcaagcctgcggtgatagccgactcaggctcctatttctgcactgccaagggccaggttggctctgagcagcacagcgacattgtgaaagttgggggtccaaagactcctcaaagctacttcaagaccaagacttgaggcacctacaaccatgacatacccctttnaaaacaacatcttacagtggagacagtcctggggactgggacacctgacatggatgggttaccttggaaaaaaccatggcttgggccaggaaaaaaaccctgccttgtcttttcccatcatccccaatcatctcccttggggcgcgcaatgggggcgtttttaacactggggccaaaaccacgccccttggccgaaaagaatccccaaacaaaaaaccttgcctacccaaaacagccctggggccacattcccaaaaaaggccccagaaatctttggggaaaaaa

SEQ ID NO: 351041 - DNA, 874 bp, Homo Sapiens
aagtaattccgggaagctcgccttacaactccgcgcggcctcggccccctgcgccgcccgccccacaacaaaactcagcgcagcgctcccgggcgcccggttcagagcgacctgcggctcagagcggaggggagactgaccggagcgcggatcgggacagcggccgggacagcggcgagacgcgcgtgtgtgagcgcgccggaccaagcgggcccagaagcgggtctgcagcccagagggcaccttctgcaaacatgtctgtggatcccctatccagcaaagctctaaagatcaagcgagagctgagcgagaacacgccgcacctgtcggacgaggcgctgatggggctgtcggtgcgcgagctgaaccggcatctgcgcgggctctccgccgaggaggtgacacggctcaagcagcggcgccgcacactcaaaaaccgtggctacgccgccagctgccgcgtgaagcgcgtgtgccagaaggaggagctgcagaagcagaagtcggagctggagcgcgaggtgagcaagctggcgcgcgagaacgccgccatgcgcctggagctcgacgcgctgcgcggcaagtgcgaggcgctgcagggcttcgcgcgctccgtggccgccgcccgcgggcccgccacgctcgtggcgccggccagcgtcatcaccatcgtcaagtccaccccgggctcggggtctggccccgcccacggcccggaccccgcccacgtgccgtgctcctgctcctagtggccccgactccatgccaatgcctcaggccacgccccgtcgggccattagggtcctgccgcaacctgcctgagctcgccgcctctggtgcacagtgtccccttggcttctgcagcagtggcccc

SEQ ID NO: 351042 - DNA, 734 bp, Homo Sapiens
  misc_feature (183)..(228): n is a, c, g, or t
acctttacgtattacaaatacacattcagatattttaaaaagaaaaatagacaccaacctgtcttttcaatcacactgtacattgttgaactcgtatgatctgtctctaggctaaaacaaacttttaaaacacggttacgggtgtggtactactaagacagaactgagacactggtcttctgnnnnnnnnnnnnnnnnnnnnnnnnnnnnnnnnnnnnnnnnnnnnnngccttttctatcttcccaatagtcaataagaacatctggggtgtggcctggctagttttggggatagggttagaataaagatttatattttgtcagtctttataaaaggcaaatgtttagttttcacataaccataacacgttgtaaaatcaaatattattcatagagttcttcattccaggtgacccagggttaagggttagaataagcatcaaataaaatggattgagttctgccttttaaggaaaggttacattatttgtgttgttatctttctccaaacatgacattgtccactaatggcctagaacacttctctggttcttgcattaaatggggctttgggtcctggaaagcagcctttagctatttcttgccatggaccacacactcatgccttcaggagtatatgtgcaagattcttttcttgtttgaaaaccagcagacttgaaacaattccagagagaatgggagggcaccaaagagggttccaaatgccactgagc

SEQ ID NO: 351043 - DNA, 1539 bp, Homo Sapiens
  misc_feature (211)..(211): n is a, c, g, or t
  misc_feature (291)..(291): n is a, c, g, or t
  misc_feature (367)..(367): n is a, c, g, or t
  misc_feature (395)..(395): n is a, c, g, or t
  misc_feature (443)..(443): n is a, c, g, or t
  misc_feature (449)..(494): n is a, c, g, or t
  misc_feature (517)..(517): n is a, c, g, or t
  misc_feature (540)..(540): n is a, c, g, or t
  misc_feature (568)..(568): n is a, c, g, or t
  misc_feature (610)..(610): n is a, c, g, or t
  misc_feature (612)..(612): n is a, c, g, or t
  misc_feature (674)..(675): n is a, c, g, or t
  misc_feature (677)..(701): n is a, c, g, or t
  misc_feature (722)..(722): n is a, c, g, or t
  misc_feature (740)..(740): n is a, c, g, or t
  misc_feature (1003)..(1029): n is a, c, g, or t
ccgggatattttccttctgccagaaaagaatcttgcacatatactcctgaaggcatgagtgtgtggtccatggcaagaaatagctaaaggctgctttccaggacccaaagccccatttaatgcaagaaccagagaagtgttctaggccattagtggacaatgtcatgtttggagaaagataacaacacaaataatgtaacctttccttaanaggcagaactcaatccattttatttgatgcttattctaaccctaaccctgggtcacctggaatgaagaactctatgaatnatatttgattttacaacgtgttatggttatgtgaaaactaaacatttgccttttataaagactgacaaaatataantctttattctaaccctatccccaaaacnagccaggccacaccccagatgttcttattgactattgggaagataganaaggcnnnnnnnnnnnnnnnnnnnnnnnnnnnnnnnnnnnnnnnnnnnnnncagaagaccagtgtctcagttcngtcttagtagtaccacacccgtnaccgtgttttaagagtttgttttagccnagagacagatcatacgagtgcaagcaatgtacagtgtgattnanaagacaggttggtgtctatttttctttttaaaatatctgaatgtgtatttgtaatacgtaanngnnnnnnnnnnnnnnnnnnnnnnnnngcaaggcatctcattacagcncatgtacgtctgtttttntaagatcaatattaaaacccattgggattaaatatttttgaataggatacactcttgagaaactcgagaatggactgagccttcctacaagccactctttgtttttaaaacagtggggaaatacgtttacagagattgtgagcttcagagaatgcatgtgatggtgtgtattacatgctaattcatataagctgtatctgtcagctaccaccctgtgctttaaaaatgcacacactcaaccctctttagcttggagctcagcnnnnnnnnnnnnnnnnnnnnnnnnnnngtagaattatttagctaacataagtattctgattgctacctgatggccattcttacttagtttcatagatgtgctttaactatgatcctttgaagctcaccccttggagagcctacagaacctcaggctgatagctttgaagactgccaaacagcccagaaggaagcaaagcatctgcataatcaggagggttgtataacaagtagtgatttggcaaatatgtgggtagctttaggctgaggcacgggcctcaggcaaaaatgcccttcgagtgaatccgaagggcatgatcttcctatgtccttgactaggcatgacgagtcatttgaggtcagatattatttgagttgttcagcacccccaaaggtaggcattctcctgggaaattttcatttccattttatcgccaaacaaaataaaaagcaaaacaaactttctaagctagaataatgaaattaagtcattttccactttgtatatattgatgctaataaaacagatgaaaaagac

SEQ ID NO: 351044 - DNA, 1099 bp, Homo Sapiens
  misc_feature (1032)..(1040): n is a, c, g, or t
  misc_feature (1064)..(1064): n is a, c, g, or t
gctggtaccgggtccggaattcccgggatcatagccccacatctagtcacacgggcattcctcttattttatcagggtctgttttcccccaacccagtgaaaccggtgagtgtgtaactcttgggaagattcttttctaaatacaggtataaagagaaggtggagggtgcgggtgcatggaagaaatactatgtgtgaagcagattcaccttcctgggaccggtgacatggtggtgacagtcaatggcttggacagacagacgggctcagtggcatttggaaccctctttggtgccctcccattctctctggaattgtttcaagtctgctggttttcaaacaagaaaagacctttctggccatagggagaatagcagggagtctatgttttggtggttacattggaaacatcttaagcaagagagggaaagttgattttaggcacacatgtaccctccttgacagcaggaactcagacttcaatcttgggggtctaagaccagaatattttccttctgccagaaaagaatcttgcacatatactcctgaaagcatgagtgtgtggtccatggcaagaaatagctaaaggctgctttccaggacccaaagccccatttaatgcaagaaccagagaagtgttctaggccattagtggacaatgtcatgtttggagaaagataacaacacaaataatgtaaccctttccttaaaaggcagaactcaatccatgtttatttgatgcttattctaacccctaaccctgggtcacctggaaatgaagaactctatgaaataatatgttgattctacaacgtggttatgcgttatggtgaaaaactaaacagtgtgccctttttataaagactgcacaaaattattaaatcttttatttctaaaccctaatccccaaaaactagccccagggcacacccccaagatggtcctttaatgcactattgggggaagattacaaaaagggcggggggcggttctttgggggttttttggagagtggctgcccattggttcggnnnnnnnnnccaaaaaaaccagtgggcctcagnttcagggccttaaactaggaaccacacaccccgga

SEQ ID NO: 351045 - DNA, 801 bp, Homo Sapiens
gtcctgtcaatcacactgtacattgttgaactcgtatgatcgtctctaggctaaaacaacttttaacacacggttacgggtgtggtactactaagacagaactgagacactggtcttctgagacaaacaacaatgaccacaacaacaacaactttacaccacgccttttctatcttcccaatagtcaataagaacatctggggtgtgcctggctagttttggggatagggttagaataaagatttatattttgtcagtctttataaaaggcaaatgtttagttttcacataaccataacacgttgtaaaatcaaatattattcatagagttcttcattccaggtgacccagggttagggtatagaataagcatcaaataaaatggattgagttctgccttataaggaaaggttacattaattgtgttgttatctttctccaaacatgacattgtccactaatggcctagaacacttctctggtatcttgcattaaatggggctttgggtcctggaaagcagcctttagctatttcttgccatggaccacacactcatgccttcaggagtatatgtgcaagattcttttctggcagaaggaaaatattctggtcttagacccccaagattgaagtctgagttcctgctgtcaaggagggtacatgtgtgcctaaaatcaactttccctatcttgcttaagatgtttccaatgtaaccaccaaaacatagactccctgctattctccctatggccagaaaggtcttttcttgtttgaaaaccagcagacttgaaacattccag

SEQ ID NO: 351046 - DNA, 291 bp, Homo Sapiens
  misc_feature (69)..(69): n is a, c, g, or t
  misc_feature (95)..(140): n is a, c, g, or t
aactcgtatgatctgtctctaggctaaaacaaacttttaaaacacggttacgggtgtggtactactaanacagaactgagacactggtcttctgnnnnnnnnnnnnnnnnnnnnnnnnnnnnnnnnnnnnnnnnnnnnnngccttttctatcttcccaatagtcaataagaacatctggggtgtggcctggctagttttggggatagggttagaataaagatttatattttgtcagtctttataaaaggcaaatgtttagttttcacataaccataacacgttgtaaaatc

SEQ ID NO: 351047 - DNA, 981 bp, Homo Sapiens
gaaagaaatgtgttgctggtatcagatatcagaccaagaacacttcagtctctctaaggatgccctgagctacctcactgttaaaggacgacatcaacacagaatgcactaaacaggaaataagctgtaatctagagaatttccattatgtgttactttttggtgactaacatggaatgttgaaaaggaagagctggaaagctcagttgttttccttgttcctctgacattgtccaggcaagagggcatcctgatcagatgagtagatttggctgagaaaaaccctagagtaaggcaggcactttgtggaggtggatgatgatggctcataaaaacgtttgttctcagtccagttcagggctctgccagcagtctttcagatttgaactgcttaaacaaaccctacagataaattggcactctgatttgtaattctgtttgtacaagtttagagcagcctagctcgagtcctcaaccccagtcctcttagaagtgaactgattgcactggatccctaaacccacaatgttgaggacacatgtgatgactccacttgctcagccagctggcctcttgcactttcccctgcccaccacttgtaactaccacttaattatcttgtgttaattgcttttgttgtgttgggtctgtatttttgtggtcagtgcctgcaggcagaaatgtgaaagcatttggtatgttgaagatacttgcttcttttttaataaaattaaaagtgcagcacgtaagtatgatactggggtagtttttttgacacaaccctggagatacaataaccagctttgaactttatgtccccaaaaaatgggttcctgggtctacaccagggcaaacattttggggggcaagttctgaatccactacttttttggccgaaagaattaaaaaattctattcgccagggcttttttgtaaccctaggagcccgaattcttttcccttggggttaaggaaaaaaca

SEQ ID NO: 351048 - DNA, 929 bp, Homo Sapiens
  misc_feature (649)..(726): n is a, c, g, or t
  misc_feature (872)..(884): n is a, c, g, or t
tccaccgctaccgatatctgggtcatcgcttccaagggaacgacactagccccgagagtttccttttgcacaacgcgctggcccgaaagcccaagcggaaccgaaccgccttctccccgtcccagcttctaaggctggaacacgcctttgagaagaatcactacgtggtgggcgccgaaaggaagcagctggcacacagcctcagcctcacggaaactcaggtaaaagtatggtttcagaaccgaagaacaaagttcaaaaggcagaagctggaggaagaaggctcagattcgcaacaaaagaaaaaagggacgcaccatattaaccggtggagaatcgccaccaagcaggcgagtccggaggaaatagacgtgacctcagatgattaaaaacataaacctaaccccacagaaacggacaacatggagcaaaagagacagggagaggtggagaaggaaaaaaccctacaaaacaaaaacaaaccgcatacacgttcaccgagaaagggagagggaatcggagggagcagcggaatgcggcgaagactctggacagcgagggcacagggtcccaaaccgaggccgcgccaagatggcagaggatggaggctccttcatcaacaagcgaccctcgtctaaagaggcagctnnnnnnnnnnnnnnnnnnnnnnnnnnnnnnnnnnnnnnnnnnnnnnnnnnnnnnnnnnnnnnnnnnnnnnnnnnnnnnaagctgaacgtgcactctgacaaggggagctgtcaatcaaacaccaaaccggggagacaagatgattggcaggtattccgtttatcacagtccacttaaaaaatgatgatgatgataaaaaccacgacccaaccaggcacaggacnnnnnnnnnnnnngcacttcgctgtgtttcccccccatctttaaaaataattagtaat

SEQ ID NO: 351049 - DNA, 2106 bp, Homo Sapiens
  misc_feature (50)..(86): n is a, c, g, or t
  misc_feature (1549)..(1589): n is a, c, g, or t
  misc_feature (1905)..(1917): n is a, c, g, or t
ggatgtatacgactactatggggaatggagctctaccgcggtggcggcgnnnnnnnnnnnnnnnnnnnnnnnnnnnnnnnnnnnnnatcaggccaaatcggccgagctcgaattcgtcgagagcgggtctaaacgggaacagccctggctgagggagctgcagcgcagcagagtatctgacggcgccaggttgcgtaggtgcggcacgaggagttttcccggcagcgaggaggtcctgagcagcatggcccggaggagcgccttccctgccgccgcgctctggctctggagcatcctcctgtgcctgctggcactgcgggcggaggccgggccgccgcaggaggagagcctgtacctatggatcgatgctcaccaggcaagagtactcataggatttgaagaagatatcctgattgtttcagaggggaaaatggcaccttttacacatgatttcagaaaagcgcaacagagaatgccagctattcctgtcaatatccattccatgaattttacctggcaagctgcagggcaggcagaatacttctatgaattcctgtccttgcgctccctggataaaggcatcatggcagatccaaccgtcaatgtccctctgctgggaacagtgcctcacaaggcatcagttgttcaagttggtttcccatgtcttggaaaacaggatggggtggcagcatttgaagtggatgtgattgttatgaattctgaaggcaacaccattctccaaacacctcaaaatgctatcttctttaaaacatgtcaacaagctgagtgcccaggcgggtgccgaaatggaggcttttgtaatgaaagacgcatctgcgagtgtcctgatgggttccacggacctcactgtgagaaagccctttgtaccccacgatgtatgaatggtggactttgtgtgactcctggtttctgcatctgcccacctggattctatggagtgaactgtgacaaagcaaactgctcaaccacctgctttaatggagggacctgtttctaccctggaaaatgtatttgccctccaggactagagggagagcagtgtgaaatcagcaaatgcccacaaccctgtcgaaatggaggtaaatgcattggtaaaagcaaatgtaagtgttccaaaggttaccagggagacctctgttcaaagcctgtctgcgagcctggctgtggtgcacatggaacctgccatgaacccaacaaatgccaatgtcaagaaggttggcatggaagacactgcaataaaaggtacgaagccagcctcatacatgccctgaggccagcaggcgcccagctcaggcagcacacgccttcacttaaaaaggccgaagagcggcgggatccacctgaatccaataacatctggtgaactccgacatctgaaacgttttaagttacaccaagttcatagcctttgttaacctttcatgtgttgaatgttcaaataatgttcattacacttaagaatactggcctgaattttattagcttcattataaatcactgagctgatatttactcttccttttaagtnnnnnnnnnnnnnnnnnnnnnnnnnnnnnnnnnnnnnnnnntttcagtgctttgggacagattttatattatgtcaattgatcaggttaaaattttcagtgtgtagttggcagatattttcaaaattacaatgcatttatggtgtctgggggcaggggaacatcagaaaggttaaattgggcaaaaatgcgtaagtcacaagaatttggatggtgcagttaatgttgaagttacagcatttcagattttattgtcagatatttagatgtttgttacatttttaaaaattgctcttaatttttaaactctcaatacaatatattttgaccttaccattattccagagattcagtattnnnnnnnnnnnnnttacactgtggtagtggcatttaaacaatataatatattctaaacacaatgaaatagggaatataatgtatgaactttttgcattggcttgaagcaatataatatattgtaaacaaaacacagctcttacctaataaacattttatactgtttgtatgtataaaataaaggtgctgctttagttttctg

SEQ ID NO: 351050 - DNA, 1598 bp, Homo Sapiens
  misc_feature (72)..(72): n is a, c, g, or t
  misc_feature (924)..(946): n is a, c, g, or t
aattctgccgatgggagcctcccactcctcccatcccggccccagctccagctgtaccccctggtggcagcnagcgagagcagcagtgggcgggcagccggggacaccccggagcgcaaggaggcggctggtactggcaagaaggtgaaggtgcggcccccgcccctgaagaagacctttgactctgtggacaacagggtcctgtcagaagtggacttcgaagagcgctttgctgagttgcctgagtttcggcctgaggaggtgctgccctcccccaccctgcagtctctggccacctcaccccgggccatcctgggctcttaccgcaagaagaggaagaactccacggacctggattcagcacccgaggaccccacctcgcccaagcgcaagatgagaagacgctccagctgcagctcggagcccaacacccccaagagtgccaagtgcgagggggacatcttcacctttgaccgtacagaagccgaggacgtgcttggggagctagagtatgacaaggtgccatactcctccctgcggcgcaccctggaccagcgccgggccctggtcatgcagctctttcaggaccatggcttcttcccgtcagcccaggccacagccgccttccaggcccgctatgcagacatctttccctccaaggtttgtctgcagttgaagatccgtgaggtgcgccagaagatcatgcaggctgccactcccacggagcagccccctggagctgaggctcctctccctgtaccgccccccactggcaccgctgctgcccctgcccccactcccagccccgcagggggccctgaccccacctcacccagctcggactctggcacggcccaggctgccccgccactgactccacccccagagtcggagcctggacagcctggcgtggggagggggctnnnnnnnnnnnnnnnnnnnnnnnaggtccctccacagctccacaggcaggtgtagggacccctgagaagtatgccaggactctactagtaccccctcaggacatggacagtatgtgggggcagtgaaggttatctcctcccggctaaagccatttcgtcctctccaggtttgggcgcgagaatgtaggcctgctcctctgtgtaaatacccccttccctcgaagctccctcccggtgctggggggcagctgaggggctgcaggggcagtctccctcctccaagcccctgtacataacctggagcgtgtgaccttcagagcttttcactttatgcaaaatggctcctgtgagggctgcaagctggagggtggtgcaggccttgggccacagggaggcgcctgtggaatagggggagttcatgcaccccttttttccccagaggggctggactcaggttagtttgggggtgggggctcctgcactttgccacaggcacggggagggttttctcctcaccccctctgccctcccaacttgggttgtactttctaagaaggtgattccccctgcccttgcccccttccccagaacaaaacatgttgatcatgtgcaatatttcttactgtgccgagaagccgcaatgagcgagattaaagctgtttaacacaaaaaaaa

SEQ ID NO: 351051 - DNA, 858 bp, Homo Sapiens
ggctggtaccggcccggaattcacgggatatcgtcgatccacgcgtcggacagcatggtttcagacgaagatgaattgaatcttctggttatagtagttgatgccaacccaattaggtgtgggaaagcaaggcattaaaggaatctcagttcactttatctcaaatgcatagatgccgtgatggtgctgggaaattcgcatttattcatgaatcgtcccagacaaacttgctgtgatagcaagtcacattcaagaaagccgattcttatatcctggaaagaatggcagacttggagacttcttcggagaccctggcaaccctcctgatatttaagtccctctgggagtaaagatggaaaatacgaatcttttaacctcagcaaatgaagttattgttgaagagattacaagatctaatgaccaaaagtgacataaagggtcaacatacagaaactttgctggcaggatccctggccaaagccctttgctacattcatagaatgaacaaggaagttaaagacaatcaggaaatgaaatcaaggatatcggcttgtgacatcacgggaggactgtacctgaaggtgcctcacatgccttctcttctgcagctatttgctgagggtgtcacattcccgatcaaagatcagacgatctcagttaatcctcccacccccagttcatgtctgactacaaggcctgcttgcgttctgtcatcgaaaaatctcattgaaaaagcgttcatgtctcgctctgatgtgtaagtcactattctgcatatcacgcccatttgtactacgttgcgacacaagctttaaaattactcttacaccagtgctgaacgccaagaacaaaaactga

SEQ ID NO: 351052 - DNA, 918 bp, Homo Sapiens
cgttgggctgcgcaggatttgagacgctcccgctgaccaccacttgctctgcgctgaggtgctgggacagccatggtttcagacgaagatgaattgaatcttctggttattgtagttgatgccaacccaatttggtggggaaagcaagcattaaaggaatctcagttcactttatccaaatgcatagatgccgtgatggtgctgggaaattcgcatttattcatgaatcgttccaacaaacttgctgtgatagcaagtcacattcaagaaagccgattcttatatcctggaaagaatggcagacttggagacttcttcggagaccctggcaaccctcctgaatttaatccctctgggagtaaagatggaaaatacgaacttttaacctcagcaaatgaagttattgttgaagagattaaagatctaatgaccaaaagtgacataaagggtcaacatacagaaactttgctggcaggatccctggccaaagccctttgctacattcatagaatgaacaaggaagttaaagacaatcaggaaatgaaatcaaggatattggtgattaaggctgcagaagacagtgcgttgcagtatatgaacttcatgaatgtcatctttgcagcacagaaacagaatattttgattgatgcctgtgttttagactccgactcagggctcctccaacaggcttgtgacatcacgggaggactgtacctgaaggtgcctccagatgccttctcttctgcagtatttgctgtggggtgtttcttcccgatcacagatcagagaatctcaagttaatacctccccagccccaagttcatgttggactacagggctgcttgcttctgtcatcgaaatctcatggaacatggtaatgtctgtctgggtggtttgccatatcctgcaattcaggcc

SEQ ID NO: 351053 - DNA, 879 bp, Homo Sapiens
  misc_feature (497)..(580): n is a, c, g, or t
cgcggaggtgtggggacccgggcttgcgtcggagggggcggtgggcatcacccatgggccatttccaaaagcaaagagaaacccaggaaaggtgaggagcaaaagaagggatccacctattcagttccaaaatctaaggagaagttgatggagaagcattcccaggaagccaggcaggcagacagggagtcggagaagcctgtggacagcctccacccaggggccgggacagccaagcacccgccgccggcagcttcgctggaagagaaacctgatgtaaagcaaaagtccagcaggaagaaagtggtcgttccacagatcatcatcacgccgagcgtctgaatgagacgctagtcagtttgcagttccagcgggagtgaccagcagagaaccattcgggagccggaggactggggcccctaccggcggcacaggaaccccagtacagcagacgcctataaattcacatctcaaagcaataaacaaggcacctttgnnnnnnnnnnnnnnnnnnnnnnnnnnnnnnnnnnnnnnnnnnnnnnnnnnnnnnnnnnnnnnnnnnnnnnnnnnnnnnnnnnnngcaacgagagcgcaggcgagagacacgaaggcggaccgccacaaggagcacaagggcaagcaacgggaccaaaggcgacggggcgcgggggcagggagaaacagtcagacgcaagaaatgtagcaaatcggcgaagaaaagaaaaaagacgaagagaaaccgcagacgtagaagtgacacgagaaggaaagagacaaggcggcagagaaatgaagaagtgtaaaacaccgtgctagcaccaagaggacgagccagccgcccagaccgaagatgactccaatgagcagggagaggccaga

SEQ ID NO: 351054 - DNA, 1047 bp, Homo Sapiens
ggtccggaattccctgcatcggaaacgcggagactcgagacttgaagccagcttattctggacccacgcaggcgactgaagacgatgggacccactgccctgcattcggtaagtcccgggtctaacggatgatccatatatttcaggtgaggagcaaaagaagggatccacctattcagttccaaaatctaaggagaagttgatggagaagcagttcccaggaagccaggcaggcagacagggagtcggagaagcctgtggacagcctccacccgggggccgggacagccaagcacccgccgccggcagcttcgctggaagagaaacctgatgtaaagcaaaagtccagcaggaagaaagtggtcgttccacagatcatcatcacgcgagcgtcgaatgagacgctagtcagttgcagttccagcgggagtgaccagcagagaaccattcgggagccggaggactggggcccctaccggcggcacaggaaccccagtacagcagacgcctataattcacatctcaaagaataaacaagcacctttgcatggcactcgctactccctgcgataggcgtctcgggaacagccgcctcaccctgtgagaagccgaggccccttctccagtgctctcggggaggttgcaccaggcccaccccaccctgtgagaaactgcagcccccttctccagtgctttcggggagggtgcaccaggcccgccccaccttgtgagaagccgtggcccccttctccagtgctctcagggagggtgcaccaggcctgcccccgccgtgagaaactgcagtccccttctccagtgctctcggggagggtgcaccaggcccaccccaccctgtgagaacctgcagcccccttctccaatgctctcggggagggtacaccaggcccgccccaccctgtgagaagccgcagcccgttctccattgccatttggtcctgccttccccagagctgctagcagctcggtcgaggcaagagtgactggctcagagagcgagctttgtggtattgataaatgaataaatta

SEQ ID NO: 351055 - DNA, 741 bp, Homo Sapiens
gatgtggtccagaggcggcactaccgaatcggcctcaacctcttcaacaagaagccagagaagggtatccagtatctgatcgagcggggcttcctgtcagacacaccggtgggagtggctcacttcatcctggagcggaaaggcctcagccggcagatgataggggaattcctagggaaccggcagaagcagttcaacagagacgtgttggactgtgtggtggatgagatggacttctcctccatggatctggatgatgcgctccggaagttccagtcccatatccgggttcagggtgaggcccagaaagtggagcgactcatcgaagccttcagccagcaggttactgtgtctgtaacccaagccctctgtgcgccaagttccggaacccagacaccatcttcatccttgcttttgccatcatcctcctcaataccgacatgtacagtcccagcgtcaaagctgaacgaaagatgaaactagatgacttcatcaagaacctgagaggggttgacaatggtgaagacatcccccgagaactcctggtgggcatctaccagcgcatccaggggcgtgaactgcggaccaacgatgaccatgtgttccaggtgcagactgtggagcgcatgattgttggaaagaaaccagtcctgtctctccctcaccgtcgactggtttgctgctgccagctctacgaggtgccagatccaaaccgccctcagagctaggtaaggccctaag

SEQ ID NO: 351056 - DNA, 4349 bp, Homo Sapiens
  misc_feature (1698)..(1723): n is a, c, g, or t
ggtctttgaggactcggaacccacagcgcaatccctggtccactggaggatggactgttccccccttcaggccggggccaagagtgagctgctaacacggcatccaagaatggcccagctggtaggatccttgctttccccatctgttggaccaaataatctcaaaggcccagagaggacagtgaccatccacagacacacagcacaggcgtgacagttctgaaaagaagctgagttgtctccaggctgctgtcactgcatccaggactctgtcagctctgctgcccacatgcacccctggcctcagcatcccggttcccccagacaagagagggcaagtcagccaggaactgcctcctccctgctctacagctaagaaaacaccattccatgacttcccaccgcgccctcgctcctacctccccacacctctctctcagtccccaggaacacacagaggtgcacatcacattcccttgtccacaactgcccgcctctcccacatgccacccccttccctgtccttccccaactccccagctccaagagtggaagaaatccccaagatcatctgggtctccctctccacacccagaactgaggcttggatatcttcttcaacatccttgccaagacttctccaccctcttgcatacctccagggacagagagcttactacctcccaaggcagcctcctgcctttggactgctctgactttagcatcagcttaatacacagaagaggtttctgtttttctgtggctctgtccatggcatcccacttgcccactctccttcctggagtgttgaggtcacacattgactcccctgagccctcttctctccaggctaaagaatcccgaagcatcgaggccatttctgctgcaacaaggtttcctgtctcttcactgtccgcacatttcttagtattccctccaggcttgggcagggagactcgcagatgcacacccacaagtattcagttctcaaactctagacgagtgttggcaactggattgcaagatgctcctaccctgatagatcaggggtggctgctggaggctgtgctggggatctgaggtttggtctgggctcagtgggagacggcagtgcaatcctgatgagtgatgtctgccaggcaccgtaagtttgattagtgatgtctgccacgggcagggatggaaggagcagtgtgatgtctgctctcttctctcccctctgtccctcttcaggaagaaagagctcattctgtctcacaagccaccggcatcctgtatcagcttccagcctcccctcaggctttccagtcaccagggacactcggagccacagcctagagccccgtgttccctggcctgtgcgtctgcccccttctgagatgcagccagaagctctgtgcctgctgcaaagattcaggtggaccctcctctaatctcctcctgctgtgcccgccagtccttgccctcccaccaggtctctgagctcagtcttaccaaattcgccctttaacagcttgctctggcaaccccataaatgacacctgagctccgtagaagctaagctcctgagacccagggggacctgccactggtaccgcggcccagcctggggcctgggggctgcccctcttgaaccacccacatgcttagccccagctttttggaagaggcaaatggctggtctgaggatgacacccnnnnnnnnnnnnnnnnnnnnnnnnnnccatgctgggcaggactgaggcaaattgcacagctttatggctctaatccaggggcatcccaggcttctggggcccacagaagtcagagggaggacccaagagaaagggctggtcatgaagggaaatctggctaaggtgggttcaagggcagacacaagactgcccctcagcagctttctacaaatgtgccaaggaaccctcaatcagccctgattcagctcgccagccagccactggccaccctcttaggctggaaagggaagacaggcagtttctgctcctgttggcattcgctcaggctggtagctatttgcaagactgcctgaggccattccttggaggcaaggcaaagaaagctcagcccaaatcaggcttgagcctccctccagagcacagggagaaacagggtttagctggcttggtccagatacaacccacagcaggttctggtggtggctggggttgtgggggaggggtgggcagggatacctctttgtttcttttcaccccgaaatacaacagcccataacagagacttcctcggaccccactaacagggcaaggaacaagaagactacaccgctcatcacaaaccctgcctgtatcgaaagccactttcctgctctgaagctactgcctcttagagaaagggaatagctctttatgggctgggggtgagggcccctccccagggtccctgttaatttctggccttggtgctcaggcctgtccacagcctcccttgtctatgtctctatccatgcttaaggggcccggacaggatttcccaaaccagccgaggccccagcacccgccgtctccccagaagccccctcctccttcccccatgggtcatatgttgaaagtctattttaaaaactatgttccttgccgtagattgcagagctaatttatcacgtttctctcctgtgagaccccccttttatatgatatatccagaggaagttttgtaatataaaacaggacgcccacactgatggttttgcactggtttttgtgaatgtttcttacaaaaagaaaaaggaacaaagaataaatagtgaccgtgaagaaaggtggtcttgatttggggttggggatagactggggcgaggcagaagcttgacaagaggctgctgatggctggagggagctgggagaagaggcgttccaggtcaccccaaacggagcgtagagcgggcccacaccgagctttcctcgctggacttaagggcccctgtccctcacccctctgccactgcctccttcccaactgtaaatctccttgccttagagtccccctgccctccaagctgtacgtctgtcttccagatcttacctgacctgcagccccctccctcaccctcacctgcaggctccactacaattagctctaaccaagccacccagtattttgtgagcacagctgtgtgccagagcctggacagcctcatggggtaaggccacgccaccctcccatcccacagttgagtgtggaagactggatgtctcagggccagcagacgcccgacacgcagcctcattccccaggtggaatccacctgcagttatgggaggacaaaccaaccatcactattagaggattaggcctggctcagatgggggattgaggcttcggcctgagggcactgcccattggcggcaccacctgtgggcagcagcgggaggcagtggtgcctgtgggaggcagtagtggctcgtggccagaccagggctcggcagcagggaggcagctctttagggagaggcacaggcttaggtagcaagagacagatgccaggagaggggcccttcctcagggtccagcctcccattctgctctgccacgtttaccaagcagagtctcggggcatccgctgtaaccatggtggtgccaccactctgctgggtacaggccatgttgctgtatctgggtgcagggacagccaggcacagggtggacaggggtgaggacccctggcaggggcccacctggcagcagccagagcgggctgtacctatagacaccctccagccatcccccactctatgccaggatgggaagcgagtctgaggcctggggctgcttttctccctacacctgtccccagggcttgggctcgccacttccggtgtgtgcatcggtgtgctggcaggagggagaaggttgggatcagggactaacggggtgtacagcacaggctggtgggccctcagggagaagctgggtggtgggtatgcagcacaggctggtgggccctcagggagaagctgggcggtgggtatgcagcacaggctggtgggccctcagaggcagggcaggggctgttcggccccaagacagccagttgtcagcctttgccagggcgctggacagggcggggaagatgaggggaggtggcctgctgaaatgtttctacttatttcctgtgctgagttggagggccacctgatcccactcagccagaccctggaggcagcccgggctgcacgtgtggggggcagctcaccgggaagcaggcaggagtgggggacaggctgagcccagtggccatcaggccttggggtacatgccaaggggcaagagagcgctatggctttccttctgttcctcctctcccagcc

SEQ ID NO: 351057 - DNA, 695 bp, Homo Sapiens
  misc_feature (616)..(616): n is a, c, g, or t
acagtcgtgatgtctttcaagagggaaggagacgattggagtcaactcaatgtgctcaaagtaagcgtgagcggagaggatctggagccgcttcagtcgctccctgaagaaaagaagagtcggggacctcctagccagttacattccagaggatgaggcgctgatgcttcgggatggacgctttgcttgtgccatctgcccccatcgaccggtactggacaccctggccatgctgactgcccaccgcgcaggcaagaaacatctgtccagcttgcagcttttctatggcaagaagcagccgggaaaggaaagaaagcagaatccaaaacatctagaatgaattgagaagggaagaaaccaaagctgaggctcctctgctaactcagacacgacttatcacccagagtgctctgcacaggagctccccactataacagttgctgccgccggaagtacagaccagaagcccctggtccctctgtctccctttcccctatgccaccctcagaggtcaaactccaaagtgggaagatcagtagggaacctgaacctgcggctggcccacaggccgaggagtcagcaactgtctcagcccctgcacccatgagccccacangaagacgagccctggaccattatctcacccttcgaagctctggatggatcccagatggacgaggtcgatgggtgactga

SEQ ID NO: 351058 - DNA, 1099 bp, Homo Sapiens
  misc_feature (808)..(808): n is a, c, g, or t
  misc_feature (812)..(818): n is a, c, g, or t
  misc_feature (820)..(820): n is a, c, g, or t
  misc_feature (822)..(822): n is a, c, g, or t
  misc_feature (824)..(852): n is a, c, g, or t
  misc_feature (884)..(884): n is a, c, g, or t
  misc_feature (917)..(917): n is a, c, g, or t
cggtccggaattcccgggatcgaaaccggaacagagaatttatcacttctgggactcacagtcgtgatgtctttcaagagggaaggagacgattggagtcaactcaatgtgctcaaaaaaagaagagtcggggacctcctagccagttacattccagaggatgaggcgctgatgcttcgggatggacgctttgcttgtgccatctgcccccatcgaccggtactggacaccctggccatgctgactgcccaccgtgcaggcaagaaacatctgtccagcttgcagcttttctatggcaagaagcagccgggaaaggaaagaaagcagaatccaaaacatcagaatgaattgagaagggaagaaaccaaagctgaggctcctctgctaactcagacacgacttatcacccagagtgctctgcacagagctccccactataacagttgctgccgccggaagtacagaccagaagcccctggtccctctgtctccctttcccctatgccaccctcagaggtcaaactccaaagtgggaagatcagtagggaacctgaacctgcggctggcccacaggccgaggagtcagcaactgtctcagcccctgcacccatgagccccacaagaagacgagccctggaccattatctcacccttcgaagctctggatggatcccagatggacgaggtcgatgggtaaaagatgaaaatgttgagtttgactctgatgaggaggaaccacctgatctccccttggactgatacccttttcccattcattcacaaataaattacaatgggtgctgagaancttnnnnnnnananannnnnnnnnnnnnnnnnnnnnnnnnnnnnaactccagggcattctatggtcgggtggcggnaaaaagaggttaatgaaaatggccccattgggnccatagctggtttcccggaccccaccctttccttgaaacaaaagggggaaaaaatcttgcccgggtcttccctaataagggggggccgctatttaaattttcccaaaaaagcccagggttaaacccgggggatataaaaaggaaatccgggggttggccgaaaacccccgggggaaattttt

SEQ ID NO: 351059 - DNA, 741 bp, Homo Sapiens
  misc_feature (682)..(682): n is a, c, g, or t
gggccccggaagtacggaggccgacaggaagagaaggaaaaaagagaaggcgctgtcccgctcttgctacggtggcctggaggagtggcgaaaccggaacagagaatttatcacttctgggactcacagtcgtgatgtctttcaagagggaaggagacgattggagtcaactcaatgtgctcaaaaaaagaagagtcggggacctcctagccagttacattccagaggatgaggcgctgatgcttcgggatggacgctttgcttgtgccatctgcccccatcgaccggtactggacaccctggccatgctgactgcccaccgtgcaggcaagaaacatctgtccagcttgcagcttttctatggcaagaagcagccgggaaaggaaagaaagcagaatccaaaacatcagaatgaattgagaagggaagaaaccaaagctgaggctcctctgctaactcagacacgacttatcacccagagtgctctgcacagagctccccactataacagttgctgccgccggaagtacaggtatgggacgggaaagccagaggtaggaaggctcagaaggagacagatggctctaaaagagttttccagtgtgtattctgaggaatactagtgttctggagatgttacttagtgtttcaagaaaaggaggattttgggctggggcgcggntgactcacgccctgtaaatccccagcaccttttggaaggctgaaagtggggtggaatca

SEQ ID NO: 351060 - DNA, 1429 bp, Homo Sapiens
  misc_feature (677)..(677): n is a, c, g, or t
  misc_feature (739)..(739): n is a, c, g, or t
ctcaaagaccagagatgcagggagaagacatgtgtccgggaaaccagacactcaagagagatggctgccctcaagcagagctcgggtgaagacaagagacaggacgtgccctgtccatgaatctccatcaggaattgacacctcagagacttctcccaaagcccctagagggggtttggctaaagacagtggaacacaggccaagggtccagagggggagcagcagccaaaggccgcagaagctacggtgtgtgccaacaacaccaaggtcagctccactggggaaaaggttgtcctgtggacaagggaagctgaccgtgtgatcctcaccatgtgccaggagcaaggggcacagccacagaccttcaacatcatctcccagcagctgggaaataagacccctgctgaggtttcccaccgttttcgagaactcatgcagctcttccacactgcctgtgaagccagctctgaggatgaggatgatgcaaccagtaccagcaatgcagaccagctgtctgaccatggggaccttctgtctgaagaggagctggatgaatgagactctgggaatcatctacacaggaccaaacccaacaggcgccctggcaccggggagggggggtagttgtactctgcttgtacagtccttgagcccagtttacagatctggagagcangaggccaggacaaggacaaaggctggaggatggagtaggacccaggggctctgccatcctangcatcattcaaggtcttttatgaagactttacagatgtccctctgtaaatagcatcgagagtggagttcagctccctttctctacttttttttggtctgatggcacatatttattgttctgtggtctaatcacagtgtttctaaatgtaaaaagtgcatatgttggtgtagctagtcccgcgacattgagctcctctgcatgaagacactgggctcctgcatccagctgtttttattgcaaactagctcctttctcccacactgggaactttagtccacgaggctgtcaccaccctggtagcactgggccaggctttgtagctcctgcagcagctctgctacgtcatcgtgctccactccagcatccatgaagctggcccagcgccgcaagtcgagtttggtgaggtctctggccaaggcttccagggtctggtgcagggacgaagaggaacacagtgccccaaacactgggatgctctccactgctgtggagggagaggaaacagagacctgtagatggatgattattctgccctgggactcgccaaactgataaggaagtccaaccttagtagacttgattgtaaactcaacaaatttggtgtattgtccccttagtacaccagtactccagaggaagaatgcttttcttgggagccatagggtgaataaaggaatgtttaactgtga

SEQ ID NO: 351061 - DNA, 2490 bp, Homo Sapiens
cggcgccgtgcttcgtcccgcttcttcccaatttcacacgctggtaccggtccggaatttccgggatggctgacgcgcggcgtttcccgtcggagcagcgcattatggcgggcggggcccgggaggtgctcacactgcagttgggacattttgccggtttcgtgggcgcgcactggtggaaccagcaggatgctgcgctgggccgagcgaccgattccaaggagcccccgggagagctgtgccccgacgtcctgtatcgtacgggccggacgctgcacggccaggagacctacacgccgcgactcatcctcatggatctgaagggtagtttgagctccctaaaagaggaaggtggactctacagggacaaacagttggatgctgcaatagcatggcaggggaagctcaccacacacaaagaggaactctatcccaagaacccttatctccaagactttctgagtgcagagggagtgctgagtagtgatggtgtctggagggtcaaatccattcccaatggcaaaggttcctcaccactccccaccgctacaactccaaaaccacttatccctacagaggccagcatcagggtctggtcagacttcctcagagtccatctccatccccggagcatctgtatgattcagaagtacaaccacgatggggaagcaggtcggctggaggcttttggccaaggggaaagtgtcctaaaggaacccaagtaccaggaagagctggaggacaggctgcatttctacgtggaggaatgtgactacttgcagggcttccagatcctgtgtgacctgcacgatggcttctctggggtaggcgcgaaggcggcagagctgctacaagatgaatattcagggcggggaataattacctggggcctgctacctggtccctaccatcgtggggaggcccagagaaacatctatcgtctattaaacacagctttggtctcgtgcacctgactgctcacagctctcttgtctgccccttgtccttgggtgggagcctgggcctgcgacccgagccacctgtcagcttcccttacctgcattatgatgccactctgcccttccactgcagtgccatcctggctacagccctggacacagtcactgttccttatcgcctgtgttcctctccagtttccatggttcatctggctgacatgctgagcttctgtgggaaaaaggtggtgacagcaggagcaatcatccctttccccttggctccaggccagtcccttcctgattccctgatgcagtttggaggagccaccccatggaccccactgtctgcatgtggggagccttctggaacacgttgctttgcccagtcagtggtgctgaggggtatagacagagcatgccacacaagccagctcaccccagggacacctccaccctctgcccttcatgcatgtaccactggggaagaaatcttggctcagtatttacaacagcagcagcctggagtcatgagttcttcccatctgctgctgactccctgcagggtggctcctccttacccccacctcttctcaagctgcagtccaccgggtatggttctggatggttcccccaagggagcagcagtggagagcatcccagtgtttggggcactgtgttcctcttcgtccctgcaccagaccctggaagccttggccagagacctcaccaaactcgacttgcggcgctgggccagcttcatggatgctggagtggagcacgatgacgtagcagagctgctgcaggagctacaaagcctggcccagtgctaccagggtggtgacagcctcgtggactaaagttcccagtgtgggagaaaggagctagtttgcaataaaaacagctggatgcaggagcccagtgtcttcatgcagaggagctcaatgtcgcgggactagctacaccaacatatgcactttttacatttagaaacactgtgattagaccacagaacaataaatatgtgccatcagaccaaaaaaaagtagagaaaggagctgaactccactctcgatgctatttacagaggacatctgtaaagtcttcataaaagaccttgaatgatgcctaggatggcagagcccctgggtcctactccatcctccagcctttgtccttgtcctggcctcctgctctccagatctgtaaactgggctcaaggactgtacaagcagagtacaactacccgcctccccggtgccagggcgcctgttgggtttggtcctgtgtagatgattcccagagtctcattcatccagctcctcttcagacagaaggtccccatggtcagacagctggtctgcattgctggtactggttgcatcatcctcatcctcagagctggcttcacaggcagtgtggaagagctgcatgagttctcgaaaatggtgggaaacctaagaaaggaggagggctgtattcactgatccttagtaacatgttaacatttatgaagcactatatattgatttgc

SEQ ID NO: 351062 - DNA, 862 bp, Homo Sapiens
ctgcggcaggctacagggcctcctcatgctcccagtcagccgctgtctgttactggctctgttcttgaggcccgagcttgaactcagctgtgatgtggcctctcagatcacactgtcctatgcttgtccagcctggggtcaaacatacccctgattcgtcccctgggtctctctggtgttaatattctgcctccacacattcttttccaggcctgaggccaagtgcccatcttggtgtcttcttacaggccactctgcccttccactgcagtgccatcctggctacagccctggacacagtcactgttccttatcgcctgtgttcctctccagtttccatggttcatctggctgacatgctgagcttctgtgggaaaaaggtggtgacagcaggagcaatcatccctttccccttggctccaggccagtcccttcctgattccctgatgcagtttggaggagccaccccatggaccccactgtctgcatgtggggagccttctggaacacgttgctttgcccagtcagtggtgctgaggggtatagacagagcatgccacacaagccagctcaccccagggacacctccaccctctgcccttcatgcatgtaccactggggaagaaatcttggctcagtatttacaacagcagcagcctggagtcatgagttcttcccatctgctgctgactccctgcagggtggctcctccttacccccacctcttctcaagctgcagtccaccgggtatggttctggatggttcccccaagggagcagccagtggaagagcatccagtgttggggcactgtgttcctcttccggtccctgcacagaaccttggaagccttggcaagagac

SEQ ID NO: 351063 - DNA, 753 bp, Homo Sapiens
tcttcctggtacttggttcctttagacacttttccccttggccataagcctccagccgacctggccatcgtggttgaacttctggaatcatacagatgctccggcgatggaagatggactctgaggaagtctgacccagaccctgatgcctggcctctgtagggataagtgtttttggaattgtacgttggtgatggtgaggaacctttgccattgggaatggattttgaccctccagacaccatcactactcagcaactcccatgcccctatggagaccctcaggttgtggcaaccgggttaaaaagttcaggacagaggccctcacctctgcactccagaaagtcttggagataagggttcttgggatagagttcctctttgtgtcgtggtgagcttcccctgccatgctattgcagcaatccaactgtttgtccctgtagagtccacacttcctcttttagggagctcaaactacccttcaagatccatgaggatgagtcgcggcgtgtaggtctcctggccgtgcagcgtcacggcccagtacagatacaggacagtcaggggcacaagctccatcaccgggggctcacttaggaatcaggtcgctcggcccagcgcagcatcctgctggttccaccagtgcgcgcccacgaaaccggcaaaatgtcccaactgcagagtgagcacctcccgggcaccgcccgccatactgcgctgctcacacggggccgccgcgcctcagccgcgccg

SEQ ID NO: 351064 - DNA, 560 bp, Homo Sapiens
gtctttggattccattttaacatctgcctctccctaaggtgcaaatgtcaaagtgcttggttgtgcaatcacaggagatgggcagctatttaaagagctgattaaaattagaaaggagcccaaggggggcatctgaacacttctctggattcctcctgaagcacccagcccacagggcagcccgcagctaacttcctcagtcaggtctgagaacacccagcactgctgcggcccaaagcagattttcttagtaacactaaactccttaatctcatcaagagatttcaagtgactttgttccagaaggtgatagaaggctcactgacgcatacaatcaacccttccgagagtctcatcttttaagagatcatgatctcaggcagtaggttactgatgacaaaaaccacaagccaaacctgtgggggtgcaaggagggaggctgaggaggaagctgcagaggagctgccatcttgtgcagtgctgtatcctgctgccatcttgtgcagtgcgtgagtgctgagacaatcatcaccaccccccagcaagacacacacaaacta

SEQ ID NO: 351065 - DNA, 1072 bp, Homo Sapiens
  misc_feature (5)..(5): n is a, c, g, or t
  misc_feature (19)..(19): n is a, c, g, or t
  misc_feature (22)..(22): n is a, c, g, or t
  misc_feature (32)..(32): n is a, c, g, or t
  misc_feature (36)..(36): n is a, c, g, or t
  misc_feature (38)..(40): n is a, c, g, or t
  misc_feature (45)..(45): n is a, c, g, or t
  misc_feature (58)..(58): n is a, c, g, or t
  misc_feature (60)..(60): n is a, c, g, or t
  misc_feature (64)..(64): n is a, c, g, or t
  misc_feature (69)..(69): n is a, c, g, or t
  misc_feature (83)..(83): n is a, c, g, or t
  misc_feature (89)..(89): n is a, c, g, or t
  misc_feature (94)..(94): n is a, c, g, or t
  misc_feature (96)..(96): n is a, c, g, or t
  misc_feature (100)..(100): n is a, c, g, or t
  misc_feature (142)..(142): n is a, c, g, or t
  misc_feature (151)..(151): n is a, c, g, or t
  misc_feature (155)..(155): n is a, c, g, or t
  misc_feature (170)..(170): n is a, c, g, or t
  misc_feature (177)..(177): n is a, c, g, or t
  misc_feature (200)..(200): n is a, c, g, or t
ctggngataaccaggccgnggncggtagccancgcngnnnaaganagcaggcgaaccncncggnagaanacgccggcccgcgntgtgcnccgcngngatnacggccagggtgccttggccccggggccgcttgaccctcgtnactcccctnactncttcggcggcgaagncgcgatntcggaggcccaggacgcacatgntgatggccacgttcacgtcctgcacgtcccagctcccgccgcagggaggccgaagaagccgtccagcgcaaacttggccgccgagtacgggagtggagaacgacgtgggcacgcggccgagcagcgaggacaccaccaccagggagcccttgctgtccgtcaggctgggcagcgcccgcgacgtcagttgcacgtagctcacaaagtttacctgcatgagccagcgagttgcctgggggctgcgggctcgcgtgccggccggggcgccgccgatgtggttcagcacgaggtagtccagcccgcccagcttgtccagcgcaaactgcaccacgctctcgggcgcctcaggggaggccatgtccgccgcgatgtagaagaccttgggggcgcccagcttccggcagttccctaccaccttctgcaggagagcctcagtgtgggcagtgagcaccaggtgggagcccagacgcgcgtagtgataggccagctcctcaccaacaccagcgttggcccctgtcagcagcactcgcgctccctggaggctggctgggtcgaagttgtcatcccaataataggcgaagaacagggcccccagccctgtgaggagaagcaccttcatggacctgtgtgggcccgctcaggcctcagtttcccccactgtccagcgggggtggggtcccgggctgggagccacgcgaacgcccccacggtcctctcttctcggccgcctcctgccgggtccccgaccgcaccccctcccgtagggcacgggtcacgtgactcgaagcccacctcctcccggggaggggccgggcctcggggacccagcgccggagcgtcgccgggcaacagtgcccgcctggtcttccgct

SEQ ID NO: 351066 - DNA, 834 bp, Homo Sapiens
cggaggcgcgatctcggaggcccaggacgcacatggtgatggccacgttcacgtcctgcacgtcaagctcccgccgcagggagccgaagaagccgtccagcgcaaacttggccgccgagtagggagtggagaacgacgtgggcacgcggccgagcagcgaggacaccaccaccagggagcccttgctgtccgtcaggctgggcagcgcccgcgacgtcagttgcacgtagctcacaaagtttacctgcatgagccagcgagttgcctgggggctgcgggctcgcgtgccggccggggcgccgccgatgtggttcagcacgaggtagtcaagcccgccaagctggtccagcgcaaactgcaccacgctctcgggcgcctcaggggaggccatgtccgccgcgatgtagaagaccttgggggcgcccagcttccggcagttccctaccaccttctgcaggagagcctcagtgtgggcagtgagcaccaggtgggagcccagacgcgcgtagtgataggccagctcctcaccaacaccagcgttggcccctgtcagcagcactcgcgctccctggaggctggctggccatagccggggtggtcactccgctcaggcctcagtttcccccactgtccagcgggggtggggtcccgggctgggagccacgcgaacgcccccacggtcctctcttctcggccgcctcctgccgggtccccgaccgcaccccctcccgtagggcacgggtcacgtgactcgaagcccacctcctcccggggaggggccgggcctcggggacccagcgccggagcgtcgccgggcaacagtgcccgcctggt

SEQ ID NO: 351067 - DNA, 994 bp, Homo Sapiens
ggtccggaattcttgcgatcgaagaccaggcgggcactgttgcccggcgacgctccggcgctgggtccccgaggcccggcccctccccgggaggaggtgggcttcgagtcacgtgacccgtgccctacgggagggggtgcggtcggggacccggcaggaggcggccgagaagagaggaccgtgggggcgttcgcgtggctcccagcccgggaccccacccccgctggacagtgggggaaactgaggcctgagcgggcccacacaggaccatgaaggtgcttctcctcacagggctgggggccctgttcttcgcctattattgggatgacaacttcgacccagccagcctccagggagcgcgagtgctgctgacaggggccaacgctggtgttggtgaggagctggcctatcactacgcgcgtctgggctcccacctggtgctcactgcccacactgaggctctcctgcagaaggcgggctggactacctcgtgctgaaccacatcggcggcgccccggccggcacgcgagcccgcagcccccaggcaaactcgctggctcatgcaggtaaactttgtgagctacgtgcaactgacgtcccgggcgctgcccagcctgacggacagcaagggctcccctggggggggtgtccctcgctgctcggccgcggtgccaacgtcgttctccactccctactcggcggcaagtttggctggacggttcttcggtccctgcggcgggagctggacgtgcaggacgtgaacgtggccatcaccatgtgcgtcctgggcctccgaggatcgcgcctccgcgccgaggcagccagggtcggcccgaaaatagccggagtgggaattcgaactccatttcaccggcagagggacggaaagcagccatagccaactccaatggttccgaatccaggtccgggtcgcgaggataacggcgctggcagggagcccggcgagcatggcagcgcacggggggaaaaccag

SEQ ID NO: 351068 - DNA, 990 bp, Homo Sapiens
tggagggaggaacattgccgtctggacttggagggcaccccccggtgctcaggctgccgcgcccgtgacgttgagctcctgactgcctcgcggcggaggcgcgatctcggaggcccaggacgcacatggtgatggccaacgttcacgtcctgcacgtccagctcccgccgcagggagccgaagaaccgtccagcgcaaacttggccgccgagtagggagtggagaacgacgtgggcacgcgccgagcagcgaggacaccaccaccagggagcccttgctgtccgtcaggctgggcagcgcccgcgacgtcagttgcacgtagctcacaaagtttacctgcatgagccagcgagttgcctgggggctgcgggctcgcgtgccggccggggcgccgccgatgtggttcagcacgaggtagtccagcccgcccagcttgtccagcgcaaactgcaccacgctctcgggcgcctcaggggaggccatgtccgccgcgatgtagaagaccttgggggcgcccagcttccggcagttccctaccaccttctgcaggagagcctcagtgtgggcagtgagcaccaggtgggagcccagacgcgcgtagtgataggccagctcctcaccaacaccagcgttggcccctgtcagcagcactcgcgctccctggaggctggctgggtcgaagttgtcatcccaataataggcgaagaacagggcccccagccctgtgaggagaagcaccttcatggtcctgtgtgggcccgctcaggcctcagtttcccccactgtccagcgggggtggggtcccgggctgggagccacgcgaacgcccccacggtcctctcttctcggccgcctcctgccgggtccccgaccgcaccccctcccgtagggcacgggtcacgtgactcgaagcccacctcctcccggggaggggccgggcctcagggacccagcgccggagcgtcgatcgcaggaattccggaccggtcc

SEQ ID NO: 351069 - DNA, 1145 bp, Homo Sapiens
  misc_feature (713)..(721): n is a, c, g, or t
gggtgcggtcggggacccggcaggaggcggccgagaagagaggaccgtgggggcgttcgcgtggctcccagcccgggaccccacccccgctggacagtgggggaaactgagtgcctgagcctgggcccacacaggaccatgaaggtgcttctcctcacagggctgggggccctgttcttctgcctattattgggatgacaacttcgacccaggtgagcacctggggttgagtggagggagaaacctgggccagctgtcctgtcctccgcccagagtgaccacccctggctatggccagccagcctccagggagcgcgagtgctgctgacagggtgccaacgctggtgttggtgaggagctggacctatcacatacgcgcgtctgggctcccacctggtgctcactgaccacactgaggctctcctgcagaaggtggtagggaactgacggaagctgggcgcccccaaggtctatctacatcgcggcggacatggcctcccctgaggcgcccgagagcgtggtgcagtactgcgactccacaagctgggcgggcctggactacctacgtgctgaaccacatcggcggcgccccggccggcacgcgagcccgcagcccccaggcaactcgctggctcatgcaggtaaactttgtgagctacgtgcaactgacgtcgcgggcgctgcccagcctgacggacagcaagggctccctnnnnnnnnntggcctcgctgctcggccgcgtgcccacgtcgttctccactccctactcggcggggcagatttgccctggacgggtttcttcggctccctgcggcgggaagctggaacttgcaagaacgtgaacctggccctcacccttgggcgcccctggggcctcccaaaaatcgcgccttcgtccgccgagggcacatcccgggtaactccccagcggcttaaagggaggaccccgggggcctaaccgaccctcttgttccctattcctagggggccggacaaggtctgccgacgcgtagtacctttgcgccacctggagggacatgccacactgggttccgggcttcgccgtctgaatctcaccgtgttcgcatgtcgcccatccagtttccccaccatagcccccccatccccatgctctggcccgcag

SEQ ID NO: 351070 - DNA, 1561 bp, Homo Sapiens
  misc_feature (771)..(771): n is a, c, g, or t
ggtccggaattttcgggatgggacccggcaggaggcggctgagaagataggaccttgggggcgttcgcgtggctcccagcccgggaccccacccccgctggacagtgggggaaactgaggcctgagcgggcccacacaggaccatgaaggtgcttctcctcacagggctgggggccctgttcttcgcctattattgggatgacaacttcgacccaggtgagcacctggggttgagggagggagaaaccgggccagctgtcctgtcctccgcccagagtgaccaccccggctatggccagccagcctccagggagcgcgagtgctgctgacaggggccaacgctggtgttggtgaggagctggcctatcactacgcgcgtctgggctcccacctggtgctcactgcccacactgaggctctcctgcagaaggcgggctggactacctcgtgctgaaccacatcggcggcgccccggccggcacgcgagcccgcagcccccaggcaactcgctggctcatgcaggtaaactttgtgagctacgtgcaactgacgtcgcgggcgctgcccagcctgacggacagcaagggctccctggtggtggtgtcctcgctgctcggccgcgtgcccacgtcgttctccactccctactcggcggccaagtttgcgctggacggcttcttcggctccctgcggcgggagctggacgtgcaggacgtgaacgtggccatcaccatgtgcgtcctgggcctccgagatcgcgcctccgccgcncgaggcaatccagggaagtcacgagggtcaaggcggccccggggcccaaggcagccctggccgtgatccgcggcggcgccacgcgcgcggccggcgtcttctacccgtggcgtttccgcctgctgtgcttgctccggcgctggctaccgcgcccgcgggcctggtttatccgccaggagctcaacgtcacggccgcggcagcctgagcaccggggggtgcccctccagtcccagacggcaatgttcctccctccaactgtccctggagccagaacactcacagagacacccctgagagggtggccacagcccaagatgaagtcatcaagacagaaaagcaaaaccgagaaaaacgacgggcacctggaaccagtcacggcttgggaggtgcaggtgccccgtgttaggcgcctttgtcggggacttgcaaggcctcacctgtttggccatgattgatgacgtgactgcttccattttgcagatgaggaaactaaggctcagagaggccacgccacccttgagccacccatggacccctctccatctcctgcctgcgcctttaagtccctgatttattctttccattcattccatctgggaggaacccccccaactcctgccagcttcccctagctggggtctctggtactcttcacacctgcaggggcgtctacactgttcgtctacctggtggcagggtctgagcgggaggaggagggaaagagtgtgttctgagctggacccagcctcttgttcgagaataaaaactcttcttctcttgcaaaaaaaa

SEQ ID NO: 351071 - DNA, 702 bp, Homo Sapiens
agcgggcccggcgacgctccggcgctgggtccccgaggcccggcccctccccgggaggaggtgggcttcgagtcacgtgacccgtgccctacgggagggggcgcggtcggggacccggcaggaggcggccgagaagagaggaccgtgtggggcgttcgcgtggctcccagcccgggaccccacccccgctggacagtgggggaaactgaggcctgagcgggcctgtgccggccacctctgtcccctgtccctctgcaggcccacacaggaccatgaaggtgcttctcctcacagggctgggggccctgttcttcgcctattactgggatgacaacttcgacccagccagcctccaaggagcgcgagtgctgctgacaggggccaacgctggtgttggtgaggagctggcctatcactacgcgcgtctgggctcccacctggtgctcactgcccacactgaagctctcctgcagaaggtggtagggaactgccggaagctgggcgcccccaaggtcttctacatcgcggcggacatggcctcccctgaggcgcccgagagcgtggtgcagtttgcgctggacaagctgggcgggctggactacctcgtgctgaaccacatcggcggcgccccggccggcacgcgagcccgcagccccaggcaactcgctggctcatgcaggtaaactttgtgagctacgtgca

SEQ ID NO: 351072 - DNA, 1266 bp, Homo Sapiens
aggagggacatctcatcactttgccccaggctacacctcctctgcccaagacctaagttcctttttgtctggctgaccttgaggaatgctgggcattagttcacaggctgctctggcagagcccaccctttcctccccacatatggaagcagagctcctcctgttcctggaggcctctccttgggctcctcacccagagctgggccaggaccgacgtgacgctggacaacctgttcagggtccacgagcacacaggagaagttggtgcctgtgcaggccaggggtcagctgctccagcaccaaggccttgcacagctgcgtacctgtgctcccacgttcccggctggtgctcccctcccacagtcggcctgggaggtgctcaatgaaggaaccattgcccagccagtagaggatgctgaagttggggaagcggctgcaggccacacaggataagctcagcgttccattcagtggcacttccacctctggccaggtcacttccaatgctggacactgcttagctgctgggaacactgggggctgggaggggcaggggtcctttgtgcttctaactgaggcagtggcagctgtggtggtctgcgagacaggtgtggctctgaccaggagagtgacgacgtgggcacacaggagcaggacccacaaagggctgaggtctggtgtccagttgtgtctcatggtcatgatgcatgcgtcaggagctggtgagcctggctctttatctgtgacaacgtcctcttctctggctcctaagaggtcctgaagagccttcctttccagaagcttccctctaggagctccaagactcaagttagctgtgtctagctgcgtgtgaacccaccacaggaaatacaccgagagcacttcctccttgtctgtagaactctcacggccaacccaggaactggcacacaagctcgagagccaaccctaacaggagggaagggcaggcacttcccggggaagaggcggactggctcaacactggctctggcaacagagtctacatcagaatatgaatcttgtcactgatgggacaaatggcgctggggctgcgggagggccaggattcagggtgaggcgtgtgaggaacctaggatgctaaatctaaggaggttttctctcagggtcatgcagttatccatggaggcagaaagaccagggctgggtgatccaatgcatgcatatcttaagtgtgacagaagcgcatgtctgaggtgcgaggagagtaattgtatcctctagagt

SEQ ID NO: 351073 - DNA, 926 bp, Homo Sapiens
  misc_feature (376)..(470): n is a, c, g, or t
ctggaccggtccggattctccggatcctcccaggtgaaaaagctactattgccactgaaaggaatgggaaaccagagaacaataccatgaacattaatgcttccatttatgatgagattcagcaggaaatgaagcgtgctaaagtgtctcaagcactgtttgcaaaggttgcagcaaccaaaagccagggatggttgtgcgagctgttacgctggaaagaagatccttctccagaaaacagaaccctgtgggagaacctctccatgatccgaaggttcctcagtcttcctcagccagaacgtgatgccatttatgaacaggagagcaacgcggtgcatcaccatggcgacaggccgccccacattatccatgttcnnnnnnnnnnnnnnnnnnnnnnnnnnnnnnnnnnnnnnnnnnnnnnnnnnnnnnnnnnnnnnnnnnnnnnnnnnnnnnnnnnnnnnnnnnnnnnnacaggccctcggctccccccacggcaacccacggtggcctctccagcagagtcagatgaggaaaaccgacagaagacccggccacgaacaaaaatttcagtggaagccttgggaatcctccagagtttcatacaagacgtgggcctgtaccctgacgaagaggccatccagactctgtctgcccagctcgaccttcccaagtacaccatcatcaagttctttcagaaccagcggtactatctcaagcaccacggcaaactgaaggacaattccggtttagaggtcgatgtggcagaatataaagaagaggagctgctgaaaggatttggaagagagtgtccaagataaaaatactaacaccccttttttcagtgaaactagaagaagagctgtcagtgggaaggaaacccagacctttatactgatttgaaagactgagaataaaatatttgtttc

SEQ ID NO: 351074 - DNA, 787 bp, Homo Sapiens
acaccgacaaccaaacagacgtgctggctccagtcctgtttttactttcaaaaaccaacaagcccgacagtggagcctgtcccctcccgggagggtgctcatggccccactcacctcatcaccccacggaaacctttgtgtcttgccctggaagacacccgaattctttgtacattgacatgcccttctccttcctccctcccctgtagctggtctttgttttactccctccctttctgatccatgtatatcatattatgtgagatatcatctgcctgaaaaaagactttgtgcggattattgggaacattgtagctgtttctgtgttttttcttaccttgtagtctggttctgaattaagagaggaaaaaaaagtaattatgatacattgtagtttgtgtacgatatatgttgataacgttttattaaagggacatcttttttccgcagcccttcctgacatgtttggggaatgtgggttggagtttattacactgattacaaaatgcaaggtgacttcttgggcacagtttttgttcctggtgcataacaagatgttttgtgtttgaggcgtctgccttcttttcctgggcctgcaaattctgtgttcttgtggagtcgcgatggccttggcggaaggtgggttgggagacagagggtccaagcaaagggcaggctcagcccatgtttataaagcccttaggggaccagatagcaaattcccaggtttaaatcttgtttgctgcaacttgctgtgtggccttgggcaaaattagttgatactctg

SEQ ID NO: 351075 - DNA, 1501 bp, Homo Sapiens
  misc_feature (37)..(37): n is a, c, g, or t
  misc_feature (870)..(965): n is a, c, g, or t
  misc_feature (967)..(979): n is a, c, g, or t
taaacagcatttattcaaactggtgcatatctttganatcctcgatgattactaggtatatatcacaactgtttgagccaatgatattaatacgttattataaagtaatcaacatgacaatacttttgcccgcatccaaaagcgcagtacactgatttaggccagactgactgatgctccctcccgtcatcaggttctattttaggacaggaggaaaaacatgttttcccattcacagtttttaaaaatcttttttaatggatgtcctaattgtacacagaacacaaacctatcttcacttctcaatgtgtaaatgtgtatctactaagtatacattaatgtgcattaaagacattcagaaaacataaaaaccaaagaaacatattaactgcataaaaatttaaagttgctaaatggtaaagcagctagaaattataaagtagggaaatgttgaatagctgacataaagattcttagtaagaacattttacattccaatattacaaatgagtacaatatgcaatgcatgaaaaataagccaattctgagatgttgaagcacctatcagagcgtacaaatgagcgagctacctggtctagatggaatgaagtgttagctttaaaatttgagttaatttaataacttacatcttcacccaggaagcatcagagctgaggaaataaacctcagcagtcaagtgttactaaacctcatagtttgaaagatattactccgtgatgtgtggagcacagagtagctaaatagtacttataataaattggctatagttctaagattaatcccttgtggaagagggaaagttggccctcatcaagaacataaatggctgggcatggtggctcacaccannnnnnnnnnnnnnnnnnnnnnnnnnnnnnnnnnnnnnnnnnnnnnnnnnnnnnnnnnnnnnnnnnnnnnnnnnnnnnnnnnnnnnnnnnnnnnnncnnnnnnnnnnnnngaataaactgttgcaccctagtgaggagctggttgtcacctatcctaagtgcatgtgtcttctcccctacctccaacactacttcaattttgtgcttacaaaacaaccagatagattcattgcagcattatttagaacagcaaaaatgagaaacacctaaatctaccaatagcaagattggtatttttaagtatgtctttataatgaactcactacatttatgcagttacaacacttgactgtatttactaatttccctggcacagagtttttaaaaacagcctacagcactataacatagacactcacacaaatatacccccatcattaggggtaaaaggctccaaggatgtataacgaagtgttaacaatgttttcttctgggtggcaagattttaagttttattcactttatagtatttttaaaatgctttaatgtaataaacatatgctatttttctgtcaggagaaaaacattttcacttagaaaagagagaacataagcagtaaaaaagaaaaact

SEQ ID NO: 351076 - DNA, 1117 bp, Homo Sapiens
  misc_feature (207)..(267): n is a, c, g, or t
aggctacgcggcgatgtcgggggagaggctcctatagggttaaccaaaaatgttgggagggggtggttggcattttccgggtctgggggggagaattttcttttcggagggaaagggagaacggggcattaaaagtggggggacaggagcaggagggagtgcaggggtgagccgtcaccccgtggtcggagggctcccaggccttcnnnnnnnnnnnnnnnnnnnnnnnnnnnnnnnnnnnnnnnnnnnnnnnnnnnnnnnnnnnnnctttgatccaggcaccgtatttggaaattggggggggacggtgactggaggaggttagcagggcagacaaatgtccggtggtggtggggatatctgtaacgggccagagagaattgggtggctataaagagccggagatgttagggccaacttgagaggcagcaacgtttgggcaccatatgaagggggagtgagccctcatcaaaaaagacaaaagcaaaaacctcaggcttgtactcagatctaagatacaggtagtcacttcaaggctctcaacacgcccaacacacctgtcctctgcaggcagcctttcctgggccagctgttgctcacgtggggatccagctgatcagagagcaggctcaggaggaaaaggtgagtggctgttgttaaatccatttcaagaagcagtttcttggactggaaggcaagggcatctgctgtttgttcctcgtggcccaatcccaggcttcatggtgatggagtgggcagagcaccctgccttcatgactcttagtagacagggaccaagaggaaactctgggtggtccgaggtgggtttgagaaatggctggcatttactggccaccaaaatcactacagattctgtacaagcaaaagacaaggcaccagaatgtaagtgtttctcctgggcccaaaatcccttctcctgggtaccgtcgtttctggctccaggctcagccatagtgatagacaaagtcatagctgctgggctccttggggatggggggtggggcttcgggaatctggatgttctccagatccaggagccgcagcttcatctccatgctcagcagggtgtccaggtcactcttggtcagctcactgg

SEQ ID NO: 351077 - DNA, 1077 bp, Homo Sapiens
  misc_feature (901)..(901): n is a, c, g, or t
  misc_feature (905)..(905): n is a, c, g, or t
  misc_feature (916)..(916): n is a, c, g, or t
  misc_feature (955)..(955): n is a, c, g, or t
  misc_feature (959)..(959): n is a, c, g, or t
  misc_feature (991)..(991): n is a, c, g, or t
  misc_feature (1005)..(1006): n is a, c, g, or t
  misc_feature (1011)..(1011): n is a, c, g, or t
  misc_feature (1015)..(1015): n is a, c, g, or t
  misc_feature (1020)..(1020): n is a, c, g, or t
  misc_feature (1040)..(1040): n is a, c, g, or t
  misc_feature (1045)..(1045): n is a, c, g, or t
  misc_feature (1050)..(1050): n is a, c, g, or t
  misc_feature (1058)..(1059): n is a, c, g, or t
  misc_feature (1064)..(1064): n is a, c, g, or t
  misc_feature (1066)..(1066): n is a, c, g, or t
gatgcccagggtaccatctaattgagggagtgaggaagagagcagctcgcttctaactggactgcacgttggtgacagcgtcccaagctggtgacagacccactctgtaactttcagctagattcagccaccagatcccagaaacatgacccttgctgcctacaaagagaagatgaaggagctcccgctggtgtccttgttctgctcctgcttcctggccgatcccctgaataagtcgtcctacaaatatgaaggctggtgtgggagacagtgtaggaggaaggatgaaagccagcggaaagacagtgctgactggagagaaagaagagctcaggcagacacggtggacctgaattggtgcgtcatttccgacatggaagtcatcgagctgaacaaatgcacctcgggccaatcctttgaagtcatcctgaagccaccctcctttgatggggttcccgagttcaacgcctccctgccaaggcggcgagacccatccctggaagagatccagaagaaactagaagcggctgaggagcgaaggaagtaccaggaagcggagctcctgaaacacctagcagagaaacgggaacatgagagagaggtgatccaaaaggccattgaggaaaacaacaacttcatcaagatggctaaggaaaaactggcccagaagatggaatccaacaaggagaacagggaggcccacctcgccgccatgttggaacggctgcaagagaaggacaagcacgccgaggaggtgcggaaaaacaaggagctgaagggaagaggcctccaggtaaagcctagaggccaaagaactttccaggtcagccggacagctccagcagctccacgttccaggcagcctcgcccgccggctgcgctcccagcactggggtttggngggnggggggtggcnagggggcgtttctctgcttttggtgttttacatgttaanaatnaccagtgagccatcctatttgtttccgggganaatgacggggtggnnagggngagngagantttggaaaggagatggaganactcnaaganattcaccnncccgngngatctgatttt

SEQ ID NO: 351078 - DNA, 863 bp, Homo Sapiens
  misc_feature (780)..(800): n is a, c, g, or t
ggaagagagcagctcgcttctaactggactgcacgttggtgacagcgtcccaagctggtgacagacccactctataactttcagctagattcagccaccagatcccagaaacatgacccttgctgcctacaaagagaagatgaaggagctcccgctggtgtccttgttctgctcctgcttcctggccgatcccctgaataagtcgtcctacaaatatgaagcagacacggtggacctgaattggtgcgtcatttccgacatggaagtcatcgagctgaacaaatgcacctcgggccaatcctttgaagtcatcctgaagccaccctcctttgatggggttcccgagttcaacgcctccctgccaaggcggcgagacccatccctggaagagatccagaagaaactagaagcggctgaggagcgaaggaagtaccaggaagcggagctcctgaaacacctagcagagaaacgggaacatgagagagaggtgatccaaaaggccattgaggaaaacaacaacttcatcaagatggctaaggaaaaactggcccagaagatggaatccaacaaggagaacagggaggcccacctcgccgccatgttggaacggctgcaagagaaggacaagcacgccgaggaggtgcggaaaaacaagggagctgaaggaagaggcctccaggtaaagcctagaggccaaagaactttccaggtcagccggacagctccagcagctccacgttccaggccagcctcgcccgccggcttgcgctcccagcactnnnnnnnnnnnnnnnnnnnnntggccaaggggcgtttcctctgctttttggtgtttgtacatgttaagaattgaccagtgaagc

SEQ ID NO: 351079 - DNA, 1720 bp, Homo Sapiens
  misc_feature (1658)..(1671): n is a, c, g, or t
agcggagccgtgctgacagagctggaaacatgcaccaagccctccaggaagctatgtttacgggttcatctgttcttttttatttcttctactggattccatattctctcacccccaaatttaaaggacctaatagatcctggcaaatcattcattatacccccagctcgcaagctgatggcttctccccaaccttctctgtaccactccctctttctttcttcctctccgtccctcacccctctggttctccagctccacaggcagcagagaaagcaggctctttgtctgacatcatctttcactccctggcctgctaaggagttactcactcaggcaatccctgctccaccagaggagactgtccaattgccaagacaacccactgactggccaatcacagagcttggaggtgatgtcatggcaagagcgagcagtggtgctgatgttgagagaagcccagggtaccactaattgagggagtgaggaagagagcagctcgcttctaactggactgcacgttggtgacagcgtcccaagctggtgacagacccactctgtaactttcagctagattcagccaccagatcccagaaacatgacccttgctgcctacaaagagaagatgaaggagctcccgctggtgtccttgttctgctcctgcttcctggccgatcccctgaataagtcgtcctacaaatatgaagcagacacggtggacctgaattggtgcgtcatttccgacatggaagtcatcgagctgaacaaatgcacctcgggccaatcctttgaagtcatcctgaagccaccctcctttgatggggttcccgagttcaacgcctccctgccaaggcggcgagacccatccctggaagagatccagaagaaactagaagcggctgaggagcgaaggaagtaccaggaagcggagctcctgaaacacctagcagagaaacgggaacatgagagagaggtgatccaaaaggccattgaggaaaacaacaacttcatcaagatggctaaggaaaaactggcccagaagatggaatccaacaaggagaacagggaggcccacctcgccgccatgttggaacggctgcaagagaaggacaagcacgccgaggaggtgcggaaaaacaaggagctgaaggaagaggcctccaggtaaagcctagaggccaaagaactttccaggtcagccggacagctccagcagctccacgttccaggcagcctcgcccgccggctgcgctcccagcactggggtttcgggggaggggggtggccaaggggcgtttcctctgcttttggtgtttgtacatgttaagaattgaccagtgaagccatcctatttgtttccggggaacaatgacggggtgggagaggggagaggagagagtttgggaaagggagatggagaagaactcaaggacattgcaaccctgcccggcgcagatctgattttcacatctctacctggacattgagcctccaggcaccatgttgaggagagatgaaaaccagggcggtagaacttcagggtgaaggacagagtcctgggtggggcagcggctgcagggcgcaccagagaacccagccagagggggtgtgagtaccagtggtgttgcttccaccctgcagcaggtgggatgaggtcnnnnnnnnnnnnnnaaccatcattttttgatcatcatgaccaatgaaacattgacaaaaaaaa

SEQ ID NO: 351080 - DNA, 512 bp, Homo Sapiens
  misc_feature (27)..(27): n is a, c, g, or t
  misc_feature (54)..(54): n is a, c, g, or t
  misc_feature (156)..(156): n is a, c, g, or t
ttcttctcatgttccccgtttctcctncctaagttgtttttcaaggaatcccgncttccctggtaacttcccttcgctccctaaacccgccttccaagtttccttactggaatctcctcccagggaatgggtcttcgcccgccttggcaagggagncgttgaactcgggaaccccatcaaaggagggtggcttcaggatgacttcaaaggattggcccgaggtgcatttgttcagctcgatgacttccatgtcggaaatgacgcaccaattcaggtccaccgtgtctgcttcatatttgtaggacgacttattcaggggatcggccaggaagcaggagcagaacaaggacaccagcgggagctccttcatcttctctttgtaggcagcaagggtcatgtttctgggatctggtggctgaatctagctgaaagttacagagtgggtctgtcaccagcttgggacgctgtcaccaacgtgcagtccagttagaaagcgagctgctctcttcctc

SEQ ID NO: 351081 - DNA, 950 bp, Homo Sapiens
  misc_feature (69)..(69): n is a, c, g, or t
  misc_feature (100)..(100): n is a, c, g, or t
attcctctctgcctggggcagactgtcccacagtcccccgccttggtatgccactggggcatatatttnttttagaggtgtgtgtgtatgctggggagtnagggaggttccccatgatggcaggtagcagggctggccatttcatggacatcctgccctctgggtctgttacagtccaacttggtggcaaggacagagggcctggaccagcaggtggactggaactggtatgatgttctgtccccgggggagatgcaacggctctcctttgcccgactcttctacctgcagccgaagtacgcagtagcttgatgaagccaccagtgccctgacagaggaagtggagagcgagctctatcgcatcggccagcagctggggatgacgttcatcagtgtgggacatcggcagagccttgagaagtttcattccttggttctgaaactctgtggaggaggaagatgggagctgatgagaatcaaagtggaatgaagctctggcttttggaaggagagccacactgtggcgggtcggcggccctcaggagagaccaggaggactgacagcgaagatcgagctcaggttcgccacatagatcccgtgcaggagccacatgggtcctgtgcaggacccctagcagtggtgggctgagcccaggtctaggtttctgtgggggacactgaatctcccagtgttcagtctcccaggactctgctgcctcagccagagcctccatatgcttgaagtgctgattacctacaaatgatttcagatcatgtttgctaaagagaaatctggaagtgtgagatctgtaagaaatgaaagaaatgactcttggagtcaagagatctggaaatcttttaatcagttaaattgtgcagcaatagatttttaactttaactgaccatttaagttttttaataagttttttacaaagaaaagttaaacatt

SEQ ID NO: 351082 - DNA, 2607 bp, Homo Sapiens
  misc_feature (893)..(893): n is a, c, g, or t
  misc_feature (2208)..(2208): n is a, c, g, or t
  misc_feature (2232)..(2232): n is a, c, g, or t
  misc_feature (2234)..(2235): n is a, c, g, or t
  misc_feature (2237)..(2237): n is a, c, g, or t
  misc_feature (2252)..(2252): n is a, c, g, or t
  misc_feature (2274)..(2274): n is a, c, g, or t
  misc_feature (2282)..(2282): n is a, c, g, or t
  misc_feature (2316)..(2316): n is a, c, g, or t
  misc_feature (2334)..(2334): n is a, c, g, or t
  misc_feature (2352)..(2352): n is a, c, g, or t
  misc_feature (2382)..(2382): n is a, c, g, or t
  misc_feature (2482)..(2482): n is a, c, g, or t
  misc_feature (2519)..(2519): n is a, c, g, or t
  misc_feature (2527)..(2527): n is a, c, g, or t
  misc_feature (2530)..(2530): n is a, c, g, or t
  misc_feature (2542)..(2542): n is a, c, g, or t
  misc_feature (2547)..(2547): n is a, c, g, or t
  misc_feature (2557)..(2557): n is a, c, g, or t
  misc_feature (2599)..(2599): n is a, c, g, or t
  misc_feature (2601)..(2601): n is a, c, g, or t
ggctggtacggccggagatttgggatgcacttgttggttggggtacctctcagctcaagcttagctttggtgcaaagatgcgtgggaggctgctgctgctgcctaacttctaggcctctttctgatggctatggcttccatcctgcctctgccccctgagtggctgggactacaggtgtgcctcacagcctggagctttcacagccagataactaaaggggccaggctagggcttatataagagaaatttgggaggattgagataaaggggatagtcttcttgatcatccaaaacagctcatctaccttcaagtttttctttggctctgctcagagctggctcaggcccctgggtactggacctttcagttcccactttttcaggggattaactgaggcaccgtaagatgcaactctctagaaccctgtttaaaggccctgggatttagttgcccctaggaaaccagccttgtctggttccctcttcccatagggtcagtgttcacagcactgtgaggcaaggtcaagagcagaggtgatgtgaaagtttcttgttctctctacctttgggcccatctccctgggtccagctactctgtgtcattggctccagggaccagcgcatcagccaggacgtggagcgattctgccggcagctcagcagcatggccagcaagctcatcatctccccgttcaccctcgtctactacacttaccagtgcttccaaagcacaggctggctcgggcctgttgagcatcttcgggtatttcatccttggggacccgtggtgaacaaaactttgatgggccccattgtgatgaagctggtgcatcaggagaagctggagggagattttaggttcaagcacatgcagattcgggtgaatgcgganctgctgctttctacagtcggcatcaacacctttgactatctgggcagcatcctgagttacgttgtcatcgaaatccccattttcagcggagtctatggagacctgagtcccacagagcttagcaccctggtcagcaagaatgcctttgtgtgcatctacctcatcagctgcttcacccagctaatcgacctgtccacgacgctctcagatgtggctggctacacgcacagaattgggcagcttcgggagacgcttctggacatgtccctgaagtcacaggactgcgagatcctgggcgagagcaagtggggcttggacacacccccagggtggccagcggcagagccagcagacacagcatttatccttgagcgggtctccatctctgccccctcctctgacaaacccctaatcaaggatctgagcctaaagatctccgagggacagagcctgctcatcacaggcaacacgggcactggcaagacctccttgctccgggttctgggtggcctctggacgagtacacggggctcagtgcagatgctgacggactttgggccccatggggtgctattcctgccacaaaagccattcttcactgacgggacccttcgggagcaggtgatatatcccctgaaggaggtctaccccgactcaggttctgccgataatgagaggatcttgaggttcttggaattggcaggcctggtaagtggggagagggaccctcaggacccgagcccacctgggagcaccagctacagtccaacttggtggcaaggacagagggcctggaccagcaggtggactggaactggtatgatgttctgtccccgggggagatgcaacggctctcctttgcccgactcttctacctgcagccgaagtacgcagtgcttgatgaagccaccagtgccctgacagaggaagtggagagcgagctctatcgcatcggccagcagctggggatgacgttcatcagtgtgggacatcggcagagccttgagaaggtacccgtgctcacaaggatggcctgaggaggagaaagaacccaaaggctcagcctggccagggccagaggcccctcaaacggggagtagcagtagcagagagaaccgagtggcctcctctgccggcggccagggcagcctgatctccatgtggtggtggtctcttgtagtttcattccttggttctgaaactctgtggaagaggaagatgggagctgatgagaatcaaagtggaatgaagctctggcttttgaaaggagagccacactgtggcgggtcgccggccctcaggagagaccaggagnactgacagcgaagatcgagcccangnncnccacatagatcccgngcaggagccacatgggtcctgngcaggacncctagcagtggtgggctgagcccaggtctaggtntctgtgggggacactgantcccccagtgttcagtcncccaggactctgctgcctcagccagagccnccatatgcttgaagtgctgattacctacaaatgatttcagatcatgtttgctaaagagaaatctggaagtgtgagatctgtaagaaatgaaagaaatgantcttggagtcaagagatctggaaatcttttaatcagntaaattgngcngcaatagatttntaacnttaactgacnatttaagttttttaataagttttttacaaagaaaagttaaanantaaaaa

SEQ ID NO: 351083 - DNA, 1210 bp, Homo Sapiens
  misc_feature (54)..(90): n is a, c, g, or t
gggccctggaaagatcatcatatggggaactggagctgcacgcggtggcggcgnnnnnnnnnnnnnnnnnnnnnnnnnnnnnnnnnnnnnatcaggccaaatcggccgagctcgaattcgtcgagagcggcggggcagctgggctccagagtccctcgggtctcaggtcatggcggtcgccgagcccgcgcccggagctggcgccaggcccaggttagatctgcaatttctccagccgttcctgcagatactgaaggttttgtttccttcttggtcatcacaaaatgccttgatgttcctgacccttttgtgcctgaccctactggagcaatttgtgatctaccaggttggcttgatccccagtcagtactatggggtcctgggaaacaaagacttggaagggtttaagactctgacattcctggctgtcatgctcattgttctgaactccacgctgaagagctttgatcagttcacctgcaacctgctgtatgtgagctggaggaaggacctcactgagcaccttcaccgcctctacttccggggccgtgcgtactacaccctcaacgtgctgcgggatgacatcgataacccggaccagcgcatcagccaggacgtggagcgattctgccggcagctcagcagcatggccagcaagctcatcatctccccgttcaccctcgtctactacacttaccagtgcttccaaagcacaggctggctcgggcctgtgagcatcttcgggtatttcatcctggggaccgtggtgaacaaaaactttgatgggccccattgtgatgaagctggtgcatcaggagaagctggagggagattttaggttcaagcacatgcagattcgggtgaatgcggagcctgctgctttctaacagagctgggcatgtggagcacatgaggacagacccgcagctgcagagactccttccagaccagaagggagcttgatgtccaaggaactctggctgtacatcggcatccaacacctttgactatctgggcagcatcctggagttacgttgtcttcccaatccccattttcagcgggggtctatggaagactgaatccccccaaagcttaaccaccctggtcaccaaaaaatgcctttggtggggcatcttacctcattaggcgggcttcccccaggttcatccgaacctggccccgaaaagtttttcaaaagtgggcttggcc

SEQ ID NO: 351084 - DNA, 832 bp, Homo Sapiens
gggactcagtctccatagaccccgctgaaaatggggattgcgatgacaacgtaactcaggatgctgcccagatagtcaaaggtgttgatgccgactgtagaaagcagcaggctccgcattcacccgaatctgcatgtgcttgaacctttggaagcactggtaagtgtagtagacgagggtgaacggggagatgatgagcttgctggccatgctgctgagctgccggcagaatcgctccacgtcctggctgatgcgctggtccgggttatcgatgtcatcccgcagcacgttgagggtgtagtacgcacggccccggaagtagaggcggtgaaggtgctcagtgaggtccttcctccagctcacatacagcaggttgcaggtgaactgatcaaagctcttcagcgtggagttcagaacaatgagcatgacagccaggaatgtcagagtcttaaacccttccaagtctttgtttcccaggaccccatagtactgactggggatcaagccaacctggtagatcacaaattgctccagtagggtcaggcacaaaagggtcaggaacatcaaggcattttgtgatgaccaagaaggaaacaaaaccttcagtatctgcaggaaccgctggagaaattgcagatctaacctgggcctggcgccagctccgggcgcgggccccgcgaccgccatgacctgagacccgagggactctggagcccagctgcccctagttcaagtactgggtagagtccgaggaggggcggggccccggctaccacagagacggcgtttgatagagaggaaggtgcgggagacgcggactctcccggaagcg

SEQ ID NO: 351085 - DNA, 908 bp, Homo Sapiens
tagatgcacacaaaggcattcttgctgacaagggtgctaagctctgtgggactcaggtctccatagaccccgctgaaaatggggattgcgatggacaacgtaactcaggatgctgcccagatagtcaaaggtgttgatgccgatgtacagccagagctccttggacatcagctccctctgggtctgaaggagtctctgcagcctgcggtctgtcctcatgtgctccacatgcccagctctgtagaaagcagcaggctccgcattcacccgaatctgcatgtgcttgaacctaaaatctccctccagcttctcctgatgcaccagcttcatcacaatggggcccatcaaagttttgttcaccacggtccccaggatgaaatacccgaagatgctcacaggcccgagccagcctgtgctttggaagcactggtaagtgtagtagacgagggtgaacggggagatgatgagcttgctggccatgctgctgagctgccggcagaatcgctccacgtcctggctgatgcgctggtccgggttatcgatgtcatcccgcagcacgttgagggtgtagtacgcacggccccggaagtagaggcggtgaaggtgctcagtgaggtccttcctccagctcacatacagcaggttgcaggtgaactgatcaaagctcttcagccagtagggtcaggcacaaaagggtcaggaacatcaaggcattttgtgatgaccaagaaggaaacaaaaccttcagtatctgcaggaaccgctggagaaattgcagatctaacctgggcctggcgccagctccgggcgcgggccccgcgaccgccatgacctgagacccgagggactctggagcccagctgccccaccgctctcgacgaattcgagctcggccgatttggcctgat

SEQ ID NO: 351086 - DNA, 230 bp, Homo Sapiens
  misc_feature (45)..(45): n is a, c, g, or t
ttacaggcgtgagcacttgtgcacagccttgccctgtctattttnaccagccaggaggctctggctttttgcagaaggcttctttgttgtgcaggttctgccgatgatgagaggttcttgaggttcttggaattggcaggcctggtaagtggggagagggaccctcaggacccgagcccacctgggagcaccagctacaggtaggcaggtgctggccctgctatgcttgg

SEQ ID NO: 351087 - DNA, 2445 bp, Homo Sapiens
tatatgcaggcctgcgttctgctcctggggctggttctgagtgcccagcttcagtctcctgagaacatgaggatgggagggggcagagtcttgctgagggcacacccagttcccgctggaggaggacagtgccagtcttctgcaaagggaccttgggtgggaacgggcccggagcgggaggaacgtgactccccagagggaagatgggcatcatactgggcccagagctgggaaggagttgctgccagcacagggtgggcctggactcccctcgcccctacccccagtggttgtggctgtagccctaagcctggagagcaggaccggcccggggtgtctgggaggctgccaggtgcctcccagagctcccaagggcccccacctgcaagtgccagcctcagggcagtgcccaaatgaggccctctcagctgcagccagcgatgccttgggatgctcaccgggagggaggcggctttgggctcctaagtccttgggagaggctgggagcagtcactgcgcggcttgcgcaagcccattgtcgggttgggtggcttcctcagccagggctgggagggactccaggatcaggtcctccctgtctcgagtctcagtggggtgatggggaggagacctggccacccatggctcaggggcagctgagaacaaggacctgctggagctggaagtgctgtggtgttgaggggtggggtgggcagcttctcacacctgcctcctgcctccttctgtccacctttccaccaccctgacctgtcccagccccacacatggttctgcctggctggcctgcccttggcacctggcgtagagcacacagaaggcactcagctaatgctgggcaggcccactcatggggagtgcgtggctgtgcagcaccagggaaccggcacagcagcgccggcagaaatcacagcagtaaacttgtccgggttgtatgcatcaaggtggcgatggacgtgggtccccccactgcactgtggccctgagcactgtatagcagcccggcaatgggagccattatcttgcccctttgacagaggaggacacagaggcacagggaggtgaagtagctgccccacactagtgcctcctcgctcactcaccaccccctgcaccacagtgcagccgcttctcccaccagctggggttccttggacccccaagcctgggaagggggaggtgagtttacaaaatggaaagcttaaaaggagaaaagtggaaccagaggtttgagaagccctgagtggtagagtaaggcctccagcgctgcctctgggtgcagggcagagtggcagaggagagggggagaggcactgggcaccatgggggcccagttcccacttcggggatctctctcgcagaaccgagggtccccttcatgggggtagatgcccagggctagctgttgccactgtctgtgtggacctgagtcctggacatgcccgagtgactcaggagtggctgcttgggcgggctctgtcaccctaggatgttatacattctgggaactggacaggagtggctgcttgggcgggctctggcaccctgggatgttatacattctgggaactggacaggagtggctgcttgggtgggctctggcaccctgggatgttatacattctgggaactgcaatcagccactagagaagtcggagctacaggaagtgaccctggggtgggacctggggacatggccaggtcagcatggggacacccggctccagcaggagctctggtctgtcctggggtctttgggggcagggctgcggccctgggcaggcttcctccaggcggaggtcctggggaagtgggggagccaggccagtgccgcctcccccactatgtagcatctgattcgtcatctctcatgaaggcgatttggttcataactctgaaactctgaaaaaggtcaaaagaagcagagaggccctcggtggatatgccagcttttctgccggtgctttctcccactactctgggtggtctgctctcctcttcaaacctcagctcgcagggagggcctgaatctgccagcccctcaggatctccttccctctgggccctccccacccttaaggagcctcccagacagaagggtggacagagccacctgggcagcccgagagacacacgggggtcctccctgtggacagccctgccagcttccgcccagccctgagcttcatttgcatcttgaggagtaaggggtggtgaaatgggaatgctggtctggctcagctggtcgtgggcataagtgcccgctgaatggatggcatctctccctcctgtcttatgttctggggtccaggtgcttcccagggccatgcccctgctgctaatgcttgccctaacccttaccctaaccagcgtccagcgtcgtctcaccgagccgtaaataaatcaacagattcgcattgtcaaaaa

SEQ ID NO: 351088 - DNA, 1100 bp, Homo Sapiens
  misc_feature (239)..(239): n is a, c, g, or t
  misc_feature (573)..(632): n is a, c, g, or t
  misc_feature (1008)..(1008): n is a, c, g, or t
gctaagaccaagtcccagtgaaatatacctacagcagaacaggtacctggtacccatgtctcctccagaagaagaatgaataataaatttggacctaatttagcaaatgattgttttgagaatttccactgtctaaatatgaagaattagttttccacttagctttatatgctcttgaatttactgtgctacttctggtatcttgtgatgtcacatgtgtaagacaattgaaaaaaaancctagacctttgaattggaataattgatggacaagtcacataggagaatatcacaaagatgattattaagagttgatggagcactgcctggtcagaaattctcaaatgcttttgttctgtgagacatacagaataaataccattactatatcttacatcttgccttccctgaccactcagaactggggctggagcaccagccaaggcagacaaacaaggtttccttagttggccataaagcagtgataatcaactttggctggacattagaaccgccttggaggctttcgcaaatattggtgtctggttcccactccaaatgattttaatatannnnnnnnnnnnnnnnnnnnnnnnnnnnnnnnnnnnnnnnnnnnnnnnnnnnnnnnnnnncctctagataaatgtgtaaatcaaagcatccatctgtgcatctgattccttaaagcctctttcacttcactgtggctcccatgtccttcctcaccacgatcttcttgcaccaaattggtacttcctcctccttttctaagacagaccttacctattctacatttcatgctttcagggctatgttgtctgcaaatacacacactaaacttgttatgttgacaaccatgttccctggaatggtgcatactagaggtactgctcaaaccaagtacaccacaagtatttctggcacccaggacagtgtgcatgtgaaatagtacctagccaaaaatggagttgcatgacagaggacagaggtgaagaagctgtgaaagcnaccacgtttctcctgacacagataccaagacctgatatgaatgttttgacttcttttgcattgccctgtgtgagccaacatggtcaagtaca

SEQ ID NO: 351089 - DNA, 1213 bp, Homo Sapiens
  misc_feature (20)..(20): n is a, c, g, or t
  misc_feature (32)..(32): n is a, c, g, or t
  misc_feature (82)..(82): n is a, c, g, or t
  misc_feature (1149)..(1166): n is a, c, g, or t
cccactatttctcctgtgtntccgagtctgcncataccacaagaagctgcgcccacgcttggcgcatccatgccgcaatgtnccttccctccccagagtatcactactttttagtgctgaacttgaggccacgtgcgacaagccacagattcatcctcaggaaatcatcgagtcccccatcctaaagctaaatggccggaccatggagattgagtctacctttcacatgtatgtccagcctgtagtccatccacagcttaccccattctgtacagagctcaccgggattattcaagccatggtggatggtcagccaagcctgcagcaagtgctggagagggtcgatgaatggatggcgaaggaaggcctcttagatccaaacgtcaagtcaatttttgtcacctgtggagactgggacttaaaagtcatgctcccaggccagtgccagtacttgggcttgccagtggcggattacttcaagcagtggattaatctgaaaaaggcttacagttcgccatgggctgctggcccaagaatggacttctagacatgaacaagggcctcagcctgcaacacataggccggccccacagcggcattgacgactgcaagaacattgccaacatcatgaagacactcgcctatcgaggcttcatcttcaagcagacatcgaagccgttctgattggccgaggacaggatggggcaggacagggtagctgtttggcccagcccagaatcctcctctccctcaccagaggggaagagggagagtggcatagctctgtgtccagagtgtccccagctgccctgtgggctcatgcccttggcgtgggcttgtgcccttgcaagggcttggccacttggcccttctggagcagacactttgtgccccccatccccacccctcaatctcagcccagtatcagcccctcccattgcgggcctgggctagggggacccaggcactcaccgcctcctccctggtacacaggcttctgtggggccaccaagcccctcctgtgccccctcccatccatagtgcatggtgtgtggtgcccccagggctccaggacagatcaggccccaccttgtgtctacccccatccccgctgtgaacgtgccactgaataaagtcggggaaacgagnnnnnnnnnnnnnnnnnnctcgagactagttctctctctccctcgtgcggaattcgccacccagg

SEQ ID NO: 351090 - DNA, 1546 bp, Homo Sapiens
  misc_feature (67)..(67): n is a, c, g, or t
ccgggccccgcaatgggagggggctgatacttggcttgagattgagggggtggggatggggggccancaagttgtctgctccagaggggccaagtgcccaagcccttgcaaggccacaagcccacgccaaggggcatgagcccacagggcagctggggacactctggacacagagctatgccactctccctcttccccctctggtgagggagaggaggattctgggctgggccaaacagctaccctgtcctgccccatcctgtcctcggccaatcagaacggcttcgatgtctgcttgaagatgaagcctcgataggcgagtgtcttcatgatgttggcaatgttcttgcagtcgtcaatgccgctgtggggccggcctatgtgttgcaggctgaggcccttgttcatgtctagaagtccattcttgggccagcagcccatggcgaagctgtaagcctttttcagattaatccactgcttgaagtaatccgccactggcaagcccaagtactggcactggcctgggagcatgacttttaagtcccagtctccacaggtgacaaaaattgacttgacgtttggatctaagaggccttccttcgccatccattcatcgaccctctccagcacttgctgcaggcttggctgaccatccaccatggcttgaataatcccggtgagctctgtacagaatggggtaagctgtggatggactacaggctggacatacatgtgaaaggtagactcaatctccatggtccggccatttagctttaggatggggaactcgatgatttcctgaggatgaatctgtggcttgtcgcacgtggcctcaaagtccagcactaaaaagtagtgatacctctggggagggaaggacaccattgccgccatggatgcgccaaagccgtgggccgccagctttctggtggatatggagcagaactccggaacaccacagggagaaaataagtgggagcccagcacttttcttgctcttgaaagtaaatacgaagaaaatcgagctgctccagtctgtaaaggtgctagcattgaacatccagaagcatctaaaactctccttacttcgaagatgccaagaccggcagctggggatgctgaaggttctgtgagagctggaaagccccaatgcccggggtgttgcccccaactcgggcccatccaagtccaggggagagtaaggggaggggcggggggccaggagaccagccctccttcccagggccgcccccgccccccgtcagcagcgggagaggctgtcgccatggcaacgccccctcctcggggccagcgcggcaggctccctccaggtgcaggccccgacgtctccctcggcctcagcaagcgctcagggcagttggcggcggcgggcgcggcccgcgccgactgcggcgccggccaggcagaggcagggccagctccgcccgctccccaccgcccgttcccggccgcctgaacagcggcagccagcaccacgagtccacaacacaccgactcaccatcccgggaattccggaccggtacc

SEQ ID NO: 351091 - DNA, 457 bp, Homo Sapiens
  misc_feature (11)..(11): n is a, c, g, or t
  misc_feature (38)..(38): n is a, c, g, or t
  misc_feature (51)..(51): n is a, c, g, or t
  misc_feature (67)..(67): n is a, c, g, or t
ggcaaggaaanggtaaatgtttgcccaaacccaaaaancctcctctccctnaaccaaaagggaaaanggaaaaatggcaaaaaatctgtgtcccaaaagtgtcccccaagcttccctgtgggctcaatgcccttggccgtgggcttgtgcccttgcaagggctttgccacttggcccttctggagcagacactttgtgccccccatccccacccctcaatctcagcccagtatcaacccctcccattgcgggcctgggctagggggacccaggcactcaccgcctcctccctggtacacaggcttctgtggggccaccaagcccctcctgtgccccctcccatccatagtgcatggtgtgtggtgccccagggctccaggacagatcaggccccaccttgtgtctacccccatccccgctgtgaacgtgccactgaataaagtcggggaaacgaggc

SEQ ID NO: 351092 - DNA, 1332 bp, Homo Sapiens
  misc_feature (277)..(520): n is a, c, g, or t
  misc_feature (522)..(558): n is a, c, g, or t
  misc_feature (560)..(589): n is a, c, g, or t
  misc_feature (591)..(612): n is a, c, g, or t
  misc_feature (614)..(618): n is a, c, g, or t
  misc_feature (621)..(628): n is a, c, g, or t
  misc_feature (631)..(631): n is a, c, g, or t
  misc_feature (636)..(636): n is a, c, g, or t
  misc_feature (640)..(928): n is a, c, g, or t
  misc_feature (935)..(1028): n is a, c, g, or t
  misc_feature (1053)..(1053): n is a, c, g, or t
  misc_feature (1074)..(1074): n is a, c, g, or t
  misc_feature (1087)..(1087): n is a, c, g, or t
  misc_feature (1149)..(1149): n is a, c, g, or t
  misc_feature (1264)..(1264): n is a, c, g, or t
gtggtaccggtccggaattcccgggatctcgtggtgctggctgccgctgttcaggcggccgggaacgggcggtggggagcgggcggagctggccctgcctctgcctggccggcgccgcagtcggcgcgggccgcgcccgccgccgccaactgccctgagcgcttgctgaggccgagggagacgtcggggcctgcacctggagggagcctgccgcgctggccccgaggagggggcgttgccatggcgacagcctctcccgctgctgacggggggcggnnnnnnnnnnnnnnnnnnnnnnnnnnnnnnnnnnnnnnnnnnnnnnnnnnnnnnnnnnnnnnnnnnnnnnnnnnnnnnnnnnnnnnnnnnnnnnnnnnnnnnnnnnnnnnnnnnnnnnnnnnnnnnnnnnnnnnnnnnnnnnnnnnnnnnnnnnnnnnnnnnnnnnnnnnnnnnnnnnnnnnnnnnnnnnnnnnnnnnnnnnnnnnnnnnnnnnnnnnnnnnnnnnnnnnnnnnnnnnnnnnnncnnnnnnnnnnnnnnnnnnnnnnnnnnnnnnnnnnnnncnnnnnnnnnnnnnnnnnnnnnnnnnnnnnncnnnnnnnnnnnnnnnnnnnnnntnnnnnccnnnnnnnnccnccccncccnnnnnnnnnnnnnnnnnnnnnnnnnnnnnnnnnnnnnnnnnnnnnnnnnnnnnnnnnnnnnnnnnnnnnnnnnnnnnnnnnnnnnnnnnnnnnnnnnnnnnnnnnnnnnnnnnnnnnnnnnnnnnnnnnnnnnnnnnnnnnnnnnnnnnnnnnnnnnnnnnnnnnnnnnnnnnnnnnnnnnnnnnnnnnnnnnnnnnnnnnnnnnnnnnnnnnnnnnnnnnnnnnnnnnnnnnnnnnnnnnnnnnnnnnnnnnnnnnnnnnnnnnnnnnnnnnnnnnnnnnnnnnnnnntcctttnnnnnnnnnnnnnnnnnnnnnnnnnnnnnnnnnnnnnnnnnnnnnnnnnnnnnnnnnnnnnnnnnnnnnnnnnnnnnnnnnnnnnnnnnnnnnncccttctccttccgcccgtttgtgnccgccccgcgttggcgtcccncctcttgtttgtntttgccgtcgcttctccctgtttcccgcccttttttcttcccttgccccctcttgcctgccntcctcttttctcttccccgtgcctgttctctcgttctcctctcctttgttctgcggtctcccctgcctgtcctccttttccgtttgcctgttggccctgttctttttcgcccccngccctcgttttttttcctcccccgccgtgctctgtcgcccgcgtcccgcttttttttctctctccccc

SEQ ID NO: 351093 - DNA, 775 bp, Homo Sapiens
ggaccggtccggaattcccgggatagtcggtgtgttgtggactcgtggtgctggctgccgctgttcaggcggccgggaacgggcggtggggagcgggcggagctggccctgcctctgcctggccggcgccgcagtcggcgcgggccgcgcccgccgccgccaactgccctgagcgcttgctgaggccgagggagacgtcggggcctgcacctggagggagcctgccgcgctggccccgaggagggggcgttgccatggcgacagcctctcccgctgctgacggggggcggggtgcggcctgggaaggagggctggtctcctggccccccgcccctccccttactctcccctggacttggatgggcccgagttgggggcaacaccccggggaaatcatcgagttccccatcctaaagctaaatggccggaccatggagattgagtctacctttcacatgtatgtccagcctgtagtccatccacagcttaccccattctgtacagagctcaccgggattattcaagccatggtggatggtcagccaagcctgcagcaagtgctggagagggtcgatgaatggatggcgaaggaaggcctcttagatccaaacgtcaagtcaatttttgtcacctgtggagactgggacttaaaagtcatgctccccaggccagtgccagtacttgggcttgccagtggccggatttacttcaaagcagtggatttaatcttgaaaaaggccttacaggtttcgcccatggggcttgctgggcccaa

SEQ ID NO: 351094 - DNA, 919 bp, Homo Sapiens
  misc_feature (488)..(488): n is a, c, g, or t
  misc_feature (555)..(740): n is a, c, g, or t
  misc_feature (808)..(808): n is a, c, g, or t
gtggagactcgagcctggggtcggcggagacagctggtgtctgaagccgctcgcgcccagggtgaccctgtttgcagcacgatgtctgaagaagaggcggctcagatccccagatccagtgtgtgggagcaggaccagcagaacgtggtgcagcgtgtggtggctctgcccctggtcagggccacgtgcaccgcggtctgcgatgtttacagtgcagccaaggacaggcacccgctgctgggctccgcctgccgcctggctgagaactgcgtgtgcggcctgaccacccgtgccctggaccacgcccagccgctgctcgagcacctgcagccccagctggccactatgaacagcctcgcctgcaggggcctggacaagctggaagagaagcttccctttctccagcaaccttcggagacggtaccccggacgactagacatggggacctccagtgggggcaggccagattagaggcgggagggaaggnagggatggtgacaaccaggcttttagttaactcaagaaaaaacagccaggttaaaataactgcaacnnnnnnnnnnnnnnnnnnnnnnnnnnnnnnnnnnnnnnnnnnnnnnnnnnnnnnnnnnnnnnnnnnnnnnnnnnnnnnnnnnnnnnnnnnnnnnnnnnnnnnnnnnnnnnnnnnnnnnnnnnnnnnnnnnnnnnnnnnnnnnnnnnnnnnnnnnnnnnnnnnnnnnnnnnnnnnnnnnnnnnnnnntgctagtaagggcagttaactccctcaacaccctctgtgagggaaaggttttatcacccattttatangggaaactgaggcacggagccaggtaaaaatccaggggatcttttgagtcccacccccagggaaactaggggtggcagaaaattggagctgggattccccacggtgccctg

SEQ ID NO: 351095 - DNA, 666 bp, Homo Sapiens
ccagcgtctccagctctgcctggctccggcggcggctctccggaggccgttggccccattccccccacagctcgtgcaccttcccagggcggtccggggcggtgggggtcaccccacactgcatgtggtctatcagctccagcgtctcctgcagctgggccagggtgtcctgggcacggtgtttgctctgcctcagtttccccacagagtgctcgtaggccaggtggcggatccgtgctgacagggagccgaggcgcacaaagtagccctgctgtctcctctgatcctccaccgaacccacttcagggccttcagcctcagccgccagtgccgcgagctcttcctccgtcatgggcaggaagtgatccaccagctcctctgatttttccagtacaacatccacagcatggctcacggagcgcttcagctccacgctccagcgccggcccctccgggccaggtccaccacacccgtgacactgctggccaccacgtccttggctgaggtcaccaccgtctccgaaggttgctggagaaagggaagcttctcttccagcttgtccaggcccctgcaggcgaggctgttcatagtggccagctggggctgcaggtgctcgagcagcggctgggcgtggtccagggcacgggtggtcaggccgcacacgc

SEQ ID NO: 351096 - DNA, 1192 bp, Homo Sapiens
  misc_feature (771)..(784): n is a, c, g, or t
  misc_feature (791)..(791): n is a, c, g, or t
  misc_feature (805)..(805): n is a, c, g, or t
  misc_feature (883)..(892): n is a, c, g, or t
  misc_feature (982)..(982): n is a, c, g, or t
  misc_feature (1000)..(1000): n is a, c, g, or t
  misc_feature (1029)..(1047): n is a, c, g, or t
  misc_feature (1097)..(1112): n is a, c, g, or t
  misc_feature (1114)..(1114): n is a, c, g, or t
atctaatggatgatgggtagagcttaggtgggaacagaaggaaaatgttctgaaagtcgtgggtgagcctgtactgtgtgcttagtaagggggaactgggcttctacaaggactccaagggcccggcatccgggagcacacacggtggggaaccgctgctcagcctgcacaaggccaccagcgaggtggctagtgactacaagaaaaagaagcatgtcttcaagctccagacccaggatggcagtgagtttttgctccaggcaaaagatgaggaggagatgaacggctggctggaggctgtagcttcctcggtggcggaacacgcagagatcgcccgctggggccagacacaacccactacttcatccacagaggagggcaaccctaagagggaaggcggagatcgcagggccagcgggcgcaggaagtgacttcccacccccaggacctgacacatctcgtctcccctcttttccgcactgtgggcacaaagacactttttcttccgcagggcgggagcccctagttccaacactgaggacgcgtgacatggtgggcaccggaaaggaggggacttctcctgcaccccaagaagtggtggggagattgctgcccctatagccatatctcggccccttcccactcaccaccccaaccccaggtgctgggggtcccttatttttatgcaataactgagcttgatgggggtgggcagggggccaggagagccaagcccccagccccgatcggcagagccggccccaagaagcnnnnnnnnnnnnnncagaaancccggcccccctcncggcccaagggaggggcacgggggcgcgggggaggcccccgggaccacccagggggcaagggggcagggaggggacannnnnnnnnngccgggaccgcacgcccaaggcggcctggaccccgggcggggaggggggagggaaggggcccaagccccccgcaccccgccgccacaganccaagcgggaaaaaccgnacaaaggaaattttggcaaaacgacgaannnnnnnnnnnnnnnnnnncacccgcgaaggctgaaaaagggaggggcgacaaagcacaaaactgtttnnnnnnnnnnnnnnnncnccaaaggaaaaagccacggcaagaggggaggggcgaggggaagcccaccccggcaggcggcgggcgggagcaccgccc

SEQ ID NO: 351097 - DNA, 989 bp, Homo Sapiens
  misc_feature (19)..(19): n is a, c, g, or t
  misc_feature (30)..(30): n is a, c, g, or t
  misc_feature (49)..(49): n is a, c, g, or t
  misc_feature (62)..(62): n is a, c, g, or t
  misc_feature (90)..(90): n is a, c, g, or t
  misc_feature (94)..(157): n is a, c, g, or t
  misc_feature (210)..(210): n is a, c, g, or t
  misc_feature (219)..(219): n is a, c, g, or t
  misc_feature (250)..(250): n is a, c, g, or t
  misc_feature (254)..(254): n is a, c, g, or t
  misc_feature (280)..(280): n is a, c, g, or t
  misc_feature (284)..(284): n is a, c, g, or t
  misc_feature (305)..(320): n is a, c, g, or t
  misc_feature (344)..(344): n is a, c, g, or t
  misc_feature (424)..(424): n is a, c, g, or t
  misc_feature (428)..(428): n is a, c, g, or t
  misc_feature (855)..(855): n is a, c, g, or t
  misc_feature (921)..(921): n is a, c, g, or t
ggcccgacactaccccctncttcctccccngctgcgggccaccctccgngggccggcggcgntcgccgggcccgcgggcgccggacgtgncttnnnnnnnnnnnnnnnnnnnnnnnnnnnnnnnnnnnnnnnnnnnnnnnnnnnnnnnnnnnnnnnnttttcttccgccggggcgggagcccctagttcccacactgaggacgcgtgacntggtgggcnccggaaaggaggggacttctcctgccccccnagangtggtggggagattgctgcccctatngccntatctcggccccttcccactnnnnnnnnnnnnnnnnggtgctgggggtcccttatttttntgccctacctgagcttgatgggggtgggcagggggcccgttgagccccgccccccgccccgctctgccgatcctgccccnagangctggggtggtgggggcagtaattcctgcccccctctctgccctagggatgggcacgggggcgctggtgaggtcccactggaccatccagggtgctagggggcagggaggggacaccccctccccgcctttacctcacttccaatgctgccttgatctctgtctgggaggggggagtgaaggggccctaaccacctgcactccgccgcctcagagacatgcggttaattcctgacttagtttatttttgcaaaacgtcgatctcctcctcccccgccccgcatccgcgaaggcttttaatgggaggggcgtcaaagctcaaaactgtattcctctctcctcccccctccagttgtaaatgacactacatgaggggaggggcgaggggaagcccacccctgcatgcttctggctggagcacctccctnggggagtcgggggattgggttgtgggcagtccccatggccgcctggaagaaaccgctggggcccgnggggtgtggggcggtgtggcgggcgcacactgtatgtacctataataaaccctttggctttgacggtc

SEQ ID NO: 351098 - DNA, 580 bp, Homo Sapiens
gaagacaattactgttgtgcatcaaccatggtgtaacatcacaggcttacgtccagcgacttcatatgtattctccatcaatccaggaataggcaatgaaacttgaggagatcccaaagtcataaaagtcatcacagagccgatcccagtttctgatctccgagttgccctcacgggtgtgaggaacgctgctctctcctggagcaatggcaatggaaccgactcctgccgggttcttctagaaagcataggaagccatgaggagttgactcaagactcaagacttcaggtcaatatctcgggcctgaagccaggggttcaatacaacatcaacccgtatcttctacaatcaaataagacaaagggagaccccttggacacagaaggtggattggatgccagcaatacagagagaagccgggcagggagccccaccgcccctgtgcatgatgagtccctcgtgggacctgtggacccatcctccggccagcagtcccaagacacggaagtcctgcttgtcgggttagagcctggcacccgatacaatgccaccgtttattcccaagcagcgaatggcaca

SEQ ID NO: 351099 - DNA, 2685 bp, Homo Sapiens
  misc_feature (86)..(86): n is a, c, g, or t
  misc_feature (622)..(622): n is a, c, g, or t
  misc_feature (638)..(638): n is a, c, g, or t
  misc_feature (889)..(909): n is a, c, g, or t
  misc_feature (948)..(948): n is a, c, g, or t
  misc_feature (1033)..(1033): n is a, c, g, or t
  misc_feature (1039)..(1039): n is a, c, g, or t
  misc_feature (1042)..(1042): n is a, c, g, or t
  misc_feature (1948)..(1956): n is a, c, g, or t
  misc_feature (2097)..(2097): n is a, c, g, or t
  misc_feature (2126)..(2126): n is a, c, g, or t
  misc_feature (2138)..(2138): n is a, c, g, or t
  misc_feature (2141)..(2141): n is a, c, g, or t
  misc_feature (2159)..(2159): n is a, c, g, or t
  misc_feature (2170)..(2170): n is a, c, g, or t
  misc_feature (2174)..(2174): n is a, c, g, or t
  misc_feature (2196)..(2196): n is a, c, g, or t
  misc_feature (2211)..(2211): n is a, c, g, or t
  misc_feature (2215)..(2216): n is a, c, g, or t
  misc_feature (2218)..(2220): n is a, c, g, or t
  misc_feature (2222)..(2222): n is a, c, g, or t
  misc_feature (2224)..(2224): n is a, c, g, or t
  misc_feature (2228)..(2278): n is a, c, g, or t
  misc_feature (2282)..(2282): n is a, c, g, or t
  misc_feature (2285)..(2285): n is a, c, g, or t
  misc_feature (2287)..(2287): n is a, c, g, or t
  misc_feature (2292)..(2292): n is a, c, g, or t
  misc_feature (2294)..(2294): n is a, c, g, or t
  misc_feature (2300)..(2300): n is a, c, g, or t
  misc_feature (2305)..(2305): n is a, c, g, or t
  misc_feature (2307)..(2307): n is a, c, g, or t
  misc_feature (2309)..(2310): n is a, c, g, or t
  misc_feature (2316)..(2316): n is a, c, g, or t
  misc_feature (2319)..(2319): n is a, c, g, or t
  misc_feature (2322)..(2322): n is a, c, g, or t
  misc_feature (2329)..(2329): n is a, c, g, or t
  misc_feature (2333)..(2333): n is a, c, g, or t
  misc_feature (2336)..(2336): n is a, c, g, or t
  misc_feature (2358)..(2358): n is a, c, g, or t
  misc_feature (2361)..(2361): n is a, c, g, or t
  misc_feature (2373)..(2374): n is a, c, g, or t
  misc_feature (2386)..(2386): n is a, c, g, or t
  misc_feature (2390)..(2390): n is a, c, g, or t
  misc_feature (2393)..(2393): n is a, c, g, or t
  misc_feature (2400)..(2400): n is a, c, g, or t
  misc_feature (2402)..(2402): n is a, c, g, or t
  misc_feature (2413)..(2415): n is a, c, g, or t
  misc_feature (2417)..(2417): n is a, c, g, or t
  misc_feature (2443)..(2443): n is a, c, g, or t
  misc_feature (2482)..(2482): n is a, c, g, or t
  misc_feature (2530)..(2530): n is a, c, g, or t
  misc_feature (2554)..(2554): n is a, c, g, or t
  misc_feature (2556)..(2556): n is a, c, g, or t
  misc_feature (2561)..(2561): n is a, c, g, or t
  misc_feature (2619)..(2619): n is a, c, g, or t
  misc_feature (2627)..(2627): n is a, c, g, or t
  misc_feature (2650)..(2650): n is a, c, g, or t
ctttgaaggattcaatagcttccttcagaagtcctctgtgaaagaaagttaaacctttgtatagcatagctataggctggtttttnttcagttctaaggactgctgaaagtcttcatgggctgttgcatagtcctctgatatgaagtacagggttccccgatgtctgtacagccgtgctgagggctgcagttggatagctttagtgaggtcattcactgcttcattaattcgtcccagaggggacagaatttctgctcgctgctcaaatacctctggacgatctggttccaaggtaattactcggctcagttcgaacagagcaagctcagcattcttaatgtcatgtagtcccttctttccataggctatccctcggccataaattgcactaaccagatcaggctcctcctgaagcattgttgaaaaatgccgtattgcttcatcatacagaccactgccaatcaagacataagcaatagctaactcttcatttgtgctgtcattatcagtggcaaacgggaatctcttctgttctgcaatagacttggcctggctcagaatcttctcagtgttgagggaaagcaaggagtcacagggtgatgatcccttgggttcgcagtntgagtcatggaagttnaaaaaggatgactcgccgcactcggcagagtactggtccccccagtccccggactgcgggctgcagccgccgccgcccgccggggcctcctgctgctgccggtgctgcagctcctgcttgagcagggagagcggcgagtagtgctcggtggccagggcgcctggccgcagcccggcggacaggacccccagcagcagcagcagcaggacacgccgggcggcgcccgcggcggccacagcgccgccccagannnnnnnnnnnnnnnnnnnnncggcaggtgccatcttccctcaaggcgcatgtgcgacancccttgcccggctctcaggcctccccgcctctaacctacggcgggcaggtggaccgtggcaagggggcgggacaaggggagaagntttttntgntgggaaaggtagtcacagctcggccagcccgggggcccccttgccggtgccgggactacgaatcccaataagcccgcgcggcgcaagtcttccggtctggcgtctgacgtcttaccctccacagaatcggaagttctggactgcagttgagtggaaatgggcaacggcgggcggagcggcctgcagcaggggaaggggaacgtggatggggtggcagcgactcctactgctgcctcggcctcctgccagtacaggtgcatcgaatgcaaccaggaggccaaagagttgtaccgagactataaccacggtgtgctgaagataaccatctgtgtgagttgtcaggtgtggggtgcccttgagaagaaaatggcgcggcgggatttggggaccgcgaggagcagggtcctctgatacagtctttagttcggtagttgacattcccgcccgggatctttgcatgaatatctgtactgatagagaactcagctacccgacagcgcttttctcatactggggcatatttgggtgatatgacctaagccggcgaacggaccggaccgacagacagagaaatcctgccagaaacctgtagacaaatatatcgagtatgatcctgttatcatcttgattaatgctatattgtgcaaagctcaggcctacagacatattcttttcaatactcaaataaatatccatggaaaactctgcatattttgtttgctttgtgaagcatacctgaggtggtggcagcttcaagattccaaccagaatactgcccctgaagacttgttcagatatgctaaggaatgggatttctatagaatgtttgcgattgctgctttagaacaaactgcctattttattggcatttttaccttcctgtgggtagaacggcccatgacggcnnnnnnnnngcccaacttcattttgctgctgaaagcattattattatctagctacggaaaactcttgctgattcccgctgtcatttgggaacatgactacacatctgtgtgcctcaaactcattaaagtatttgttcttacatcaaattntcaggcaattagagtgcccctaaacctcnaccgtaagctcnccntcttggccgtgttgagtngcttactgctngaangcctcatggtctacctctcccngagtatggaatgggntgtnngnnncncntatnnnnnnnnnnnnnnnnnnnnnnnnnnnnnnnnnnnnnnnnnnnnnnnnnnntgtnccncnccccncnctctcnccaancncnnaccccnccnctntaacccncccnccncatttctgttgagtaaaatgangcnaagattggaaannctttctgaaaangaangcnatgatantngcggtgggttnnntncccttctaatgctcccaagagacaanctatttacatacagatattcacagtcacacatagaaacncccacatggacacaaggaatgttgctgcagagactgaatgacatgcanacaggtgaaggtttatacgttatncncaagnccaggtaagcgctcataattcacacataataaaacatctaggtttcattcctttgacntgtttatntcttctttaatttaaatgttgtnactggcttaaaattttttgttttcttacaatagaa

SEQ ID NO: 351100 - DNA, 1336 bp, Homo Sapiens
cactatgcgtctgacgttttacccttcacagaatctttagttctggactgcagttgagtggaaatgggcaacggcgggcggagcggcctgcagcaggggaaggggaacgtggatggggtggcagcgactcctactgctgcctcggcctcctgccagtacaggtgcatcgaatgcaaccaggaggccaaagagttgtaccgagactataaccacggtgtgctgaagataaccatctgtaaatcctgccagaaacctgtagacaaatatatcgagtatgatcctgttatcatcttgattaatgctatattgtgcaaagctcaggcctacagacatattcttttcaatactcaaataaatatccatggaaaactctgcatattttgtttgctttgtgaagcatacctgaggtggtggcagcttcaagattccaaccagaatactgcccctgatgacttgatcagatatgctaaggaatgggatttctatagaatgtttgcgattgctgctttagaacaaactgcctattttattggcatttttaccttcctgtgggtagaacggcccatgacggcaaataaaaagcccaacttcattttgctgctgaaagcattattattatctagctacggaaaactcttgctgattccagctgtcatttgggaacatgactacacatctgtgtgcctcaaactcattaaagtatttgttcttacatcaaaatttcaggcaattagagtgaccctaaacatcaaccgtaagctctccttcttggccgtgtcgaagtggcttactgctggaaagcatcatggtctacttcttccagagtatggaatgggatgttggaagtgattatgccatctttaaatctcaggacttctgaagagttttattcttcttcactatctgtggcatgaccagctgtatctgaaagagaaaagacatgaaatataaaccaacctcctcatttctgttgagtaaaatgaagcaaagattggaaacactttctgaaaaagaaagcaatgataatagcggtggatacccacccccacaaatgcacccaagagacaagccatttacatacagatattcacagtcacacatagaaacacccacatggacacaaggaatgttgctgcagagactgaatgacatgcaacaggtgaaggtttatacgttatacacaaggccaggtaagcgctcataattcacacataataaaacatctaggtttcattcctttgacatgtttatatctttttaatttaaatgttgttactggcttaaaatattttgtgttcttacaatagaaacgcttttaataaagtctttcagaatg

SEQ ID NO: 351101 - DNA, 1005 bp, Homo Sapiens
  misc_feature (50)..(70): n is a, c, g, or t
agcggatgggctgtcgcgcatgcgccttgagggaagatggcacctgccgnnnnnnnnnnnnnnnnnnnnntctggggcggcgctgtggccgccgcgggcgccgcccggcgtgtcctgctgctgctgctgctgggggtcctgtccgccgggctgcggccaggcgccctggccaccgagcactactcgccgctctccctgctcaagcaggagctgcagcaccggcagcagcaggaggccccggcgggcggcggcggctgcaagcccgcagtccggggactggggggaccagtactctgccgagtgcggcgagtcatccttttggaacttccatgactcagactgcgaacccaagggatcatcaccctgtgactccttgctttccctcaacactgagaagattctgagccaggccaagtctattgcagaacagaagagatacccggttgccactgataatgacagcacaaaatgaagagttagcctatgcttatgtcttgagtggcagtggtctgtctgatgaagccaatacggcatttgttcaacaattgcttcagattctgtcccctctgggacgaattaatgaagcagtgaatgacctcactaaagctatccaaactgcagccctcagcacggctggtacagacatcggggaaccctggaacttcatatcacacggactatgcaacagcccatgaacactttcacgcagtccttagaactgaacaaaaaccagcctatagctacgctatacaaaggtttaactttctttcacagaggacttctgaaggaagctattgaatccttcaaagaagctttgaagcagaaagttgactttattgatgcatataaaagtctagggcaggcatatagagaactgggcaattttgaagcagccactgagagctttcaaaaggcactgttgctcaaccaaaatcatgtgcaaaccctccagctccggggaatgatgctctaccaccacggcagcttacaggaagcccttaagaa

SEQ ID NO: 351102 - DNA, 1252 bp, Homo Sapiens
taataagcaccaccgaaaccgctgtcaatactgcaggttacagagatgtattgcgtttggaatgaagcaagactctgtccaatgtgaaagaaaacccattgaagtatcacgagaaaaatcttccaactgtgccgcttcaacagaaaaaatctatatccgaaaggaccttcgtagcccattaactgcaactccaacttttgtaacagatagtgaaagtacaaggtcaacaggactgttagattcaggaatgttcatgaatattcatccatctggagtaaaaactgagtcagctgtgctgatgacatcagataaggctgaatcatgtcagggagatttaagtacattggccaatgtggttacatcattagcgaatcttggaaaaactaaagatctttctcaaaatagtaatgaaatgtctatgattgaaagcttaagcaatgatgatacctctttgtgtgaatttcaagaaatgcagaccaacggtgatgtttcaagggcatttgacactcttgcaaaagcattgaatcctggagagagcacagcctgccagagctcagtagcgggcatggaaggaagtgtacacctaatcactggagattcaagcataaattacaccgaaaaagaggggccacttctcagcgattcacatgtagctttcaggctcaccatgccttctcctatgcctgagtacctgaatgtgcactacattggggagtctgcctccagactgctgttcttatcaatgcactgggcactttcgattccttctttccaggctctagggcaagaaaacagcatatcactggtgaaagcttactggaatgaactttttacccttggtcttgcccagtgctggcaagtgatgaatgtagcaactatattagcaacatttgtcaattgtcttcacaatagtctttcaacaaaataaaatgtcaacagaaagaaagaaaattattgatggagcacatctttcaaactacagggagttttgtaacaaccagggttaaaactctggctatgatggatacgaaatatgcctaacttgaaggcaaataataactcttcagtccaaaatccatccaaagccttagaaaactttggaaccagattggagaaattttctggagaaaggcgtttttgtgggaaattcccagaaattattttatacccaaaaccattttcccgaatgacacccccccaggggtgtttttccaaaacaaatttaaccctaagaattggcccggcctttttc

SEQ ID NO: 351103 - DNA, 738 bp, Homo Sapiens
attagtacacttgatgctgattggctggagttaactaccttttattataaacaaggcttgtctttaattgattcttttgtattctgggaaacatctaaaggggaacatttgcctaaatctttggaaggattttttatctatgaagaagaaggttctggagttccaggttctagtaggaaaggaaatgatgccatcgtagtagaacaatggactgttattgagggatgtgaaatcaaaacagattatggccctctgctgcacactctggctgaattcggatggcttctgacaagcgtgttgcccacacctgtattgagacatgacagtgaagggaatttggctacaaagcagatcgtattccttcagaggccagttatgtggaattcagctgctcaaacaccagataagaaagccagccgccacataaaaggtgaagacaagaataaagccactagtagaagcatcggattagacacaacctcgtcacaacctgcagagagcagacacctgcctgaggagtgccgcctttctccctcccgggaatgctggacaaaggagggaaggctggcacagcacaacagcttctctgggttcagcagcagtgacaacgtcctccgggaattagacgacggacagtttgatcaggaagatggagtgactcaggtcacttgtatgtgagccatgaggtgaagcaaaggaaggccctgtaaataattgttaaaatcattggcccaaccg

SEQ ID NO: 351104 - DNA, 1735 bp, Homo Sapiens
  misc_feature (925)..(956): n is a, c, g, or t
  misc_feature (961)..(961): n is a, c, g, or t
  misc_feature (1123)..(1123): n is a, c, g, or t
  misc_feature (1131)..(1131): n is a, c, g, or t
  misc_feature (1172)..(1175): n is a, c, g, or t
  misc_feature (1181)..(1181): n is a, c, g, or t
  misc_feature (1192)..(1192): n is a, c, g, or t
  misc_feature (1196)..(1197): n is a, c, g, or t
  misc_feature (1205)..(1205): n is a, c, g, or t
  misc_feature (1209)..(1209): n is a, c, g, or t
  misc_feature (1264)..(1264): n is a, c, g, or t
  misc_feature (1276)..(1289): n is a, c, g, or t
  misc_feature (1532)..(1532): n is a, c, g, or t
catcaacaagaatgatgtgccaggaacctacaaagagttacaaaacagggagaagggagttcatttgtatttgggtggagaggggaatgtggaggtagctctgagctggtcgttgaagatgagcaggattttgaagagctggggaaaaggacattcctggaggcagaaaggcagcatgtgctagaccagagggacaggaaacacccatctttttaactctcctggtcaccaatgtcttgtgtttcagaagaaagccagccgccacataaaaggtgaagacaagaataaagccactagtagaagcatcggattagacacaacctcgtcacaacctgcagagagcagacacctgcctgaggagtgccgcctttctccctcccgggaatgctggacaaaggagggaaggctggcacagcacaacagcttctctgggttcagcagcagtgacaacgtcctccgggaattagacgacggacagtttgatcaggaagatggagtgactcaggtcacttgtatgtgagccatgaggtgaagcaaaggaaggccctgtaaataattgttaaaatcattgccaactgaccttattgtattactttctctgcatttatgtaatatttttgaatttttccagacccagcctttcctctaatctatgtaaactttggcacaacctcccagacaaggaagaataaccaacatatttatacatttagaatcatgtttacacttctctcaactaaaacatctggttaaacagatgttccattcggttattacacaataatctatttcagcttctcatgaatgtacaaaagtagactttctcacaatacctggtaaggagactgaatatctcaatcagtattttacccaattagagagagttctcaggaagttacagtcttatttaagctgaaaaataacnnnnnnnnnnnnnnnnnnnnnnnnnnnnnnnnatacncacacacagctatttagtgcaaataaatatctttttcccaaatttaataattaatccacattttgtctttaactatcgcatgtttatacaaagcacgcccctatgtgttaaaatattttttgaaaaaaatcttttttatgtatctttgcttttaaagggtcntgtcaccnaccctgtactgattcattgcacataaatgttgttgctcctnnnngcctanaaatgcagacngcanngcggcgtntctngaaattcaatatgaaaagaacccataatctcaatacataaataccttagtagagngtaagatttaannnnnnnnnnnnnnaaagtccaaatactatgaagaggaaaaatatcaacttcaatttgaaactgaagtcttttacatctgtctagatttgaattctgcttttattttgacttgttaaatcctgaagaatgttgaaacctagaattttcaatctggcaggagtagaaagatgctcatagcacacgcgatatgtatgataacatattttgtttcatcttgcttttctttccccttctaatagaggtggctttgccttgnacccagcctttaacaatctttaaaattctacaaaataaaggattttcatttatctatgaaaggcttactttgaaagatgggaacctccaagttaattacaacttattctattcattgatgaattcaggcctattatatatttttatttaacattggatgttggacattgtaagatccattttaataattaaaacatcattttt

SEQ ID NO: 351105 - DNA, 674 bp, Homo Sapiens
actggtacggtccggagtatcgggatatgtcgacccacgcgtcgcgtgacgcgtgggcgctcctccgagatgacgccggggtcggtgccccgggcctgccctatcccctggctccaggactaggcgggaccgagggctgccccagacagacggacccgcggacccacagaccccgcgcccaggagaggagccgcgccgcccgccgcttggcagcccgtcacctatggtaccctctcatcccttcgacacatgccatccatgcatgcccttggcgggcctctatcctcctttcgaggccacagcacccaccgtcctgggtcaggtgttccgtctcctggactctggcttccagggggatgggctgagcttccttctggatttcctgatccctgccaagcgcctgtgtgagcaagtgcgagaagcagcctgtgctccctactcacactgcctcttcttacacgagggctggacaatctgtctgacggatgaagtagtggtccacttgagaaaccctcaaccctctcttattgcgccagggtgacttctacctccaagtggagccccaggaggagcagtctgtctgcatcatgatcaaatgcctctacctggaactctgcacagtggacaagaagcctgtccagagccagactaccctatacttttcagccaagcaa

SEQ ID NO: 351106 - DNA, 3000 bp, Homo Sapiens
atgggaaggttcctgagtcaatagcttcccacatacccatatgggcaggaagggcgtaaggtgcatcttggtgtacagacacggtgactgggccgccaggctcccaagagaagagatgaacgagcctggggtcatcctggacaaccgtgctctgggcaaagctaaggaaggcggcacagaagttcatgcacacagagggattccagccgtcacggtcattcctgacatattcaaacatcttcatggtaggaaaggtcttgagggaagagacaaaaccgtctgggttacggaagccagcaacaacattcgggacccctgggaggaatgactgagcccaccatttcaggagcttgtgtctgtagaaactcctccattggccagggctgtgcatctccttggaggtcttgagctccacatagcaggttgggggctgtgtggatggggcttgggggtctgtgcagtctacctcccctgagaagagcagagggtggcttcccaggcggctgcacacatgtactgctcaaattggtatcccaggtacataagctccccgaggaagcggtgccccgagcaagccctctgggcccgagcgttcggtgtctccacttcactcaggtatagtgttccctggaaccgggaggctgccagctgccagccctcctgccgctcatacggtgtcgtcagcagttttgtcaggtgcccccgccacgtcactatggcctctgccagccagcctggacccccctccaaccggcctcggtgttccaggagccagcacagcaggtggtccagcctttcctggacctcctcgtcccggggctggtatcgatccgggtatccgtctctgaggtcaaagttggggcctggaccgttagtggggggtgggctatagtagcgcagggctcgggcatctccatggtactggcgttgagcatccagggagaagcagcccagttccgaagggcgccggtagaaaggaaagggcccagagtagagggcagggtctgtgggcagagaaggtgctggacgaggtagtttgttccgaggctcagctacctctgtcttctcagctcctctcttggtccccctgggatccatgaggtcctaagacaagcaggggtacagagtttccattctacagaggaggcctggagaaggatgactggtttaggactaagcgagccacctgatcgccaggctctggccttgaaacattcaggcccctcagacgccaccgcggccaagctctcatcctgcctctttccttgcccttcacccaccctccctccaggtcctccaaatgcagtgaggttaggaaggacgtctgcgctcagatcaagaatccagttacctcaaagctccccaacttccacctccgcagagctatgacgtcatggcaggcacgccagaggccgaaggatgcaaaagtggttttctgctttcgatgatgcaatcattcagcgacagtggcgggcaaacccctcccggggcgggggaggtgtgagcttcacgaaggaggttgacaccaacgtggccaccggcgcccctccacgcctgcaaacgagtcccccggggcgtgcgtgcccttggagggagccaatccgcggccggcgtggggcccggcctggcggaggtgatgctggtatgtgcgtcgccaccgaccctcccagcactgacgggcctgagggacgacaagttgacgctcctttcgtcatcacctggtctaggagggacgcccagggagaccgtacgtcactgctctgcgccggaagaccctattttcaggttctcttccctccattcctaccccttccccggtaccataaaatcccgggatatgagctggaagaggcatcacctgatcccggagacctttggagttaagaggcggcggaagcgagggcctgtggagtcggatcctcttcggggtgagccaggtcggcgcgcgcggctgtctcagaactcatgcagctgttcccgcgaggcctgtttgaggacgcgctgccgcccatcgtgctgaggagccaggtgtacagccttgtgcctgacaggaccgtggccgaccggcagctgaaggagcttcaagagcagggggagatcagaatcgtccagctgggcttcgacttggatgcccatggaattatcttcactgaggactacaggaccagagtcctcaaggcctgtgatggccgaccgtatgctggggcagtgcagaaatttctagcttcagtacttccagcctgtggggaccttagtttccagcaggaccaaatgacacagacctttggcttcagggactcagaaatcacgcatctggtgaatgctggagtcctcaccgtccgagatgctgggagctggtggctagctgtgcctggagctgggagattcatcaagtactttgttaaagggcgccaggctgtccttagcatggtccggaaggcaaagtaccgggaactgctcctatcagagctcctgggccggcgggcgcctgtcgtggtgcggcttggcctcacctaccatgtgcacgacctcattggggcccagctagtggactgcatctctaccacttcaggaaccctcctccgcctgccagagacatgaagattctgctcatcattgcccagctcctcagagtgggccgggaggggactagaagagctgcatgatggtggctgagacagggtcaccttgggaaggcttgggagccaggatgagtgtcgggctctcgtgtgtgcaaaaggtcagatgtgactgctgctgtttgcctggtttctgacccagtggtggggtttgagcaatgcttctctgcccttccatggaaagtggaaccagaaatggtgccaaggctgtggctgttccctttcgtgtaaaatggtgctgttattactctgtcttgaaataggaaggtgggatttctggggaggctggtgaaggagggcagggttcttttctctacgtgtcatgttaaaattgccaaataaagtacctctgcctgtgaaa

SEQ ID NO: 351107 - DNA, 1920 bp, Homo Sapiens
ggaattcccgggatgaaaggagcgtcaacttgtcgtccctcaggcccgtcagtgctgggaggggcggtggcgacgcacataccagcatcacctccgccaggccgggccccacgccggccgcggattggctccctccaagggcacgcacgcccggggactcgttggcggcgtggaggggcgccggtggccacgttggtgtcaacctccttcgtgaagctcacacctcccccgccccgggaggggtttgcccgccactgtcgctgaatgattgcatcatcgaaagcagaaaaccacttttgcatccttcggcctctggcgtgcctgccatgacgtcatagctctgcggaggtggaagttggggagctttgaggacctcatggatcccagggggaccaagagaggagctgagaagacagaggtagctgagcctcggaacaaactacctcgtccagcaccttctctgcccacagaccctgccctctactctgggccctttcctttctaccggcgcccttcggaactgggctgcttctccctggatgctcaacgccagtaccatggagatgcccgagccctgcgctactatagcccaccccccactaacggtccaggccccaactttgacctcagagacggatacccggatcgataccagccccgggacgaggaggtccaggaaaggctggaccacctgctgtgctggctcctggaacaccgaggccggttggaggggggtccaggctggctggcagaggccatagtgacgtggccggggcacctgacaaaactgctgacgacaccgtatgagcggcaagagggctggcagctggcagcctcccggttccagggaacactataccttgagtgaagtggagacacacgaacgctcgggcccagaagctttgctcggccaccgctcctcccgggagcttatggacatggggatacaaatttgagcagtacatgtgtgcagacaaacctggaagctccccagacccctctggggaggttaacaccaacgtggccttctgctcggtgctacgcagccgcctggggaagccaccctctgctcttctcaggggaggtagactgcacaagaacccccaagccccattccaaacagtcccccaacctgctatgtggagctcaagacctccaaggagaagcactagacctgagccaagtggagacaccgaacgctacaggcccagaagcgggctcggcaccgcgacaccggaagcttgaaggacatgggaaacaaacttgagcaggacatgggtgaagacaaaactggagggtgcacgaggggtcccactgatcccttgctttccctgtcagacacaagctcctgaaatggtgggctcagtcattcctcccaggggtcccgaatgttgttgctggcttccgtaacccagacggttttgtctcttccctcaagacctttcctaccatgaagatgtttgaatatgtcagggtaagggaacgatgttgcagctcccacccgtatccccaaacaccaagaccacaggtctagcatccagggcaacagcctgccttctctcctcccaccaccccactgcccatcatatgcccacgcctttgcatgcgccagaaatgaccgtgacggctggaatccctctgtgtgcatgaacttctgtgccgccttccttagctttgcccagagcacggttgtccaggatgaccccaggctcgttcatctcttctcttgggagcctggcggcccagtcaccgtgtctgtacaccaagatgcaccttacgccttcctgcccatatggtatgtggaagctatgactcaggacctcccatcaccccccaagactccctctcccaaatagtaatgctttagagggaggcagtcatatctctgtgtgcagataataaaagcatatttctaagagg

SEQ ID NO: 351108 - DNA, 759 bp, Homo Sapiens
ccccgccccagttcctgtccgtgagccgattatctgcccaggtcggcgcgcgcggctgtctcagaactcatgcagctgttcccgcgaggcctgtttgaggacgcgctgccgcccatcgtgctgaggagccaggtgtacagcctcgtgcctgacaggaccgtggccgaccggcagctgaaggagcttcaagagcagggggagatcagaatcgtccagctgggcttcgacttggatgcccatggaattatcttcactgaggactacaggaccagagtcctcaaggcctgtgatggccgaccgtatgctggggcagtgcagaaatttctagcttcagtacttccagcctgtggggaccttagtttccagcaggaccaaatgacacagacctttggcttcagggactcagaaatcacgtgagacttgtggaaccaaccaaagtcaggcatctggtgcttccctgcctccctccagttccatccagcctgtcctcctgtttttttggtgaacctgccagaaaagctgccaaaaagctgactcttcttgttaataaaatgacccaagtttgtattcctccccacaagagaggaggcctatcttacctgggccttagaaagagccctgaaatagaattcagttcttggtggcttatcaaaagcacacaggggcctggcaggaagtgtaaaagcttgatgttaatcatactgggactaagaggatagagaatggtaggagctgggatacccctaaacattcacatta

SEQ ID NO: 351109 - DNA, 1299 bp, Homo Sapiens
  misc_feature (154)..(154): n is a, c, g, or t
  misc_feature (1181)..(1181): n is a, c, g, or t
tcccgggattgcaccgcgccgcggctccgtctccgcgggaccacagagctgggatagcgcgcgaggccctcggtcggacgggacgctcgggattcagggactgcctcggcacacgggaagttgccctacaggcgcgggagaaagcgcaggcggncggcttggcagggagaggcaggctgcagtgcacattgggtcaggcacacgcgaggggcagcccccgagggccgtcccagagtcccccgcgccgccggggtcctaacggggtgcaccgtcttccgccgcacgtggattcagcgcgatgcccaaatccaagcgcgacaagaaagtctccttaaccaaaactgccaagaaaggcttggaattgaaacaaaacctgatagaagagcttcggaaatgtgtggacacctacaagtaccttttcatcttctctgtggccaacatgaggaacagcaagctgaaggacatccggaacgcctggaagcacagccggatgttctttggcaaaaacaaggtgatgatggtggccttgggtcggagcccatctgatgaatacaaagacaacctgcaccaggtcagcaaaaggttgaggggtgaggtgggtctcctgttcaccaaccgcacaaaggaggaggtgaatgagtggttcacgaaatacacagaaatggactacgcccgagctggtaacaaagcagctttcactgtgagcctggatccagggcccctggagcagttcccccactccatggagccacagctcaggcagctgggcctgcccaccgccctcaagagaggtgtggtgactctgctgtctgactacgaggtgtgcaaggagggcgatgtgctgaccccagagcaggctcgcgtcctgaagctttttgggtatgagatggctgaattcaaggtgaccatcaaatacatgtgggattcacagtcgggaaggttccagcagatgggagacgacttgccagagagcgcatctgagtccacagaagagtcagactcagaagatgatgactgaaagggactcgggactgaaggtctcctggaagcttctgggtctcactggaccatcaggactgctgccgcccctctggagagagcagctttttatttgtctgtagacagggaacatgatgggcactgacctcctgtaaagaataaaactgtgggccgggccccgngggctcccgccctggaatccccagcaccttgggaaaaccgaggttgggcaaaatcataagggtcgggaagattaaaaccttcctggcctaacccgggggaaaaccccggcctcttctt

SEQ ID NO: 351110 - DNA, 1363 bp, Homo Sapiens
  misc_feature (368)..(610): n is a, c, g, or t
atcatctgtaggtgtgcggatagggaatgtcgacgcatcccgcgcgggaggagagacaagaagggagccgcccccccatgggcctttcaggtacaataatcttggggagtatcgcccgcgagacgggcgtaagggggattacacgcctaattttgtgggcgcaggaacgttcttgggaatgctcatacagagtaagggggagctacccaccgtgtatttaagccttccccaagggtgggtgaggatatacgtggcgtggggcccacccgcaccccgggcttccacgaaggaattttggtgagaattgttgtgtttttttggggagaacggggtcttggctctgtgccgcaggccggaatggcaatggnnnnnnnnnnnnnnnnnnnnnnnnnnnnnnnnnnnnnnnnnnnnnnnnnnnnnnnnnnnnnnnnnnnnnnnnnnnnnnnnnnnnnnnnnnnnnnnnnnnnnnnnnnnnnnnnnnnnnnnnnnnnnnnnnnnnnnnnnnnnnnnnnnnnnnnnnnnnnnnnnnnnnnnnnnnnnnnnnnnnnnnnnnnnnnnnnnnnnnnnnnnnnnnnnnnnnnnnnnnnnnnnnnnnnnnnnnnnnnnnnnnccagaggcattgtaaatgatcgtccacattagaaacaaaacgaaacgaaacaacttggaaaagtgagcaaaagccttcaatgtgttctgttctctgcctttgtgatccgaaagtcgtgctgcggtttatatactcctaggcgagggtcgcgtgctaatgatccctttcttttcaatatgcacccgcggtgggacttacagaacctttattttcaacacgtaagcagtcacgcttcctcgagcctaaggctttgtgctattcttaaatgctttcctcctccgacgctgcggctccctcctgagcccgtagctgcagcgcgttggtgaggagcgccggccctgggtgccgcccgccaccctggagggaccggtccgggggaaagtgctcgggagaagccaggggccccggctgcggtcgctggcccggggctctgcgcactccccagtgcccggaaaccgcaggctggcccagcttgcgggccgggtccgcccacgtggatgtgggaagcgcaggggacgcgggccgcccggccaaggtgcccttgccaggaaccggcgcagacacaggccctgggcgcctgcgaggaacacggccagtcccaccgcgcactgcgccgcaggggccccactgcaggtcgcacccaagaccgcgcgacgacttggtcagggcgcgccacacgtccatgtcgggtcatgatgagatcgtcacctcacacgtccgccgctggcacgtggatccgatggaccctccgct

SEQ ID NO: 351111 - DNA, 1656 bp, Homo Sapiens
  misc_feature (1382)..(1385): n is a, c, g, or t
  misc_feature (1387)..(1387): n is a, c, g, or t
  misc_feature (1403)..(1403): n is a, c, g, or t
  misc_feature (1405)..(1406): n is a, c, g, or t
  misc_feature (1419)..(1419): n is a, c, g, or t
  misc_feature (1446)..(1471): n is a, c, g, or t
  misc_feature (1476)..(1476): n is a, c, g, or t
  misc_feature (1515)..(1515): n is a, c, g, or t
  misc_feature (1526)..(1526): n is a, c, g, or t
  misc_feature (1528)..(1528): n is a, c, g, or t
  misc_feature (1530)..(1530): n is a, c, g, or t
  misc_feature (1547)..(1547): n is a, c, g, or t
  misc_feature (1549)..(1549): n is a, c, g, or t
  misc_feature (1577)..(1577): n is a, c, g, or t
  misc_feature (1600)..(1600): n is a, c, g, or t
  misc_feature (1615)..(1615): n is a, c, g, or t
  misc_feature (1619)..(1619): n is a, c, g, or t
  misc_feature (1631)..(1631): n is a, c, g, or t
  misc_feature (1652)..(1652): n is a, c, g, or t
agcggggagacagccgagcctgcggaaggcggcggcggcggcacctgcgatcagcggctggggcaggttatggtagtgcggactgcggtgtgagcagagcggccacggggcccgccatgcgccggcggccctgacatgggcgccagcgggtccaaagctcggggcctgtggcccttcgcctcggcggccggaggcggcggctcagaggcagcaggagctgagcaagctttggtgcggcctcggggccgagctgtgccccccttcgtattcacgcgccgcggctctatgttctatgatgaggatggggatctggctcacgagttctatgaggagacaatcgtcaccaagaacgggcagaagcgggccaagctgaggcgagtgcataagaatctgattcctcagggcatcgtgaagctggatcacccccgcatccacgtggatttccctgtgatcctctatgaggtgtgaccctgggaggtggcagacagaagcaccccctgccccggcaagaaactcccaggctcaatcaaggtgtggcttccattgaggagcccaggctggggccacaaccctgaataaactctgttggcccataaccttcagctgtgagcgggtcggtcccacagtattggttgggtgttggtttgtgtgtggacaagaggtggttggtgggtggtgaaggctaatggcagagttagcaccccactctcccaagccacccctgcaagcagcacagcagggcatataccagtcaggaatgcccgttacctggttccttgcctggtctgctttcttccaagtttgcctggggcctagccctgctagaggctacagcactttacaagcaaggtatgctttcttccagcccctaggctgtgggcactgtatacaagtaggaacttcctttccttcacttcccttttaacccctagtcagagcatttcagccgtttgctacctcgattcctcctgtgttggacagaggctgggggcagtgccagcctgattcttccgacctacctgccatttgttcccgccttcagatggatggacagtttgctggctattgataggagtggggactgggtgggggcttctccctctacccagggctgggctgatccccctactgcaactaactgttgccccccaaccccgaacccccagttgaggagttgagagagtgcaggctggggtcaggacaggctgcggatgcttgtgcctatggggagttactccaacccacctattctgtctaatctccatggctttgcaccaaatcctccacccctccaattgggaggggactgttcaccaccttgtggtaagggacaacaccctaaggctggtgccagtagttatgagtagcctaccaccccctannnnanagtaacccccaccccntnnggatcaatcaagngaaagcactagaacccttttttttgtnnnnnnnnnnnnnnnnnnnnnnnnnnggaanacttataatgtgaaggtttgtaaatagtccatgatgatntcgtggcagantntnatttctatatagaggtnanttttttttaagtactgtgcaagctctgngcttctataatgtgggaaatggnttggggaggatggcncctngcttaggaagantgtttgttattttttaatttnaata

SEQ ID NO: 351112 - DNA, 907 bp, Homo Sapiens
gttcctgcctggtcgctttctccaacttgccggggcactagcctgcagaggcctacagcactttacaagaaagttatgctttctccagccctagctgatggcaactgtataccagtaggaacttcctgtccggcacctccctttgaaccccctagtcagagcatatcagccgtttgctacctcgatctctcctgtgttgacagaggctggggtcagtgccagcctgagtcttccgacctacctgccattagttcccgccttcagatggatggacagttagctggctattgataggactggggactgggagggggcttctccctctacccagggctgggctgatccccctactgcaactaactgttgccccccaaccccgaacccccagttgaggagttgagagagtgcaggctggggtcaggacaggctgcggatgcttgtgcctatggggagttactccaacccacctattctgtctaatctccatggctttgcaccaaatcctccacccctccaattgggaggggactgttcaccaccttgtggtaagggacaacaccctaaggctggtgccagtagttatgagtagcctaccaccccctcccttacagtaacccccaccccttcaggatcagtcaagggaaagcactagaacccctgggtagggaaagaaaggagggaaaaaccataaaaggaatacttataatgtgaaggtttgtaaatagtccatgatgatgtcgtggcagagtctgatttctatatagaggtgactttttaatttaagtactgtgcaagctctgtgcttctataatgtgggaaatggcttggggaggatggcccctagcttaggaagactgttgtgttatttgttcaatttcaataaaatgatttgtagatcctgcaaaaa

SEQ ID NO: 351113 - DNA, 2104 bp, Homo Sapiens
ccctgcgcggcggcctgctcgtggatgacttccgcacccgaggttcgggccgcaagcagcccgggaaccccaagccgcgggagcggcggacggagtcaccccccgtgttcacgtggacttcccaccaccgggccagcaaccacagccccggaggctccaggctgctggagctgcaggaggagaagctgagcaactaccggatggagatgaaacccttgctgaggatggagacgcatccccagaaaagacgctacagcaagggcggcgcctgccggggcttgggggacgaccaccgccccgaggaccggggcttcggggtgcagagactgcggtccaaggcccagaacaaggagaacttcaggccggcctcctccgcggagcccgccgtgcagaaactggcgagcctgcggctgggcggggccgagccccggttgctgcgttgggacttgaccttctccccgccccagaaatccttgcctgtcgctctagagtccgacgaggagaatggggatgagctcaagtccagtacgggctcagcgcctatcctggtggtcatggtgatcttgctcaacatcggagtcgccattctgtttattaactttttcatctgatgagatgtcgcggtagcaaaaatagagaaagggtagaaaaaagggacattaaaattaaaagcaaaaccacaagaagggaaagaccgcaactcggacagcccagcgacttccaagtcctctcacagaagaaccacacgattgggtatcactcacagtttgcctttttttctgggtaatgttttttggattttagccaaaattctttgcttgtataacactctgctgtgtggcatggcagaaggaggccagcacgcagcccctccagctccacgtggagacagaagggatcccggcacatcagtggtaacagcggacgttgtcctcgtggtcacacgtcccgtcttgggtgtggatggagggcagcccggggcagagcctcagccccgcggcccctgagtggcagggctgactcccgtcgacacgagcttagaaagtggattcactgctttctctgtctagaacagacgggtgacaagtatgggcaggaggcatggggcagggtggcccaccccagtgggcagtagcctggcctttttctgtgtgagatctgtgctgcacacctgagggagggggagggatcggccacctcctccctgtgagacggatgcaggtccttccctcttctcggcactgcccccggccttccatgagaagccgactccccacaccgagttttaaagcaaagcccttttcttctgctgcccactcactgtgggtcccattcggctgtttcccccaccagaccccagggaagccggggcccactccgatccgcctgggctcagctaagcacggaagccaagggggctgtgccgtggagctgggctcgcgccggggctctgggtgtgtgcgcttggcgtgcagggtggacgcgtggggttccgtgtccccagcagtgagggccctagaggacgccttctcccatggttactgatctccacgggttttcacatctctgtactgtgcctgcctcaacttcccctaacagatatgcatattccttccagatgcctcagtgctacaccacagtgggcctggtcccaggacaggaatgcggttcaaacccagtggcttgaaacttcctgagaaactgtagcatatccagccccctaaaatgtacaatgtaacttgttcagtccaacaaaaacaggttccttatgtttctgccttctccaccagggtcgctccatcacccaaacaaaagaacaaggtttgccaggatgtccgagtgccccctggccctggctctcgtgtgcatggacgtgcctgaggggtccgggcacggccatacgcaggacccctgtgcccggggaggcgctgcagggattccccatccggtcgtcttggggccagcccgtcttatggactctgccttgctttgcttatgtttagctgtttctctgctacctttcgagcagacttctttactacactgcactggattgctatatttttaaccagaaataaactaaagattagagcatgttccagtt

SEQ ID NO: 351114 - DNA, 443 bp, Homo Sapiens
  misc_feature (11)..(11): n is a, c, g, or t
actccctgaanaaaactggtaacaatatccaaacccccctaaaaatgtaacaaatgtaaacttgttcaagtcccaaacaaaaaacaggttcccttaatgtttctgccctttctccaacccagggtcgctcccatcaccccaaacaaaagaacaaggtttgcccaggatgtcccgaagtgccccctggccctggctctcgtgtgcatggacgtgccctgaggggtcccgggcacggccatacgcaggacccctgtgcccggggaggcgctgcagggattccccatccggtcgtcttggggccagcccgtcttatggactctgccttgctttgcttatgtttagctgtttctctgctacctttcgagcagacttctttactacactgcactggattgctatatttttaaccagaaataaactaaagattagagcatgttccagtt

SEQ ID NO: 351115 - DNA, 1077 bp, Homo Sapiens
  misc_feature (842)..(842): n is a, c, g, or t
  misc_feature (1002)..(1011): n is a, c, g, or t
ggtccggaattcccgggatggcgagcagtctgcgcgcggatggccgcagcggcgatggcggcagcggcaggtggaggggctggcgcggcccgctccctctcgcgcttccgaggctgcctggctggcgcgctgctcggggactgcgtgggctccttctacgaggcccacgacaccgtcgacctgacgtcagtcctgcgtcatgtccagagtctggagccggaccccggcacgcccgggagtgagcggacagaagccttgtactacacagatgacacagccatggccagggccctggtgcagtccctgctagccaaggaggcctttgacgaggtggacatggctcacagatttgctcaggagtacaagaaagaccctgacaggggctatggtgctggagtagtcactgtcttcaagaagctcctgaaccccaaatgtcgcgatgtctttgaacctgcccgggcccagtttaacgggaaaggctcctatggcaatggaggtgccatgcgggtggctggcatctccctggcctatagcagtgtccaggatgtgcagaagtttgcccggctctcggcccagctgacacacgcctcctccctgggttacaatggcgccatcctgcaggccctggctgtgcacctggccttgcagggcgagtcttccagcgagcactttctcaagcaactcctgggccacatggaggatctggagggtgatgccccagtccgtcttggatgccagggagttgggcatggaggagcgtccatactccagcccgcctgaagaagattggagagcttctaggacagggcatcggtgaccaagggagggaattggtgttctgnacctagggaaatggcattgctgcccttttgagtcgggtacccaccggccatctactggcttccctacccctgcatgggagcccaaacccctgaaaatccccttctgcccttcaatagccctccacagggaactccccactttatttcccatcttcccttnnnnnnnnnnaccccagaaccccattggccccccatgggtttggggcccatttggtgggggcccctactatttggg

SEQ ID NO: 351116 - DNA, 1134 bp, Homo Sapiens
ccggtcccaggctttggggaccaggaagttcggtttcccttggtaacccttcacaaattttgtttgcccaggttttttgggcccctgatcccatccccctaggttggggcccccagcaatgggcccccagccatgggtggccatgggtgttctgtgtcccccaccaagggaggatggaataaatgagagtcctttgggaggcttatggaaaggcagaagggaatctcagggtctggctcccatgcagcgtaggaaagcagtagagggcggtgggttcccgactcaaagggcagcaatgccattcccctagctcaggacaccacttccttccctggttcaccgatgcctggtctagaagctctccaatcttcttcaggcggctggagtatggacgctcctccatgcccaactccctggcatccaagacggactgggcatcaccctccagatcctccatgtggcccaggagttgcttgagaaagtgctcgctggaagactcgccctgcaaggccaggtgcacagccagggcctgcaggatggcgccattgtaacccagggaggaggcgtgtgtcagctgggccgagagccgggcaaacttctgcacatcctggacactgctataggccagggagatgccagccacccgcatggcacctccattgccataggagcctttcccgttaaactgggcccgggcaggctcaaagacatcgcgacatttggggttcaggagcttcttgaagacagtgactactccagcaccatagcccctgtcagggtctttcttgtactcctgagcaaatctgtgagccatgtccacctcgtcaaaggcctccttggctagcagggactgcaccagggccctggccatggctgtgtcatctgtgtagtacaaggcttctgtccgctcactcccgggcgtgccggggtccggctccagactctggacatgacgcaggactgacgtcaggtcgacggtgtcgtgggcctcgtagaaggagcccacgcagtccccgagcagcgcgccagccaggcagcctcggaagcgcgagagggagcgggccgcgccagcccctccacctgccgctgccgccatcgccgctgcggcatcgcaggaattccggaccggtccac

SEQ ID NO: 351117 - DNA, 2291 bp, Homo Sapiens
  misc_feature (1654)..(1744): n is a, c, g, or t
  misc_feature (1748)..(1748): n is a, c, g, or t
  misc_feature (1754)..(1757): n is a, c, g, or t
  misc_feature (1765)..(1765): n is a, c, g, or t
  misc_feature (1902)..(1912): n is a, c, g, or t
  misc_feature (1947)..(1959): n is a, c, g, or t
  misc_feature (2229)..(2229): n is a, c, g, or t
agcagtctgcgcgcggatggccgcagcggcgatggcggcagcggcaggtggaggggctggcgcggcccgctccctctcgcgcttccgaggctgcctggctggcgcgctgctcggggactgcgtgggctccttctacgaggcccacgacaccgtcgacctgacgtcagtcctgcgtcatgtccagagtctggagccggaccccggcacgcccgggagtgagcggacagaagccttgtactacacagatgacacagccatggccagggccctggtgcagtccctgctagccaaggaggcctttgacgaggtggacatggctcacagatttgctcaggagtacaagaaagaccctgacaggggctatggtgctggagtagtcactgtcttcaagaagctcctgaaccccaaatgtcgcgatgtctttgagcctgcccgggcccagtttaacgggaaaggctcctatggcaatggaggtgccatgcgggtggctggcatctccctggcctatagcagtgtccaggatgtgcagaagtttgcccggctctcggcccagctgacacacgcctcctccctgggttacaatggcgccatcctgcaggccctggctgtgcacctggccttgcagggcgagtcttccagcaagcactttctcaagcaactcctgggccacatggaggatctggagggtgatgcccagtccgtcttggatgccagggagttgggcatggaggagcgtccatactccagccgcctgaagaagattggagagcttctagaccaggcatcggtgaccagggaggaagtggtgtctgagctagggaatggcattgctgcctttgagtcggtacccaccgccatctactgcttcctacgctgcatggagccagaccctgagatcccttctgccttcaatagcctccaaagaactctcatttattccatctcacttggtggggacacagacaccattgccaccatggctggggccattgctggtgcctactatgggatggatcaggtgccagagagctggcagcaaagctgtgaaggctacgaggagacagacatcctggcccaaagcctgcaccgtgtcttccagaagagttgatgagggctacagctgttggggctctgccaggtcccctgggaccaactacagctccaatcagaaaccctgcgcttccttgagtgtggcttcccacttttcctgcattgtggagctgactgagtacaccggtgaggctggggtctctgcaggggaggtcactggaacagcgagcaagggactggtgcctcgctggtgctgggtctctggtttgctgcagagccgtaggacactcctggctcctcagtaggacagacagacgcaggcgggtttattttggaggggtacttgtggcattttcctgtattgtcttggacatgggatgtggggaggtggaaatgatgagcagtagcatcatttctccctgttgggttttagccagtttgccagcaagcgcatcctagcagggtccccgagcagcaggttgtgtggatgaagggacaggcacttgcatccagctgatctaggtcacacctggctcttggctgccatgtggcttattaacagcttccagtggaagtcgcaataaacagtttttggtaaatctcnnnnnnnnnnnnnnnnnnnnnnnnnnnnnnnnnnnnnnnnnnnnnnnnnnnnnnnnnnnnnnnnnnnnnnnnnnnnnnnnnnnnnnnnnnnaaanttgggnnnnaaccaccnccccaacgaaaaacttttcaaaaccatttcttttggggcccccggccccaaatagggtaaaacgaaatttggttcgtagccgggtgccccaagagagaaaccgggaaagaaactaaaggcctgggtatcctcccccnnnnnnnnnnncccccccggggagggcagcgggatatcgttttctnnnnnnnnnnnnncaaactggagggttttctcgaggggccgtttttccgggactctttatcccaagaggggaggcccgcgggggggagccctcatataagagaaaatttaacgcgccgcgagccctgtgggaaaatattttcggaagaaaaattgttttaagagctcgcttctcgggcgctctttcctctggaaaatgagaaaaccccaaataataaaactgggaccaggtgctccgccccctacatgtggaacacgcccgtgctataaccgcgactttgttntgcccctgtgaggaatatacagaatattcgcgccccggagacggatacacggcggtgggggg

SEQ ID NO: 351118 - DNA, 1158 bp, Homo Sapiens
  misc_feature (979)..(1014): n is a, c, g, or t
  misc_feature (1067)..(1099): n is a, c, g, or t
  misc_feature (1137)..(1137): n is a, c, g, or t
cgagtaggtggagccgcgcgaggcggcgcacgcactccatggagcaggtggtgtttcgcctgcgcaccgcacagtccctgcgctgcgcggatgcgtccgctccggcgccggtgctcgcgggagaccgccgcgaacgctcggcgcggcgcccggctgcagctcgcgccggctgtgggggttgttagggagagcgggatgtgctgacgtatccacgcgaagacctgcggggctctcgacgcgggtaggagggaggggcctcggcgaccccccgggcccggggctccccttggccagctttgcccggtccctccctcttcaccacacgctcatgggcagagtccaccttgttccccagcagcatgagcgccacgtcgtgctgggcgtactcgtggatctcggtcagccaggcctggatgttgtcaaaggaggccttgttggtgacatcgtagagcagcagcagagcatgagcatcccggtagtaggcatgggtaacactgcggaaccgctcctgaccagctgtgtcccacatctgcagcttcaccttcacaccatccacgtccagaactttgttccggaagtcaatgcctacggtggagatgaaggtccccgccaggaaagcaccatccttgaatcgcaccagcagacaggtcttccccacacccgagtcccccaccagcatgaccttgaaggcgacgtcgtagaagtcgacaccgccgccaagcgagggccggccgggctgcaagggcccgttgggcggcgcgtcggggccggaaagcgcagtcccggagcgcgccggtcgggccccgttggcggtgggcagcgtggaggcagcgggggtgctggcccctttgctcttgggggtcttcttcctggacatggcgggcgggcgctcagtgtgctcccgctgcagccgccgtgccctgggccgtcccgcaccccgcgcccgccgagcccgacccggacccgaacccttcccctnnnnnnnnnnnnnnnnnnnnnnnnnnnnnnnnnnnnatcatccccggcccgctctcgacgaattcgagctcggccgatttggcctgatnnnnnnnnnnnnnnnnnnnnnnnnnnnnnnnnnatgcggccgccaccgcggtgagctccattcgcccatantagtcatcatccagatagggc

SEQ ID NO: 351119 - DNA, 1409 bp, Homo Sapiens
  misc_feature (1041)..(1041): n is a, c, g, or t
  misc_feature (1236)..(1237): n is a, c, g, or t
ctgctggcctggggtgtggttgaggccgggtctccgctcctgtgcccgggaagatggtgctaggtggttgcccggttagttacttacttctgtgcggccaggcggctttgctgctggggaatttacttctgctgcattgtgtgtctcggagccactcgcaaaatgcgaccgctgagcctgagctcacatccgctggcgccgcccagccggagggccccgggggtgctgcgagctgggaatatggcgacccccactctccggtcatcctctgctcttacctaatcacgccattttttaacatctctttttgatcaaacaagaaaaggcatttgggaaatgcaaagaggactgagaatactttggcttaaattttgcccccagaatcttgttgtttgcctactgaagagatgaaaccatggcagaagtagaatccttatagaaacaggaccagaaacacctcccttctccaacaaaaggttcattttggtggctgtccgtttgacctgctgtgcttcagtttaattggcttggaaaggggtcagcagggtgaaaccgaaccccagaaaacttgatgaagaaatgtcttttgcccgttttgattacgtgcatgcaaacagcgatttgcaaagaccgtatgatgatgatcatgatcttactggtgaattacagacctgatgaatttatagaatgtgaagacccagtggatcatgtcggaaatgcaactgcatcccaggaacttggttatggttgtctcaagttcggcggtcaggcctacagcgacgtggaacacacttcagtccagtgccatgccttagatggaattgagtgtgccagtcctaggacctttctacgagaaaataaaccttgtataaagtataccggacactacttcataaccactttactctactccttcttcctgggatgttttggtgtggatcgattctgtttgggacacactggcactgcagtagggaagctgttgacgcttggaggacttggggatttggtggtttgttgaccttattttgctaattactnggagggctgatgccaagtgatggcagcaactggtgcactgtttacttaaaaagagctgccattcatggcccagggaggcgggtgaaagctccgtcttctgaattcatctctacaggctcaaaactcctctttgatatcagacctgatgttattttccttcttttggagggcattttgtttggttaggaaggcttnncttggacttttggaatttcaaccccagattttacccttggcagacgggaatgaccaagcaaaaaagttgttggtgggggaaatcaaaattttggttccctttttccttcatggccccaaaaacatttaaaaggggatggtggggccgagattttaaccaaggcttgtgtgga

SEQ ID NO: 351120 - DNA, 1532 bp, Homo Sapiens
  misc_feature (1369)..(1369): n is a, c, g, or t
  misc_feature (1398)..(1398): n is a, c, g, or t
  misc_feature (1460)..(1460): n is a, c, g, or t
  misc_feature (1520)..(1520): n is a, c, g, or t
cctgaccacgcagttcttgggtctgtgctgctggcctggggttgtggttgaggccgggtctccgctcctgtgcccgggaagatggtgctaggtggttgcccggttagttacttacttctgtgcggccaggcggctttgctgctggggaatttacttctgctgcattgtgtgtctcggagccactcgcaaaatgcgaccgctgagcctgagctcacatccgctggcgccgcccagccggagggccccgggggtgctgcgagctgggaatatggcgacccccactctccggtcatcctctgctcttacctacctgatgaatttatagaatgtgaagacccagtggatcatgttggaaatgcaactgcatcccaggaacttggttatggttgtctcaagttcggcggtcaggcctacagcgacgtggaacacacttcagtccagtgccatgccttagatggaattgagtgtgccagtcctaggacctttctacgagaaaataaaccttgtataaagtataccggacactacttcataaccactttactctactccttcttcctgggatgttttggtgtggatcgattctgtttgggacacactggcactgcagtagggaagctgttgacgcttggaggacttgggatttggtggtttgttgaccttattttgctaattactggagggctgatgccaagtgatggcagcaactggtgcactgtttactaaaaagagctgccatcatggcccagggaggcgggtgaaagctccgtcttctgaattcatctctacaggctcaaaactcctctttgatatcagacctgatgttattttccttcttttggagggcatttgtttggttaagaaggcttctttggactttggaatttcaacccagattttaccttgcagacggaatgacaagcaaaaagtgttgtggggaatcaaatttgttcctttcctcatgcacaaaacataaaggatagtggcgagtttacaagctgtggatgggtttccatagtcttcctttctgtacattgctatatcttcagtcctttggagcaagtggacctaacaagttgagcaaaatgaatatttggatccatgttcctcttgtgaccctgagtcttcatgcaaggagatctgaagctgaacaatgaaaatcttcagcagaaatagaaatggccgtggattgtaatacacactgaaattctgactttctgaatttaaatgtagaataaattttaccaacttggagtactgtatgagtattttcagtagggggaataaactcaaaattatatttgttttgcagaaacctagtcatttgaaatgagccatcctattaagccctcttttgtctccattatgntccagaggcagtatatgcagtgcaataantttttcattccacttatgttttgaaagccagcggcatcagatgtgtgagttgagctattccncctggcagaattgtccaatctaaaaatcagcgtttaccagcccatgctaataaaattaanaatatccttaca

SEQ ID NO: 351121 - DNA, 658 bp, Homo Sapiens
  misc_feature (36)..(36): n is a, c, g, or t
tgggcttcaggtacctaaaacagatccaggacctgnccccaactggcctccctgagatgaacctgctggagatgtacagcctgaaggatgagatgggcaacctcaggaagttactagagtctaccccatcgccagtcgtcttctgccacaatgacatccaggaaggtaggagaaggcatctgagtctcctaacccaagatggaagagccagagcgctctggagtgagcagaacctcaccccattcccccagggaacatcttcatgctctcagagccagaaaatgctgacagcctcatgctgctggacttcggagtacagcagttataactataggggctttgacattgggaaccatttttgtgagtgggtttatgattatactcacgaggaatgcactttctacaaagcaaggcccacagactaccccactcaagaacagcagttgcattttattcgtcattacctggcagaggcaaagaaaggtgagaccctctcccaagaggagcagagaaaactggaagaagatttgctggtagaagtcagtcggtatgctctggcatcccatttcttctggggtctgtggtccatcctccagcatccatgtccaccatagatttaggtacttggactatacccgactcgctttaaagatctctc

SEQ ID NO: 351122 - DNA, 1594 bp, Homo Sapiens
  misc_feature (52)..(84): n is a, c, g, or t
gggaatgatcgactcctatgggcgcctggagtttacgcggtggcggcgcatnnnnnnnnnnnnnnnnnnnnnnnnnnnnnnnnnatcaggccaaatcggccgagctcgaattcgtcgagagcgggaggggagcggagcgcagcctggcctggggcccggtcgagcccgcgccatggcggccgaggcgacagctgtggccggaagcggggctgttggcggctgcctggccaaagacggcttgcagcagtctaagtgcccggacactaccccaaaacggcggcgcgcctcgtcgctgtcgcgtgacgccgagcgccgagcctaccaatggtgccgggagtacttgggcggggcctggcgccgagtgcagcccgaggagctgagggtttaccccgtgagcggaggcctcagcaacctgctcttccgctgctcgctcccggaccacctgcccagcgttggcgaggagccccgggaggtgcttctgcggctgtacggagccatcttgcagggcgtggactccctggtgctagaaagcgtgatgttcgccatacttgcggagcggtcgctggggccccagctgtacggagtcttcccagagggccggctggaacagtacatcccaagtcggccattgaaaactcaagagcttcgagagccagttgttgtcagcagccattgccacgaagatggcgcaatttcatggcatggagatgcctttcaccaaggagccccactggctgtttgggaccatggagcggtacctaaaacagatccaggacctgcccccaactggcctccctgagatgaacctgctggagatgtacagcctgaaggatgagatgggcaacctcaggaagttactagagtctaccccatcgccagtcgtcttctgccacaatgacatccaggaagggaacatcttgctgctctcagagccagaaaatgctgacagcctcatgctggtggacttcgagtacagcagttataactataggggctttgacattgggaaccatttttgtgagtgggtttatgattatactcacgaggaatggcctttctacaaagcaaggcccacagactaccccactcaagaacagcagttgcattttattcgtcattacctggcagaggcaaagaaaggtgagaccctctcccaagaggagcagagaaaactggaagaagatttgctggtagaagtcagtcggtatgctctggcatcccatttcttctggggtctgtggtccatcctccaggcatccatgtccaccatagaatttggttacttggactatgcccagtctcggttccagttctacttccagcagaaggggcagctgaccagtgtccactcctcatcctgactccaccctcccactccttggatttctcctggagcctccagggcaggaccttggagggaggaacaacgagcagaaggccctggcgactgggctgagcccccaagtgaaactgaggttcaggagaccggcctgttcctgagtttgagtaggtccccatggctggcaggccagagccccgtgctgtgtatgtaacacaataaacaagcttcttcttccgatccagaacctgcccc

SEQ ID NO: 351123 - DNA, 1032 bp, Homo Sapiens
  misc_feature (440)..(498): n is a, c, g, or t
  misc_feature (634)..(634): n is a, c, g, or t
ctacaccccccataaaacacaaatgctccctcaccgcccgcccccggcccggcaattccgggatgcccgtccgaagggagcggagcgcagcctggcctggggcccggtcgagcccgcgccatggcggccgaggcgacagctgtggccggaagcggggctgttggcggctgcctggccaaagacggcttgcagcagtctaagtgcccggacactaccccaaaacggcggcgcgcctcgtcgctgtcgcgtgacgccgagcgccgagcctaccaatggtgccgggagtacttgggcggggcctggcgccgagtgcagcccgaggagctgagggtttaccccgtgaggtgggaggtcaggggtcagcctctccggtgcgcggatcggggtcaggggtcagccgcggggccctcaggatgctccatgttttcgcccccctcttnnnnnnnnnnnnnnnnnnnnnnnnnnnnnnnnnnnnnnnnnnnnnnnnnnnnnnnnnnnaggtagggccggccgcgggctgagcgcgcctggtgtgggtctgcagcggaggcctcagcaacctgctcttccgctgctcgctccccggaccacctgcccagcgttggcgaggagccccgggaggtgcttctgcggntgtacggagccatcttgcaggtgagggggttgtgagcgccgcagcaccagtggctttaggggctgtcgcttacgccgatgcgggtagcattgttcccgttgcgcagttgaggacaccgaggttcaccgtctggattaacacctcattacaccggaagcctgggggcctggtatttccccaaagcttttgggaaggttgaaggcgataagaatcccttgagcaccggaggctctaaaacagccctgggaccacattagggagaccccccctttcctaaataaaaataagaccaacggcttaaagcttgtggctccagaaacccaccaggccaacttggaatcccacagtccgcaccccctcggttgggaaggacagctaaaccctccattggggcgtcc

SEQ ID NO: 351124 - DNA, 733 bp, Homo Sapiens
  misc_feature (371)..(443): n is a, c, g, or t
agcggggggcgcagcctggcctggggcccggtcgagctcgcgccatggcggccgaggcgacagctgtggccggaagcggggctgttggcggctgcctggccaaagacggcttgcagcagtctaagtgcccggacactaccccaaaacggcggcgcgcctcgtcgctgtcgcgtgacgccgagcgccgagcctaccaatggtgccgggagtacttgggcggggcctggcgccgagtgcagcccgaggagctgagggtttaccccgtgaggtgggaggtcaggggtcagcctctccggtgcgcggatcggggtcaggtgtcagccgcggggccctcaggatgctccatgttttcgcccccctcttgcgcccgnnnnnnnnnnnnnnnnnnnnnnnnnnnnnnnnnnnnnnnnnnnnnnnnnnnnnnnnnnnnnnnnnnnnnnnnntgagcgcgcctggtgtgggtctgcagcggaggcctcagcaacctgctcttccgctgctcgctcccggaccacctgcccagcgttggcgaggagccccgggaggtgcttctgcggctgtacggagccatcttgcaggtgaggggggtgtgagcgccgcagcaccagtggctttagggcctgtcgcttacgcgatgcgggtagtattgttcccgttgcgcagttgaggacaccgaggttcacggtctgagtaacacctcattacaccgaagcctgggcctgtattcccagag

SEQ ID NO: 351125 - DNA, 346 bp, Homo Sapiens
ggggtctgtacggtgaaggttgctcaaaggtctgggagcctggggggcaccagagtctcgtgaggatggtggctttagagtcaaactcaggaacaggccggtctcctgaacctcagtttcacttgggggctcagcccagtcgccagggccttctgctcgttgttcctccctccaaggtcctgccctggaggctccaggagaaatccaaggagtgggagggtggagtcaggatgaggagtggacactggtcagctgccccttctgctggaagtagaactggaaccgagactgggcatagtccaagtaaccaaactctatggtggacatggatgcctggaggatggac

SEQ ID NO: 351126 - DNA, 370 bp, Homo Sapiens
ctcattgccccagcccttcccactcctgccccagccccatcaccaccctgatagcttcctgggtgcagagtcggccattgaaaactcaagagcttcgagagccagtgttgtcagcagccattgccacgaagatggcgcaatttcatggcatggagatgcctttcaccaaggagccccactggctgtttgggaccatggagcggtgagtcaggagcctcctcagggctcctgtactcctgagctgaacctccatgccagcggatgtgtcgggggctctatccagccctccacttgagtggatctgatgtcatgggctgtcacagaacaggcttttaaatgcttgccagaggccacatgcagtgcctcatgc

SEQ ID NO: 351127 - DNA, 883 bp, Homo Sapiens
  misc_feature (425)..(772): n is a, c, g, or t
cgcacatcaaaaatttatttcttgctcatattacatgtgcatcgcggtcggcagaggggctctgctcatcacaggctatcaaggatgacagcagacccctcccttctgccgcagttacacttacaggtggactcaaggttgaatgtcaaaggcagaaagttacaacctgggaatacaggataatgcctttgtaccccccaggtagggaaagatttcttaagtgagaaacagcatcccatacagcacaactgggcactgcctactcaacagccaaggcttggccatccccactcctcagtatgggccccagaacccagggcctgggggactctgcacacaggcatgtggagaccacagaagcctgcccaatatagcgctgccaggaacagcaaagacaaaaccagagaagcctatcgcgggcaccnnnnnnnnnnnnnnnnnnnnnnnnnnnnnnnnnnnnnnnnnnnnnnnnnnnnnnnnnnnnnnnnnnnnnnnnnnnnnnnnnnnnnnnnnnnnnnnnnnnnnnnnnnnnnnnnnnnnnnnnnnnnnnnnnnnnnnnnnnnnnnnnnnnnnnnnnnnnnnnnnnnnnnnnnnnnnnnnnnnnnnnnnnnnnnnnnnnnnnnnnnnnnnnnnnnnnnnnnnnnnnnnnnnnnnnnnnnnnnnnnnnnnnnnnnnnnnnnnnnnnnnnnnnnnnnnnnnnnnnnnnnnnnnnnnnnnnnnnnnnnnnnnnnnnnnnnnnnnnnnnnnnnnnnnnnnnnnnnnnnnnnnnnnncaggtatgttgccctgggatggatgcaggcccctcacatccatccatcctcagcagcaccaaccagcccaagctgggtgggctgttgtaacttctccattactgagcaccc

SEQ ID NO: 351128 - DNA, 1248 bp, Homo Sapiens
  misc_feature (812)..(812): n is a, c, g, or t
  misc_feature (831)..(1174): n is a, c, g, or t
gccagtactataacggtcccttaggtagcgaggctgggtggcgaattcggcacgaggaacaattctaggcacatgcatgctgtgactacttgctaggtgcatgaaggctcttgccagggtggtcatggttcggtaccactacatgggggtttagagcagggactggaggttggccttgcctcctcccctccccgcatgagctgagggtccttacctgacctttttgagctgtgaccagagtttttcctcatggggtggttagaagggttgaatgagaatgatgcccatgcagtgccttggctggggtctgggccctctaacacccacctcatgggtgtcactgttttttgaacagcagaactggaaaagcccaaagatccagcaataaaggagcaaggcaaataaagctgttaccctgcaggatcagtcagcatgagccagattgtgctgcagtaacaaagatctccaacagcgcagcggctacagttggcactgcttatttcttgcttgcacctgtgggccaccgtggctggggcctgtcagacctgtgctgacgacagcctacctggacatatttctccatgctcactgaggcaggggaaaggccacagcaggccacaagtaatgtgtgtcaccccacttccatttctgtggccaaaggaagccacagagccacacctgagttccataggacggcagcagctgatcatcctatgggctggggtgctcagtatggagaagtacaagcagccacccagcgtggggctggttggtgctgctgaggatgggaggatgggaggggcctgcatccnatcccagggcaacataccnnnnnnnnnnnnnnnnnnnnnnnnnnnnnnnnnnnnnnnnnnnnnnnnnnnnnnnnnnnnnnnnnnnnnnnnnnnnnnnnnnnnnnnnnnnnnnnnnnnnnnnnnnnnnnnnnnnnnnnnnnnnnnnnnnnnnnnnnnnnnnnnnnnnnnnnnnnnnnnnnnnnnnnnnnnnnnnnnnnnnnnnnnnnnnnnnnnnnnnnnnnnnnnnnnnnnnnnnnnnnnnnnnnnnnnnnnnnnnnnnnnnnnnnnnnnnnnnnnnnnnnnnnnnnnnnnnnnnnnnnnnnnnnnnnnnnnnnnnnnnnnnnnnnnnnnnnnnnnnnnnnnnnnnnnnnnnnnnnnnnnnngacacggtgcccgcgataggcttctctggttttgtctttgctgttcctggcagcgctatattgggcaggaacag

SEQ ID NO: 351129 - DNA, 1017 bp, Homo Sapiens
tgggaaatctatgctgtccctgacatgttcaaggcctggtacccggcaatacatggtacggggtcaaggatgcgctgtgaacgtggtgacatccgtcacatccatggagcctgtgatgtctgtgctattcgtaattcctgagagacttgaaaccttccgacactttggaaactttggcttttctcctgattcaagagggagatgagggccacccattgagaaaacaaggtgtcctgtttatatgcagaggtgcagagctgtaagtagtaggctcgaccactcaccagctttactttcaggctcatgttctccgcatcatgcacagaaagagtcacaaactgcagagggagaaacctggtgagcactagtttctctgcaggaggagatgtcaggagacttttaaacagggtttctgtatctttttgggcaccaggtgtcagatgggccagtagcatcacattggggatcttgtgggtggagctggaaaaacagatgcctacggtcacccagttggctcggttatgaaggtaaatggattcacctcttctgttgacctggataaaattgctctctaacatgggaggagatacaaaaggggcatactctcctccatccaacatattttgaagatctctcggatcatgggagtgtggggtgcagagagcatcttgcttattgatcctcatggtagtcttgctggtgttcttcttcattgcgcttgcacataaacataaaaaaaactcaactcaggccgagccacagtcctctctaggagatgaagtttttaactcacttcagtttgagcttcctccttttcatgatgaaatcaacaggtggggctgaaatagatctctggagatctcctggatgtcgactacgaaaataacctccaaatagcacgtttccactcttttcacatttctttagcaggtgtttattggcagggaattccggctccttcatcgtcctcaactataagatataggagtgaagagaagggggagaaagcgggggact

SEQ ID NO: 351130 - DNA, 1783 bp, Homo Sapiens
  misc_feature (1611)..(1611): n is a, c, g, or t
tgcaggctgtacgcccgggagtatgggataccgctgctgggagacggcgggatctctttcgccatggctgccgggccgatctccgagcggaatcaggatgccactgtgtacgtggggggcctggatgagaaggttagtgaaccgctgctgtgggaactgtttctccaggctggaccagtagtcaacacccacatgccaaaggatagagtcactggccagcaccaaggctatggctttgtggaattcttgagtgaggaagatgctgactatgccattaagatcatgaacatgatcaaactctatgggaagccaatacgggtgaacaaagcatcagctcacaacaaaaacctggatgtaggggccaacattttcattgggaacctggaccctgagattgatgagaagttgctttatgatactttcagcgcctttggggtcatcttacaaacccccaaaattatgcgggaccctgacacaggcaactccaaaggttatgcctttattaattttgcttcatttgatgcttcggatgcagcaattgaagccatgaatgggcagtacctctgtaaccgtcctatcaccgtatcttatgccttcaagaaggactccaagggtgagcgccatggctcagcagccgaacgacttctggcagctcagaacccgctctcccaggctgatcgccctcatcagctgtttgcagatgcacctcctccaccctctgctcccaatcctgtggtatcatcattggggtctgggcttcctccaccaggcatgcctcctcctggctccttcccacccccagtgccacctcctggagccctcccacctgggatacccccagccatgcccccaccacctatgcctcctggggctgcaggacatggccccccatcggcaggaaccccaggggcaggacatcctggtcatggacactcacatcctcacccattcccaccgggtgggatgccccatccagggatgtctcagatgcagcttgcacaccatggccctcatggcttaggacatccccacgctggacccccaggctctgggggccagccaccgccccgaccaccacctggaatgcctcatcctggacctcctccaatgggcatgcccccccgagggcctccattcggatctcccatgggtcacccaggtcctatgcctccgcatggtatgcgtggacctcctccactgatgcccccccatggatacactggccctccacgacccccaccctatggctaccagcgggggcctctccctccacccagacccactccccggccaccagttccccctcgaggcccacttcgaggccctctccctcagtaaattcacattttccttcctcctgttacattttcccaatatcttttctattccttggaccaatcagagatgctgtagctccttggggcaaaggtactaatccctttcagcacccccactccattcccctttttaatgtaactttttccacaggaggtatttcttttttatgttggtcctgagtattttgcaaatgcacagagaaaataaaactaaactccttgttagaaactggaaaaccctcataaaacccttcttacaagtggaaatggttanaaatcgggggcggccgcctcaagagataatccctccgagggggccccaagtctttacgcggtaaccccaactttttttgggtaacaaaagtggggcccccttaatagatgaagggcccgatattattaaaaacttaagggccacttggggcccggtccgattttttaacaaa

SEQ ID NO: 351131 - DNA, 1048 bp, Homo Sapiens
ggtccgaatttccgggatctctttcgccatggctgccgggccgatctccgagtggaatcaggatgccactgtgtacgtggggggcctggatgagaaggttagtgaaccgctgctgtgggaactgtttctccaggctggaccagtagtcaacacccacatgccaaaggatagagtcactggccagcaccaaggctatggctttgtggaattcttgagtgaggaagatgctgactatgccattaagatcatgaacatgatcaaactctatgggaagccaatacgggtgaacaaagcatcagctcacaacaaaaacctggatgtaggggccaacattttcattgggaacctggaccctgagattgatgagaagttgctttatgatactttcagcgcctttggggtcatcttacaaacccccaaaattatgcgggaccctgacacaggcaactccaaaggttatgcctttattaattttgcttcatttgatgcttcggatgcagcaattgaagccatgaatgggcagtacctctgtaaccgtcctatcaccgtatcttatgccttcaagaaggactccaagggtgagcgccatggctcagcagccgaacgacttctggcagctcagaacccgctctcccaggctgatcgccctcatcagctgtttgcagatgcacctcctccaccctctgctcccaatcctgtggtatcatcattggggtctgggcttcctccaccaggcatgcctcctcctggctccttcccacccccagtgccacctcctggagccctcccacctgggatacccccagccatgcccccaccacctatgccctcctggggctgcaggacatggccccccatcgggcaggaaccccaggggcaggacatcctggtcatggacactcacatcctcacccatttcccaccggggtgggatgcccccattcaggggatgtcctcagatgcagcctttgcacacccatggccccttcatggccttaagaacatcccccaccgctggaaccccccagccctctggggggcccacccc

SEQ ID NO: 351132 - DNA, 1505 bp, Homo Sapiens
  misc_feature (101)..(129): n is a, c, g, or t
cttctgcacaacccaggatactcatgaagattgagacccaaccccatttaagagggctcttggaaagaaggcttcgagtgtgtcagctttcattttcttcnnnnnnnnnnnnnnnnnnnnnnnnnnnnntttctttttcagtgaggaatgtgcatgcctctgccttcatgatgtggggagggaggaagtcaggggttgtgggatgagacctttaaagagaagactagaaacaccttagagggaggaccttgctccctaggagtcctggagcactcagccacaaagtgcattctggggagaagcccaagcagaggtttagacagcaggtgcccatgacagatacagggctagaaccctggctccccaagctagagtgagaacccctataaagcagaccttttttgtcgctcacatatacattaatagcactgtctctgacattgacaactatttatcctctgtcttcaggctatattaactagcagaagataagaatgaacagtgggttctggtggccatctggtcaaccagatgctgctgcccagatgggcctggttcctccatggggatgccatgggatccacctgtttgcctaagctaacagcactggaggcaatcctggctgcatgaaggaggaggagatctacttggcactccagcaagtgaagctgcagaagctggggtattcaaggactcaggcaaggagcctccttagcttattgactagccttcctctgcctctctagcctcatttatcaccctcttcctgttcccactgaaaatcttgaccagtcatttggtaaaacatcaagttgaagggtttgtagaatttcctcagtctgtggatgacatctgagtcaatgcgaggatgagtccgacctttgctcttgcctaagcacctcggggcactgctgtcttctggcttctttaggcaaagggaaccccttggttttgttgaaatagaaatgcttctcagtcactacacgttttgaggcctagaaaaacctgtactttggccatttccccggcggggtcccacaatgaatcgctcaccactgacaaagaggatctgggagagggggaaatactggagccagttttccagatgcagcgcaatagatccctattcgaatggcactccaggaagcatcgatcagcccgagggtccggtttttgaaggccagcacctcaaaggtggggatctcgggtttctttgacagtgtctgcgtgtagtcagagatggccctggtcacggggtttctcaccaccacaatcagtttgatgtccttggccatggagtgaatgcgcttgggagcctcatttgtcacaaagtaacttggagtcttctccatggttatttgcccatccaaagtcttgggcatcacatttctgtaccactccaaccccttttcgtagttcctgtcgaagaagtgcggctctacgcccaccgcccgcacgtccgggtgcacgcggatcgcctccagcagcgcgcgggtccctccttt

SEQ ID NO: 351133 - DNA, 679 bp, Homo Sapiens
ggcgggggctggggtgctgggtgggggcagcagcagaggcacaggcaggggggtaggctcctcggggctctgggcctcacgcaggaagcgctggtagcgctccaggtaggatggtcgctcgggcagcaagtaatagtgggtgctgctgaccttcttgccatcccggacgatgggcaggatgcagggaccagcccgcgggccaggggcctggatcacctggggggtggcgtacttggggtctgaggcaaagctctgggtggtgggcatggtcttcccaggtgagcttgagagccggggtggcagcggggagctgccaggtggtaccagggggctgggtgtcctcgagccttgaggggacaggggctcccgcggaggcacccggggaggggaagcaggtccaggccactggctggtctcctcctcgcccgggggggctggagacagctggacgtgtgggcgcgtgggccgaggggggatgggtacccgaggaggcacctggggcttgtcgtcaccccccgggctgggagagggggccggggagccggccggagcctgcagttgcctcatgcactcctgctgtagcgcctggaagatctctgcggtctgtgcggagctgggcggcttgcccccaccctggggcgggaggaacaggttgtcctccaggggagggggcggccgc

SEQ ID NO: 351134 - DNA, 1271 bp, Homo Sapiens
  misc_feature (116)..(166): n is a, c, g, or t
  misc_feature (812)..(812): n is a, c, g, or t
gagatttgtcctggggatccagaaacccatgataccctactgaacaccgaatcccctggaagcccacagagacagagacagcaagagaagcagagataaatacactcacgccaggnnnnnnnnnnnnnnnnnnnnnnnnnnnnnnnnnnnnnnnnnnnnnnnnnnngcctgtcctagtcctctagtcctcaaattcccagtcccctgcaccccttcctgggacactatgttgttctccgccctcctgctggaggtgatttggatcctggctgcagatgggggtcaacactggacgtatgaggctcctcccttctggatctcctcctgccttgagtttcacatatatggctcctagatcctgctctaatcatcaaatcctacacctcctgatttggcagaaaagctaggcccacatggtcaggaccattggccagcctcttaccctgagtgtggaaacaatgcccagtcgcccatcgatattcagacagacagtgtgacatttgaccctgatttgcctgctctgcagccccacggatatgaccagcctggcaccgagcctttggacctgcacaacaatggccacacagtgcaactctctctgccctctaccctgtatctgggtggacttccccgaaaatatgtagctgcccagctccacctgcactggggtcagaaaggatccccaggggggtcagaacaccagatcaacagtgaagccacatttgcagagctccacattgtacattatgactctgattcctatgacagcttgagtgaggctgctgagaggcctcagggcctggctgtcctgngcatcctaattgaggtgggtgagactaacaatatagcttatgaacacattctgagtcacttgcatgaagtcaggcataaagatcagaagacctcagtgcctcccttccacctaagagagctgctccccaacagctgggggagtacttccgctaccatgggttcgctcacaactcccccttggctacccaagaggtgctctgggaagtttttttatagaagggcccaaaattcacgggaaccactggaaaaacctccgggggaaattggttctccaaagaagaagaacccctcttaagctttttgggaacagaacttaactgaacccctttccatcttcctaaatccaggccaaggggcccttggcctttctttccccccaagggataccctcccatacccccccgtggacaaaagccccgaacccccaccgggggagacaacacttcgcataactgtta

SEQ ID NO: 351135 - DNA, 872 bp, Homo Sapiens
  misc_feature (131)..(171): n is a, c, g, or t
cagcaagagattgtcctggggatccagaaacccatgataccctactgaacaccgaatcccctggaagcccacagagacagagacagcaagagaagcagagataaatacactcacgccaggagctcgctcgnnnnnnnnnnnnnnnnnnnnnnnnnnnnnnnnnnnnnnnnngcctgtcctagtcctctaggtcctcaaattcccagtcccctgcgaccccttcctgggatcactatgttgttctccgccctcctgctggaggtgatttggactccgtggtctgcgagactgggggtcaacatcgtggtacgtatgagggcccagcatggtcaggaccatctgagccagccatcttatccctgagtgtggaaacatagtgctccagctcgcgccaatcgaatattcagacagacagtgtgacatttgaccctgattggcctgctctgcagccccacggatatgaccagcctggcaccgagcctttggacctgcgacaacgaatggcaacacagtgcaactctctctgcccctctacccatgtatctgggatggacttccccgaaaatatgtagctgcccagctccacctgcactggggtcagaaaggatccccaggggggtcagaacaccagatcaacagtgaagccacatttgcagagctccacattgtacattatgactctgattcctatgacagcttgagtgaggctgctgagaggcctcagggcctggctgtcctgggcatcctaattgaggtgggtgagactaagaatatagcttatgaacacattctgagtcacttgcatgaagtcaggcataaagatcagaaagacctcagttgtctcccttcaacctaagagagctgctccccaa

SEQ ID NO: 351136 - DNA, 823 bp, Homo Sapiens
  misc_feature (140)..(180): n is a, c, g, or t
caaagaggcagcaagagatttgtcctggggatccagaaacccatgataccctactgaacaccgaatcccctggaagcccacagagacagagacagcaagagaagcagagataaatacactcacgccaggagctcgctcgnnnnnnnnnnnnnnnnnnnnnnnnnnnnnnnnnnnnnnnnngcctgtcctagtcctctagtcctcaaattcccagtcccctgcaccccttcctgggacactatgttgttctccgccctcctgctggaggtgatttggatcctggctgcagatgggggtcaacactggacgtatgagggcccacatggtcaggaccattggccagcctcttaccctgagtgtggaaacaatgcccagtcgcccatcgatattcagacagacagtgtgacatttgaccctgatttgcctgctctgcagccccacggatatgaccagcctggcaccgagcctttggacctgcacaacaatggccacacagtgcaactctctctgccctctaccctgtatctgggtggacttccccgaaaatatgtagctggcgccagctccacctgcactggggtcagaaaggatccccaggggggtcagaacaccagatcaacagtgaagccacatttgcagagctccacattgtacattatgactctgattcctatgacagcttgagtgaggctgctgagaggcctcagggcctggctgtcctgggcatcctaattgaggtgggtgagactaagaatatagcttatgaacacattctgagtcacttgcatgaagtcaggcataagatcagaagactcagtgcctc

SEQ ID NO: 351137 - DNA, 1126 bp, Homo Sapiens
  misc_feature (286)..(326): n is a, c, g, or t
atttaaggagctgttcaccagcagcccaggcagcacccccgtccccacatacaccagttcagagccaccttaaaagcaggaggcagctgtaaagtcgctggccagctagtggagtggagactgcagagggagataaagagagagggcaaagaggcagcaagagatttgtcctggggatccagaaacccatgataccctactgaacaccgaatcccctggaagcccacagagacagagacagcaagagaagcagagataaatacactcacgccaggagctcgctcgnnnnnnnnnnnnnnnnnnnnnnnnnnnnnnnnnnnnnnnnngcctgtcctagtcctctagtcctcaaattcccagtcccctgcaccccttcctgggacactatgttgttctccgccctcctgctggaggtgatttggatcctggctgcagatgggggtcaacactggacgtatgagggcccacatggtcaggaccattggccagcctcttaccctgagtgtggaaacaatgcccagtcgcccatcgatattcagacagacagtgtgacatttgaccctgatttgcctgctctgcagccccacggatatgaccagcctggcaccgagcctttggacctgcacaacaatggccacacagtgcaactctctctgccctctaccctgtatctgggtggacttccccgaaaatatgtagctgcccagctccccctgcactgagggtcagaaaagatccccaggggggtcagaaccccagattcacagtgaagccacatttgcagagctccacattgtacattatgaatcctgaatcctatgacaactttgagtgaggctgctgacaggcctcagggccctggctggtcctggggcatcctaatttgaggggggtggacactagaacatatcccttatgaccccatttctggagtcccttgccaggaaggccagggcattaaaaattcggaagaacccccgggggcctcccctttaacccttaaggaaagcttggttccccaaacaggcttggggccagaaactatctgcctaaaaagggggtttcgcttccaaaaattcccccctggcttacacaaaaggggggctcctgggcaaaaccttttttt

SEQ ID NO: 351138 - DNA, 1297 bp, Homo Sapiens
  misc_feature (243)..(307): n is a, c, g, or t
tggaccggtccggaattctctgggatttaaaagcaggaggcagttgtaaagtcgctggccagctagtggagtggagactgcagagggagataaagagagagggcaaagaggcagcaagagatttgtcctggggatccagaaacccatgataccctactgaacaccgaatcccctggaagcccacagagacagagacagcaagagaagcagagataaatacactcacgccaggagctcgctcgnnnnnnnnnnnnnnnnnnnnnnnnnnnnnnnnnnnnnnnnnnnnnnnnnnnnnnnnnnnnnnnnnaaattcccagtcccctgcaccccttcctgggacactatgttgttctccgccctcctgctggaggtgatttggatcctggctgcagatgggggtcaacactggacgtatgagggcccacatggtcaggaccattggccagcctcttaccctgagtgtggaaacaatgcccagtcgcccatcgatattcagacagacagtgtgacatttgaccctgatttgcctgctctgcagccccacggatatgaccagcctggcaccgagcctttggacctgcacaacaatggccacacagtgcaactctctctgccctctaccctgtatctgggtggacttccccgaaaatatgtagctgcccagctccacctgcactggggtcagaaaggatccccaggggggtcagaacaccagatcaacagtgaagccacatttgcagagctccacattgtacattatgactctgattcctatgacagcttgagtgaggctgctgagaggcctcagggcctggctgtcctgggcatcctaattgaggtgggtgagactaagaatatagcttatgaacacattctgagtcacttgcatgaagtcaggcataaagatcagaagacctcagtgcctcccttcaacctaagagagctgctccccaaacagctggggcagtacttccgcctacaatggctcgctcacaactcccccttgctaccagagtgtgctctggacaggttttttatagaaggtcccagaatttcatggaaaagcctgggaaaacctttagggggaaatttgttctccccagaagaaggaacccctctaagctttctgggaaccaaactacccgaggccctttcacccttttcaataaaggccatgggccttttgcttccctttcatcccagagaatccctccctatacccccacggggggaaatggctgaaatcttaggtggataggaaacctttgggtggggttggtatctgggcctttttccc

SEQ ID NO: 351139 - DNA, 992 bp, Homo Sapiens
  misc_feature (495)..(503): n is a, c, g, or t
ggtggcgcgatctgtaggggcgatacgtcgttagtacgtgctaagtgctctgagttaggtccgtagtgatctaggatcggcaagactcgtgatggaggcggatcgtgtgagtgtttcggcccgggtggccggcggcggtggggtaaattccgaagtgcctagcagcttgtgaatcgcgcacatactagttgcaggatatgtcgacgtcttgcgcgtacgctgggtcggatctcttatgtacggcggtcgggagatcgggtttatagggcgggagaggcgtggctcgggggcgcggatgttgtttggtggtatgagagagtttatttggcggggggtattagtatcgccaggggcgcggctaaatggggggtagcggggaaggggatgggtgccgcctgtacgttgggggcggcaggaaagcgtagggggagacgcctgagctggtagtgtctgccgagggcgtgttgggcgtgttcgggtgtggtctttcggatnnnnnnnnntctggagtacatgcgagtaccgcgcggatgcgaggaatgtgctagcggaagcgtgcgggccagtgggggctccgggaggggtggctaagggggtggccgtgtgtgggggagcgtccgtgggcgcgcggggtggcacccaaggggagtgagaattcgtgggggagcagccgcctcctccactcccaccctgctgggaggcacagggacacagaaggctccgctggactttcagtcatactgatggggctctggtccatgcaagcctctcccaacagtcagaataatcagtccctctgccccctgaggggctggatccctgaatgagtttttcaataaaatacaggacacacacccctagacccgcctcagtcccatcggcaggccctggttacctgaatcccggacaggtgcagagcctgcccctgccaaccccacccaaggcccagaacccagcccacaacgccttccaggcctaaaagtgcatcttcg

SEQ ID NO: 351140 - DNA, 2348 bp, Homo Sapiens
  misc_feature (1577)..(1588): n is a, c, g, or t
  misc_feature (1789)..(1940): n is a, c, g, or t
  misc_feature (1949)..(1963): n is a, c, g, or t
  misc_feature (1987)..(1997): n is a, c, g, or t
  misc_feature (2038)..(2167): n is a, c, g, or t
  misc_feature (2182)..(2191): n is a, c, g, or t
agcggaataaagtgggtgaaaggtcggcggcgccggcactgcagctggggctgagaagccaggacggcccgagaactgacagacggagtgacagacggactgaccatggccgaccagccaaaacccatcagcccgctcaagaacctgctggccggcggctttggcggcgtgtgcctggtgttcgtcggtcaccctctggacacggtcaaggtccgactgcagacacagccaccgagtttgcctggacaacctcccatgtactctgggacctttgactgtttccggaagactctttttagagagggcatcacggggctatatcggggaatggctgcccctatcatcggggtcactcccatgtttgccgtgtgcttctttgggtttggtttggggaagaaactacaacagaaacacccagaagatgtgctcagctatccccagctttttgcagctgggatgttatctggcgtattcaccacaggaatcatgactcctggagaacggatcaagtgcttattacagattcaggcttcttcaggagaaagcaagtacactggtaccttggactgtgcaaagaagctgtaccaggagtttgggatccgaggcatctacaaagggactgtgcttacccttatgcgagatgtcccagctagtggaatgtatttcatgacatatgaatggctgaaaaatatcttcactccggagggaaagagggtcagtgagctcagtgcccctcggatcttggtggctgggggcattgcagggatcttcaactgggctgtggcaatccccccagatgtgctcaagtctcgattccagactgcacctcctgggaaatatcctaatggtttcagagatgtgctgagggagctgatccgggatgaaggagtcacatccttgtacaaagggttcaatgcagtgatgatccgagccttcccagccaatgcggcctgtttccttggctttgaagttgccatgaagttccttaattgggccacccccaacttgtgaggctgaaggctgctcaagttcacttctggatgctggaagctgtcgttgaggagaaggagtagtaagcagaactaagcagtcttggagggcaaggggaggggaatggtgagatccgagccctgtgcatggacttggtgagactgttgccttaatgacatcctgcaccgtgtataacttagtgtgtcattttgaaacttgaattcattcttatcaatttaagggatcttaaaaggatttggaaatggaacaagtagcttccagaccagatactacctgtggcaagaatgctgcctaccagttaactgctggtcctaccacagtcaaagtattcctcattaaagagagaatctcaggttctcactggaggcactgtgcatattttcaaccagatcaccaggagctgagatcttcttcagtccctagccaggaatacccatttgatttccagggtgccatctaatcctgggctgtacatgtggatatggacttgaggcccacctctgtgtccaagtggattgagcatatatgcctaggaggagatagactgttaatcgttggattttgannnnnnnnnnnnatgcctgcaaataatcaaaagtaaaactggagtagcctaattttctgggagcaggtggagaactttccctcctacacagtgaggacagtcccagtctgctgggataagtgagaaagcccagggtgtaggaaggccctttttacatactcttttctcatgagagctcactattttaacaataaacaataaacgttgtttctnnnnnnnnnnnnnnnnnnnnnnnnnnnnnnnnnnnnnnnnnnnnnnnnnnnnnnnnnnnnnnnnnnnnnnnnnnnnnnnnnnnnnnnnnnnnnnnnnnnnnnnnnnnnnnnnnnnnnnnnnnnnnnnnnnnnnnnnnnnnnnnnnnnnnnnnctttgcggnnnnnnnnnnnnnnnaaaaatttttaaaaacattttttnnnnnnnnnnnccccaaaaggaaaggaaaaggggccaaagtttttcccaagnnnnnnnnnnnnnnnnnnnnnnnnnnnnnnnnnnnnnnnnnnnnnnnnnnnnnnnnnnnnnnnnnnnnnnnnnnnnnnnnnnnnnnnnnnnnnnnnnnnnnnnnnnnnnnnnnnnnnnnnnnnnnnnnnnctcaaataaaaatannnnnnnnnngggcaatttatggggaaagggggggaaatttctttagaatttcccgccgcagggggaaccccctccccaacggggttgggaagaaacctaaaattcccccgggggggattagagaaccccttggcggcccctgtggggaaataataattctcgcccc

SEQ ID NO: 351141 - DNA, 1275 bp, Homo Sapiens
ttccctggctattcctctttcctctctgctgctgcttctcctgcatcttgttcctgcttatttaaatagtctgagagtaagagtatatttctgtgaaataattataagtcagtataattgcatttggcattttttaaccacttgctcagtttggagccactgctcacctcaaacagtacaaagaaagtggttccatattttacaaacagaagagtagcatcagagccctgacctcctgtctttgggtgtaaaatggtgagaggccggtgtccggctccttcccctgtggtttgggctggtgaactgagcccaagtgtattctctggcctgggccccttccagaatcagtgcgagcgtcctgcagaggcatggccttcctgccactgcagagtgggaagcttcctgggggacctcagccagctccggggctctcatcttccactcggatctcagattggttcgttgtggatgctctggctaggctcggcggccttttccaggcttcaggcctgaacaaaacaggctgtttgctgtgaggagctagatgacaccaagacacagacacgtactcttcaccggctccttttgcttctccttcctgcaggacgtgagttatgtctggtcccaaaacccttgagtaaactagctgagccattgcaaatgaaggtacagatggattgaaacataaaattgtagcttttggtgtccttctgaagggtcagaatatgtaattatttgataaccaaggaagtcaagtcagatggctaagtagtaactttccaatatgatttctccgtggtacttcacctggtggcacttttggggggcaatgttaacaactatcacattttactcatcaagtctctttcatttcggcagtttaaagacacaactgtgggctttctgaggcgaagcccgttgggcaaacttaggtttatgtgtttggtttttccagctgacgtggaagccctgggtgggcgtcccctggctggcctggcttttgggttcaagtctgtatgtatggagtgggttggggccccaaagctttgctgctattgatttgtccccgacagcaggcaaagcctcacattgccctcaattttccccctttcatttgaaggaccagtttttcatggtacttgtcttgatctttttcatagtgttcaaatctgtatttttgtatgtagagggaaataattttctcaacactaatcgttaataactattgtattaaattgtcatgaaggaacttgtttaataaatggacgtgtaagg

SEQ ID NO: 351142 - DNA, 1356 bp, Homo Sapiens
  misc_feature (278)..(278): n is a, c, g, or t
  misc_feature (312)..(312): n is a, c, g, or t
  misc_feature (592)..(668): n is a, c, g, or t
gtttcggtgactccattaagaccccagggtgccttggggccaggtttttccaagattcgcatttgtaaagggcttctcttttagccccccaaagccctggaaagcccccctccagagattttgcatgcacgaggttcccacttggggaaagatagctttggcccatatccattcctagggcaaatccattgccagggttctcccctgggtataatgttgacatgggacaggatgatcttttgtgtgggggactaagttagcattcttagtagtgcccnccacgcatgggggcaaccaaaaaattggcccccntacaatctcagtcacctctattgaaaaccatcaaacaaaagccatggacaagaagctttaagcatcagagtcaaggtttctaatattgcaaagactaaataattccaaggggggtgggatggaaagaaagagagagagagtgtgtgtgtctgtatgtgggttgtagagatgggacacagagatgaagacaggacagacttggaactatccctgcaattaatacctggcttcccagatccctttccaagcctaaaaagatgtttttagacaaaacttgccnnnnnnnnnnnnnnnnnnnnnnnnnnnnnnnnnnnnnnnnnnnnnnnnnnnnnnnnnnnnnnnnnnnnnnnnnnnnnagctgcatgatccatctagaaatcagcagtagaccctggggaggaaagagaggatggtgcccttcttctccctactctacgtgccttggctttctcttaagacagaaggaggagccccaaggtgctctgcctcttcaaatgtcaccattgagaaggaagaagaaaacagttttgcatgaaggtagctataagaagttttctgaatggctggtggctctggtctgtctgctcccaaagccaggaaaatctgagccccagcccatgacaggttctgggtagagaagaatgggaggcgcacaggcagatcagacggggaactggtgagcccagcaggttggctaagggacactggccacagccacgggcaccctgcaggtactactggtcctcagtctccccccactccacccttgcgaggcttgcagctgctttttgacagggagagctctgaggtagaccccaaactctctgaaaaagggggctactcctctctcatccctcctaggggcccagaagacagggcatcaaaaaatcagtaagggagagagggattggaagtagatgggcagagaggcttgttaccacttttgcctgccatcctggcctcaccaattctgcccaacaaggactcaggagatcccactcccaacatcaccacctccccctaggcgtcccgatagcttggacg

SEQ ID NO: 351143 - DNA, 1075 bp, Homo Sapiens
cagaattttattcctttttaaggctgatcaccccgttgtgtgtacagaccacatcctgtcttgtccattcatctggatggacacttgtgttttttattcttgggttgtttgtccacagtggagtggcctccttgggacacaccctgagctgggtcctagagcagccagtcgcctgtggacagtgctgtgggaggcaggctgaccttggggtgcaggggtgggtccaggagggaggtgggggactgcgtggaaggagcagctcaggtctgacctccgcagtctgacagtgcctttccagtcctggggagttaggttctggtgcatttgttgaagaatctcagtctctgtgtggcttggaaagtgcccttgctgtgagctggtttgtgactgaaagtgaaacaaattatagccttgggaagctcatctggcttttagtttccattgtggccagatatgtttgttacatagtctccctgcttggctggtaagttgtgtttgttacatagtctccctgcttggctggtcagatgtgtttgttacatacgtctccctacttgttctgcagcttctgtgtttagtatacatttgagcctccttttctccttttcctacagggaaagccaccagggtgggtggcgagcctgggatcaccagagctgtgatgtccaaaattcaggtggagtcctcaggggccaggcccagcactctgtcaagagctctgcaggcgtctggcacctgccgacctctgtgtggcttccggctgctgaccacgcttccctcccctccactcagtgtccccgctgagcacccccggggcaggcactgcccctgcccttattccacagtcgtcatagtctttgcgccaaacctttggggaaggcacgctgttttccccatttccagatgaggaggccactgtccaggccatgcagtggtcaggacagacctgagtgtgggccccgcgcccacctccactcccttccttgtgttctccttgggagcagaagacaagctgtgggacctgacgcttttatttattctccaaattaagtgggaattagatcctctggggaac

SEQ ID NO: 351144 - DNA, 854 bp, Homo Sapiens
tatacggctgcgagaagacgacagaaggggctgccttcaaggaaaagcgtgcaccgtgcagcctgtgctgtgcccagggaggcctcttcagcgggattggcagttgctgtgccctgagaacaggcagaactgtgtgatccctgaatgtgaacctgaagttcaaaggacttggaaagctctggaatgtgttggtttttcccccccaaaatgggtcctaaggagggtaaagtgacttgtttcaagttgttggagcaaagtgggtctctcacggatctcggcctgagggtgtgggggagaaggcctggacagcccctcagggcagggtgtgttttcccaccagccgcagagagccaggatggacgttcctcggacggacggttttcctgcttgggaatgttcctgggctgtgagatccactcttctgggcaggtggttagcacctaacgtttttccctcacttccccccaaattcttaagtcctttggtccatttcactgcttcttttggggagggtcagattcctcaggggctcagtggcagaaccagcctgatgtcgcctccctgcccgtgagtcaccacggcccctgggcaggcgaggggagccggggtggcttgggttcctggccttggcacctccctttgggcggcgatggagcgtggctgggcggttggtacaggagccacaggcagctgcctttttggctgaggggaccctaacatcctggagtgggtggggcagggcccatggtctcctctaggtgggaggtggcaggctgaggcggcgtgggcaggacggtggatggcgggtccacagggacagccagcagctcctgcacccagtggggctccaagac

SEQ ID NO: 351145 - DNA, 1586 bp, Homo Sapiens
  misc_feature (853)..(853): n is a, c, g, or t
  misc_feature (1481)..(1481): n is a, c, g, or t
tgggtggcgaattcggcacgagggcgcagaggaggtcagctgcgggagcgtttccggggacggtgccgccatgagattgaccccgcgcgcgctgtgcagcgccgcccaggccgcctggcgggagaacttccccctgtgcggtcgcgacgtggcgcgctggttcccgggccacatggccaaggggctgaagaagatgcagagcagcctgaagctggtggactgtatcatcgaggtccacgatgcccggttcccactttcaggccgcaaccctctgtttcaggaaacccttgggcttaagcctcacttgctggtcctcaacaagatggacttggcggatcttacagagcagcagaaaattatgcaacacttagaaggagaaggcctaaaaaatgtcatttttaccaactgtgtaaaggatgaaaatgtcaagcagatcatcccgatggtcactgaactgattgggagaagccaccgctaccaccgaaaagagaacctggagtactgtatcatggtcattggggtccccaacgtgggcaagtcctccctcatcaactccctccggaggcagcacctcaggaaagggaaagccaccagggtgggtggcgagcctgggatcaccagagctgtgatgtccaaaattcaggtctctgagcggcccctgatgttcctgttggacactcctggcgtgctggctcctcggattgaaagtgtggagacaggcctgaagctggccctgtgtggaacggtgctggaccacctggtcggggaggagaccatggctgactacctgctgtacaccctcaacaaacaccaccgctttgggtacgtgcagcactacggcctgcgcagtgcnctgtgacaacgtaaagcgcgtgctgaagagtgtggcttgtgagctggggacagacccaaaaggtgaaggtgctcaccgggcacgggtaaccgtgaaaagttattcagccctaactatccctgcggcaaggcccgcggactttcctggcagaattttccgaccccgggggcttcgctggggcttccccggcatgctgggaacctcccacaggttctgggcgggggcccacccccaccgcggttgggccccttttgcccccgcaaactttggtctcggggagacacgggaaagggtacccgcgacgagccctcggggagttatttcccgacaagacctcttcctgtgaccccctcggggcgtggatgtagaagagactccacaacgacccagttttacacgccgcggggctccagatacatacctcccccgggttgtggcaaaccacgtgcgggggagcgctgtgtgagatatctcctcgggcgcacccccccgccaataacttatatcgtcggaggcgcccccagtgtgacatccccccccatgttgttacagagggacgaaaatagaaaacgcgcggggccgacaacggcgcgcaccccacaataacactctctctcacgacggtggngaagtgccgctcacacgcaccgcagcacatatactcacctcacacatcggtagtgtgggcgataatctcccgccgtgcggcggctgttgcgccgtgcgtacagcg

SEQ ID NO: 351146 - DNA, 497 bp, Homo Sapiens
  misc_feature (458)..(458): n is a, c, g, or t
ggaaattgaatgagggaggaacttgcccaacgttgggaacccccaatgacccatgaataacagtactcccaggttctcttttcggtggtagcggtggcttctccccaatcagttcagtgaccatcgggatgatctgcttgacattttcatcctttacacagttggtaaaaatgacattttttaggccttctccttctaagtgttgcataattttctgctgctctgtaagatccgccaagtccatcttgttgaggaccagcaagtgaggcttaagcccaagggtttcctgaaacagagggttgcggcctgaaagtgggatccgggcatcgtggacctcgatgatacagtccaccagcttcaggctctctgcatcttcttcagcccctgtgccatgtggcccgggaaccaagcgccacgtccgaccgcacagggggaagttcctcccccaggcggcctgngcgcggctgcacagcgcgcgcggggtcaatctcatggcg

SEQ ID NO: 351147 - DNA, 755 bp, Homo Sapiens
gaatgagtgcaggcgctatcgaggctcactttgagacaggtagatacaggaggaggaactcgtttctctcgaagacaggatcgagagacatcgggcagaacgggccgagcaagcagcgcatccggaatgagcgggagaaggagcggcagaaccgcctggctgaagagagggctcgacgagaggaggaggagaacaggaggaaggctgaggatgaggcccggaagaagaaggctttgtccaacatgatgcattttgggggttacatccagaagacagagcggaaaagtgggaagaggcagactgagcgggaaaagaagaagaagattctggctgagaggaggaaggtgctggccattgaccacctgaatgaagatcagctgagggagaaggccaaggagctgtggcagagcatctataacttggaggcagagaagttcgacctgcaggagaagttcaagcagcagaaatatgagatcaatgttctccgaaacaggatcaacgataaccagaaagtctccaagacccgcgggaaggctaaagtcaccgggcgctggaaatagagcctggcctccttcaccaaagatctgctcctcgctcgcacctgcctccggcctgcactcccccagttcccgggccctcctgggcaccccaggcagctcctgtttggaaatggggagctggcctaggtgggagccaccactcctgcctgcccccacacccactccacaccagtaataaaaagccaccacacactg

SEQ ID NO: 351148 - DNA, 841 bp, Homo Sapiens
  misc_feature (494)..(521): n is a, c, g, or t
cccccaaccatcccaatctgtggataattggatgttagcggtactcttcccacttcccaggcctggagcttggcttgtatccaagtgtatggttgctttgccttaagaggaatccctcttatttcacctgttctggaggcaccagaccttgaaaagaacatgctcaaaataaaatgttatctgttatttttgtaaactcaaagttaagatgatcaaagttctaaaattccaagaatgtgcttttagacggtctcaatctaaaagcacttcaaggggtcaaagggcaaccagcttgggtgctacctcagtgttgtagtttctgatactttatgtctttgctcaccctcatccccaaactacttgaaaagggcatttggcaccactctctgaaacaacacagtcactctagcaaagcccccaaagggccctggttttacattacatttcaaactttatttgctttggggttttgtttctgttgttgttcaaatgcnnnnnnnnnnnnnnnnnnnnnnnnnnnnggtgactcacattgttacacatgctttaaaatatgtattcaaatgttattaaccacaatgacgacctgctttgatttaaccaagaagacggctgcggagcctagcagactcaggcctgtgggaatgggatttgttacaaatctaggtttgttactggcttcagaaagctaattaagtgctctgaaaaagacaccgtttcttgaaacaaagatggttgtattcctcactttgatgttgttttgcaagatgtttgtggaaatgttcatttgtatctggatctctgttatgtgccatttttcttctagcatcgagatacaata

SEQ ID NO: 351149 - DNA, 1159 bp, Homo Sapiens
  misc_feature (292)..(320): n is a, c, g, or t
ggctagtacgaggactgggtgtttaatcggccgagggggagctcgggagggttcagctgccacgtgagttctgcggccgctgctacacgcctggtgggcagcatgtcggcaacagcggctgctcgtaagcggggaaagccggcctctggggccggggctggcgcgggggccggcaagcggcggcgaaaggccgactctgcgggggacaggggcaaatccaagggtggcggcaagatgaatgaggagatctccagcgactctgagagcgagagcctagctccaaggaagcctnnnnnnnnnnnnnnnnnnnnnnnnnnnnnaactgcacaggaaaagaagctgcgcttggccaagctctacctagagcagctccgtcagcaagaggaggagaaggctgaggcccgtgcatttgaggaggaccaggtggcggggcgcctgaaggaggatgtgcttgagcagaggggcaggctgcagaagttggtggcaaaagagatccaggccccagcctcagctgacattcgcgttttacgggggcaccagctctctatcacatgtttggtcgtcacccccgatgactcagccatcttctctgctgccaaagactgcagcatcattaagtggagcgtggagagtggacggaagctgcatgtgattcctcgagccaagaagggtgccgagggaaagccccctggccacagcagccacgtcctctgcatggccatctcctccgacggcaagtaccttgcctctggtgaccgcagcaagctcattctcatttgggaggcccagagctgccagcacttgtacaccttcacaggacaccgggatgcagtgtcgggtctggcattccgcagaggcacccaccagctctacagcacatcccacgatcgctccgtgaaggtgtggaatgtggcagagaactcctacgtggagacgctcttcggacaccaggacgctgtggctgcactggatgccttgagccgggagtgctgtgtgacggctgggggccgggcatgggactgtacgtgtgtggaagatccccgtaggagtcgccagtcgttgtcttctatggccaccaggggtccatcgactgcatccagcctaatcaatgaggagcacatggtgtccggcgcggacgatggctctgtggccttgtggg

SEQ ID NO: 351150 - DNA, 1628 bp, Homo Sapiens
agcggggctggaagcgagcaccccgggagctgactggctccgccattcgcgggaaggcgtttgtggtgccagagaaaagtagccagagcggcgcagtggcggccgcgttctgtggttttccgctattcccccagacccgcaccttctcggcctctttgcggagaatcgtgaccaagatgtggaacagtggattcgaaagctatggcagctcctcatacgggggagccggcggctacacgcagtccccggggggctttggatcgcccgcaccttctcaagccgaaaagaaatcaagagcccgagcccagcacattgtgccctgtactatatctcagctgctttctgccactttggttgatgaagtgttcagaattgggaatgttgagatttcacaggtcactattgtggggatcatcagacatgcagagaaggctccaaccaacattgtttacaaaatagatgacatgacagctgcacccatggacgttcgccagtgggttgacacagatgacaccagcagtgaaaacactgtggttcctccagaaacatatgtgaaagtggcaggccacctgagatcttttcagaacaaaaagagcctggtagcctttaagatcatgcccctggaggatatgaatgagttcaccacacatattctggaagtgatcaatgcacacatggtactaagcaaagccaacagccagccctcagcagggagagcacctatcagcaatccaggaatgagtgaagcagggaactttggtgggaatagcttcatgccagcaaatggcctcactgtggcccaaaaccaggtgttgaatttgattaaggcttgtccaagacctgaagggttgaactttcaggatctcaagaaccagctgaaacacatgtctgtatcctcaatcaagcaagctgtggattttctgagcaatgaggggcacatctattctactgtggatgatgaccattttaaatccacagatgcagaataactggatctaactgggtacctgagatattttacagctggacctagtttcacaatctgttgtctccagctctgcatatgtctggccagggggcttctaggaagtaggtttcatctatcaaatgtctcctctgacttccttttgaaacttactgctcttctgttttattttgttttgtttgaagctcagagggagatgggcaattgacagggatgcaatccagggtgggatttcttgaggaagttacaaataagcttgttacaacatcaagatagatggaattggaaggatgctaccaggagagtacttacatagtgctcaggagtttctcttcttaaaatgtttactgctgaaagatgagcaggaccagggcgttataggcagagccctagccgagaaacctgctggcctctgcctgttttcatttcccactttggttgtgtggcattactttcagaattgcactttcctgcttgtcatgactttttgacacacttgccatgacgtgtgtttctgtgaacatgaagttctgcggtagtgcctccaggggcagaggaaaagaagaagtgttactgcattttgtacaaaataaatacagtcatatgtttaataaaacagttctattgtagtaacttgtaaaaa

SEQ ID NO: 351151 - DNA, 648 bp, Homo Sapiens
cctgttgggcctttgccttagtaaccaaggtgtgccatttgatccacttccaagaaatatgtgtggtggaactccatttcatatcctccaggggcatgatcttaaaggctaccaggctctttttgttctgaaaagatctcaggtggcctgccactttcacatatgtttctggaggaaccacagtgttttcactgctggtgtcatctgtgtcaacccactggcgaacgtccatgggtgcagctgtcatgtcatctattttgtaaacaatgttggttggagccttctctgcatgtctgatgatccccacaatagtgacctgtgaaatctcaacattcccaattctgaacacttcatcaaccaaagtggcagaaagcagctgagatatagtacagggcacaatgtgctgggctcgggctcttgatttcttttcggcttgagaaggtgcgggcgatccaaagccccccggggactgcgtgtagccgccggctcccccgtatgaggagctgccatagctttcaaatccacggatgctacgcttgttcctgtctcctctgcccatgctccagaaaacgcgtactgcgctcccagttggctccaaaagcctccgcggccatctttacgaagggcaaaaccctccgcactagcccc

SEQ ID NO: 351152 - DNA, 742 bp, Homo Sapiens
ttcattggctgttaaatgagtccctttgcatactcactggagagaggaaatgctttaagttgtcctaagataacatctgcacacagagagtttatctgattccttatcaaccatgatctctatctgaggtcctgtatagtgggatcatttagagatgggggttagggagagtaggagtaactctagagaaaattgtggctcctaaaggaggcagatctttccaaggtggaaaggtaatgaattaaatatatgacatgtaatactgaaaaaatagaaaaatgactaagatacagtctctgtcctctagaactagggcagcctggaaacatatggactataattattttagctatttaaaagaaatgaatgaagaggatcttgagacaggaccagagcattggaatggttgtagggactgaaagctgagttggaaggatcagatcaaagagaaagctgggttggacttacacaagaataccctgatctgatcgcagctgtgactccaaggttttcctttcccatagttgctgtgaccccattggtcaccagagcaactgcatgtcttcaggctgggtattagggctggctgggtctgatgattctacccattttgtgccatctgaggagcatgcgagggttctttctccaaggcactttcggccttccttcttctccccttccgccatctccactggacataagccaatgcctgctctcttctcaccacattcaactggacaaa

SEQ ID NO: 351153 - DNA, 1746 bp, Homo Sapiens
  misc_feature (510)..(518): n is a, c, g, or t
  misc_feature (1535)..(1535): n is a, c, g, or t
cctggtacggcccggaattacgggatatctgtcgaccacgcgtccgatgggaggatgctcagggtattggggtcagggtggcattagcccagctcaagccgggccgggctgactcagcatcctgccccagccagcttccatccctgacacctctgcactcccttgggcagagatgggagatggcgccggtgttgcccctggtgctgcccctgcagccccgcatccgcctggcacaagggctctggctcctctcctggctgctggcgctggctggtggcgtcatcctcctctgtagtgggcacctcctggtccagctaaggcaccttggcaccttcctggctccctcctgtcagttccctgtcctgccccaggctgccctggcagcgggcgcggtggctctgggcacaggactagtgggtgtaggagccagccgggcaagtctgaatgcagctctataccctccctggcgaggggtcctgggcccgctgctggtggctggcacggctggtnnnnnnnnnctcctggtcgtcgccctcgggctagccctggctttgcctgggagtctggatgaggcgctggaggagggcctggtgactgccttggctcactacaaggacacagaggttcctgggcactgtcaggccaaaaggctggtggatgagctgcaactgaggtaccactgctgcgggcgccacgggtacaaggattggtttggggtccagtgggtcagcagccgttacctggatcccggtgaccgggatgtggctgaccggatccagagcaatgtagaaggcctatacctgactgatggggtccctttctcctgttgcaacccccactcaccccggccttgcctgcaaaaccgtctttcagactcctacgcccacccctgttcgatccccgacaacccaaccaaaacctctgggcccaagggtgccatgaggtgctgctggagcacttgcaggacttggcaggcacactgggtagcatgctggctgtcaccttcctactgcaggctctggtgctccttggcctgcggtacctgcaaacagcactggaggggcttggaggggtcattgatgcgggaggagagacccagggctatctctttcccagtgggctgaaagatatgctgaaaacagcatggctacagggaggggttgcctgcaggccagcacctgaggaggccccaccaggagaagcacctcccaaggaggatctatctgaggcctagaggcctggagcttggggtgaggaagagggagggatggacaagtctgaaaacctcacaactccttaccaaggctccaggttggggggatcgtaggattagaggggctaaggatagtcagcgagctggactggggtaagaaagaaaaccagatgtcctagggcctagcccttgtagtcagaaccaccagggaacagcaaagaacagagtgatgggaaagtgacatgagaaggcctggaggctgattctgatatagactcaataaagtttttggactgggacaacacacgaaacaacagaaaancaagggggggtcaccgccataaagattttaccccggggaggccaacgactacgcgcccacagatccatggacaaggggccaaacaaggcagccggatatagcaaaagcaggcggcacttaaagagcggcgcggggaacggaagcgggacgggacggacacctgggcgagaccgtgcactccaagaatacccatgaatgtaaatcacgctag

SEQ ID NO: 351154 - DNA, 984 bp, Homo Sapiens
cttgaggctcggctgaggatgccgggaagggctggtggtcgggggcctagagcggcggttgcacttagttgcggctgctgtcaccatgtcccgcgttttggtgccttgccatgtgaaaggctccgtagccctccaggtgggcgacgtgcggacctcccaaggccggcctggcgtgctggtcatcgatgtcaccttccccagcgtcgctcccttcgagttgcaggaaatcacgtttaagaattactacacagcttttttgagcatccgtgtccgtcagtacacctcagcacacacacctgccaagtgggtgacctgcctgcgggactactgcctaatgcctgacccacacagtgaggagggagcccaggagtatgtatcgctgttcaagcatcagatgctgtgtgacatggctagaatatcggagctacgcctgattctgcggcagccatcaccactgtggctgtctttcacagtggaggagctgcagatctatcagcagggaccaaagagcccctccgtgacctttcccaagtggctctcccacccagtgccctgtgagcaacctgcactcctccgtgagggtctcccagaccccagcagatgtgggcactgacagagatgatccgggccagtcacacctccgcaaggatcggcgctttgatgtggatggctgttatgacctgaacttgctctcctacacttgaatggttgctcctagccaaagatgttggctttcctgtgcccacccagacttggttttgggccaacagaagcttgaagtgtatttccctgtgccattccccagtggttgcctgcattgcctgttcctgtcttgggccaccattcaccgattccaggatccccaggggcttacccgtgtttactttaggcatgagctcccgggcatggggggtgcctggcttgcccttggtgtactccatctttccttttacccaaaacttccgcaggtggccctcgcggaca

SEQ ID NO: 351155 - DNA, 773 bp, Homo Sapiens
  misc_feature (29)..(29): n is a, c, g, or t
cctctggtggcccagacccaagtctggtngggcacagaaagccaacatctgggctaggagcaaccattcaagtgtaggagagcaagttcaggtcataacagccatccacatcaaagcggccgatccttgcggaggtgtgactggcccggatcatctctgtcagtgcccacatctgctgcacctcggaggataccctgctggggtctgggagaccctcacggaggagtgcaggttgctcacagggcactgggtgggagagccacttgggaaaggtcacggaggggctctttggtccctgctgatagatctgcagctcctccactgtgaaagacagccacagtggtgatggctgccgcagaatcaggcgtagctccgatattctagccatgtcacacagcatctgatgcttgaacagcgatacatactcctgggctccctcctcactgtgtgggtcaggcattaggcagtagtcccgcaggcaggtcacccacttggcaggtgtgtgtgctgaggtgtactgacggacacggatgctcaaaaaagctgtgtagtaattcttaaacgtgatttcctgcaactcgaagggagcgacgctggggaaggtgacatcgatgaccagcacgccaggccggccttgggaggtccgcacgtcgcccacctggagggctacggagcctttcacatggcaaggcaccaaaacgcgggacatggtgacagcagccgcaactaagtgcaaccgccgctctaggcccccgaccaccagcccttcccgg

SEQ ID NO: 351156 - DNA, 449 bp, Homo Sapiens
ctagaggatcacccctgggtctagccagcctgggtctacaagcctgtgttggacactagagccattcacacatggttcttacctagggtgagggcttacctcacggaggagtgcaggtagctcacagggcactgggtgggagagccacttgggaaaggtcacggaggggctcttcggtccctgctgatagatctgcagcatcctacactgtgaaagacagccaacagtggatgaatggctgccgcagaatacaggcgtagctcccgatattctagccatgtcacacagcatctgatgcttgaacagcgatacatactcgctgggctccctcctcactgtgtgggtcaggcattaggtcagtagtcccgcaggcaggtcacccacttggcaggtgtgtgtgctgaggtgtactgacggacacggatgctcaaaaaagctgtgtagtaatt

SEQ ID NO: 351157 - DNA, 1218 bp, Homo Sapiens
tggggttgcagaaattggtccggtcggcgcacgtagtgccacgagctgggttgcgggccagcaggatggagaagtgaccatggctgcgctgcacgcgccttgctgcaggctggcgctcacagtgtcgcgcacgcgcgccgccaagggcaggcaccgtgccgcccccatcaggaagctggggtctcgtgccatgagctgcagcaggttgtcggtgatgcgctctgagcccgagagtaggcgccgcaaatcatagttctgcttctgctggaagatgtggctacagtgcgcaccggtaagaaggcttaggatctggtagtagatgtagagcagctcctgcgccagctcttgtgccgactgccgcgtacgagccaccgccactagcaccagcgggctccggcgcacgaatactaccttgtagccatctgcatggatggagcggatggcgttcttgtctgcctccaggaaggacaccagggccaccataacacccatagtgctggaaagtgcctcctcagacccatagacgggagtatcacaggcttccctgcctcactcagcacaaagacatgcttctggtgcagggcgccatgcctccgtggcatcctcctcatccccctcggttgtgccctccctggggggctctgtggctggtcgcccaactgcccctgggggttccagccaatcctcagagcttcctggcagcatctcctcctgcaggtcccgggccacacccgtcagcctgggtgcttagctcgctaaagtcctggctgatctggcgcatcgtctgtaggcagcggcgggggacccctggtaccctccttgtggctgtccccagaagctgccccatcctctgactcagtcaggtcctcgtaggaacgggcatcggacgaacatggcaccctcctggcccgcacctggctccattccctgggccattcctggtgtcggggctctcagctctctccatactctgtccatcagaaggagtcaatgtgccatcaaggcattcgctgcttctcttcctctgcatgtcagtagccatcctttgagctctcctggccactgccccctaccggatctcgccctcccagccaaggatgggttccagatctcgccttttgtattccccagctggggactagccggctgagggaccgcagggagacacagtcttcccattgcaaacgatagcgttgatggctgaggcccccgtcttca

SEQ ID NO: 351158 - DNA, 832 bp, Homo Sapiens
ggcctgggtggcgaattcggcacgagggctgggccttggccgcgagaggccggcgaaagctatcttcctgcaccggcggccgggtgagggcggtgggagggagcggtgcctgcgctgtggccatgtctgtgtacgcagggggccggggccccgcgaagctgtgccctcaggccggccccggccggacacccttacccctccatgggtccggcagagggcagtgaccggcaccttctgtgcgtcctggactcctctgagaaacaggagagctcaaaggatggctactgacatgcagaggaagagaagcagcgaatgccttgatggcacattgactccttctgatggacagagtatggagagagctgagagccccacaccaggaatggcccagggaatggagccaggtgcgggccaggagggtgccatgttcgtccatgcccgttcctacgaggacctgactgagtcacgaggatggggcagcttctggggacagccacaaggagggtaccaggggtcccccgccgctgactacaagacatgcgccagatcagccaggacttaagcgagctaagcacccagctgaacgggtgtggcccgggacctgcaggaggacatgctgccaggaagctctgaggattggtggaacccgcaagggcagtgggcgacaagccacaaaagccccccagggaggggcacaaaccgagggggatgcggaggatgccacgggaggcatgggcctggaccagaagcatgtctttgtgctgattgaggcagggaaacctgtgtactccagatatgggtctgaagagaggaacttccagactatggtgaa

SEQ ID NO: 351159 - DNA, 978 bp, Homo Sapiens
ccatgtttagtatttgagcattggttaaatgctaaagaaaaatcgccgttaaagcagttttctttttcactgtctttttcttttcgcggggaacccagctgttcctgcgagggccacctcctcaggaagaccccgcagctctcccgcggcgcttctgcaggaggcagcgacagtttcgagaacccgggccttcccctcccagtgcctccgggggttccggcgtttcatggcgctgctgttttccgggaagggcaggcgcgctgggccttggggagctgcgctcggcgggcggacgcgggggatcatggaagctgataaagatgacacacaacaaattcttaaggagcattcgccagatgaatttataaagagatgaatcaagaatagagggactaattgatgaagattacaagagaagacaatattcaactaaagaaggagatccaaaagcttgaaagcggagttacaagaggctaccaaagaattccagattaaagaggatattcctgaaacaaagatgaaattcttatcagttgaaactcctgagaatgacagccagttgtcaaatatctcctgttcgtttcaagtgagctcgaaagttccttatgagatacaaaaaggacaagcacttatcacctttgaaaaagaagaagttgctcaaaatgtggtaagcatgagtaaacatcatgtacagataaaagatgtaaatctggaggttacggccaaaccagttccattaaattcaggagtcagattccaggtttatgtagaagtttctaaaatgaaaatcaatgttactgaaattcctgacacattgcgtgaagatccaatgagagacaaacctgaagctgaactttttcaagtccccaaatggaagccgaaaaggtggaccgcgctggactatgaaccgaccgtcccggggagtggcagcccttcacgtttgtgggacatttggaattggcttgaaaaaaatttttg

SEQ ID NO: 351160 - DNA, 1751 bp, Homo Sapiens
  misc_feature (146)..(329): n is a, c, g, or t
  misc_feature (1151)..(1151): n is a, c, g, or t
  misc_feature (1155)..(1155): n is a, c, g, or t
  misc_feature (1160)..(1160): n is a, c, g, or t
  misc_feature (1175)..(1176): n is a, c, g, or t
  misc_feature (1181)..(1181): n is a, c, g, or t
  misc_feature (1185)..(1185): n is a, c, g, or t
  misc_feature (1187)..(1206): n is a, c, g, or t
  misc_feature (1297)..(1297): n is a, c, g, or t
  misc_feature (1330)..(1330): n is a, c, g, or t
  misc_feature (1343)..(1343): n is a, c, g, or t
  misc_feature (1345)..(1347): n is a, c, g, or t
  misc_feature (1352)..(1352): n is a, c, g, or t
  misc_feature (1358)..(1358): n is a, c, g, or t
  misc_feature (1362)..(1362): n is a, c, g, or t
  misc_feature (1369)..(1371): n is a, c, g, or t
  misc_feature (1373)..(1373): n is a, c, g, or t
  misc_feature (1382)..(1384): n is a, c, g, or t
  misc_feature (1401)..(1401): n is a, c, g, or t
  misc_feature (1404)..(1404): n is a, c, g, or t
  misc_feature (1428)..(1428): n is a, c, g, or t
  misc_feature (1442)..(1442): n is a, c, g, or t
  misc_feature (1476)..(1476): n is a, c, g, or t
  misc_feature (1488)..(1488): n is a, c, g, or t
  misc_feature (1490)..(1490): n is a, c, g, or t
  misc_feature (1495)..(1521): n is a, c, g, or t
  misc_feature (1523)..(1523): n is a, c, g, or t
  misc_feature (1525)..(1525): n is a, c, g, or t
  misc_feature (1545)..(1545): n is a, c, g, or t
  misc_feature (1549)..(1549): n is a, c, g, or t
  misc_feature (1551)..(1551): n is a, c, g, or t
  misc_feature (1555)..(1556): n is a, c, g, or t
  misc_feature (1558)..(1559): n is a, c, g, or t
  misc_feature (1562)..(1562): n is a, c, g, or t
  misc_feature (1570)..(1570): n is a, c, g, or t
  misc_feature (1572)..(1572): n is a, c, g, or t
  misc_feature (1595)..(1595): n is a, c, g, or t
  misc_feature (1602)..(1602): n is a, c, g, or t
  misc_feature (1605)..(1605): n is a, c, g, or t
  misc_feature (1613)..(1613): n is a, c, g, or t
  misc_feature (1621)..(1621): n is a, c, g, or t
  misc_feature (1632)..(1632): n is a, c, g, or t
  misc_feature (1652)..(1652): n is a, c, g, or t
  misc_feature (1658)..(1658): n is a, c, g, or t
  misc_feature (1664)..(1664): n is a, c, g, or t
  misc_feature (1668)..(1668): n is a, c, g, or t
  misc_feature (1671)..(1671): n is a, c, g, or t
  misc_feature (1684)..(1684): n is a, c, g, or t
  misc_feature (1706)..(1706): n is a, c, g, or t
  misc_feature (1708)..(1708): n is a, c, g, or t
  misc_feature (1720)..(1720): n is a, c, g, or t
  misc_feature (1737)..(1737): n is a, c, g, or t
  misc_feature (1741)..(1742): n is a, c, g, or t
gtaaaaagaaaaagattgagcaaactcctgaatttgcaattttgaatgctttatctccaccttctatcaactgctttgagtaaataaaatttggaagtccacatttcttccctaactttctgaaagccagcatagcatggtggccnnnnnnnnnnnnnnnnnnnnnnnnnnnnnnnnnnnnnnnnnnnnnnnnnnnnnnnnnnnnnnnnnnnnnnnnnnnnnnnnnnnnnnnnnnnnnnnnnnnnnnnnnnnnnnnnnnnnnnnnnnnnnnnnnnnnnnnnnnnnnnnnnnnnnnnnnnnnnnnnnnnnnnnnnnnnnnnnnnnnnnnnggctcataccgtgggatatatgtttacaatagttatcaataagcaaataagtgaaaatatgccgcacaaagtgattacaatggaattattgcttttatcatgtaaatgataactttggtcttcctgttatttaacatgacttaacattctacaggagtgggaatagctttgcgaaaaatgggcgcaatggccaagccagattgtatcatcacttgtgatggtaaaaacctcaccataaaaactgagagcactttgaaaacaacacagttttcttgtaccctgggagagaagtttgaagaaaccacagctgatggcagaaaaactcaggtccagtcgtgaccatgttatgaaatcacagaagcttctagaatgataggctgtatcaataacattttactgtttataggcaagaacttaatgaaaaagttattttatgaattgaattttgtcaaattagcaaaagtatcaacttcatcatagaattggcatcttttattagctactaggttgaaaaccacaaactattgtgaataaaatcaatatgggttaatgaagtagactcagaaaggagaaggtgaaacaaatgttgattaaggaggttatgagtcatggaaactcttgtaatgtacttggaagattaaaacgtttactttgttttttgcagactgtctgcaactttacagatggtgcattggttcagcatcaggagtgggatgggaaggaaagcacaataacaagaaaattgaaagatgggaaattagtggtggtaagtgtcaaactgctgtgtctcagtcagcttcttgtgtgcattctttgttcacntgtntgttntttttcattgatcannaacanaacncnnnnnnnnnnnnnnnnnnnnaaaataacaagttaaatactagaacactaattattaagaaagtcctagtggagatagagaagtgaaaagaacaataggagaggatttggcnggagttggggggaagaactagcatcgcagccangacacagagaaancnnnaaaancccccnaacngcacacnnncnccaaaaccnnnaaaataaggaatatttnccntaaccaaaagaataaagatatatncaacacattagttntctgtaaaacatgcatattataagcaaaacaacngcctctggcgtntngcaannnnnnnnnnnnnnnnnnnnnnnnnnncngngtaggaaggggatggcgggntggngngggnngnngantctaatgntntaataccgcgacgggtcgggaangtaaggntancctaaggnttttaatntctttccgtcntctaggagtgtgtcatgaanaatgtngcctgnacgnggngctatgaaaaagnagaataaaaaggcggggggggncnttggacgggagntaattaagagaatgacnaagnncagtacaat

SEQ ID NO: 351161 - DNA, 1363 bp, Homo Sapiens
cgccgacgcagacccctctctgcacgccagcccgcccgcacccaccatggccacagttcagcagctggaaggaagatggcgcctggtggacagcaaaggctttgatgaatacatgaaggagctaggtgaggcacccggcctggcagcgcctgcaacgtggcgtgttgtgcggtcgtctgtccctaggtccccggcaacgtgccagattctggggcaggagatgctcggcggcctacccccatcccctcccatcttccccaccacgcggccgttgggtgcagcgcgcgcacaccacgcgggcaggcggcgaggagcagggagcgtgcgcgcctcttgcccgcccgcgggccgcaagattccggaggtggtccaccccgtggtccacctacctctgcttctttcccttcgcccaaacggcagcccttccgcattgcttcctgtcctttagcgcgcgcacccgtcacctcacgctgcacttctttcgaccccctccaggcgaccctgtatttcccttttttccccctttactcatccttccccttcctgccaccattctgtctctcccatttaccccatcgtggcagcacccacttccctttccctccctgtcgcatcttttgttccctgtggcgcgcaggtcaccctccgttttcttcatggggacgcggtgctggcgcgcagtttcccgcagaaatcctgtggaggggtctgagtggcgctacagcttcagcttgcattcctctgtcagccccgtctcccccaggtcctctgctcgcccttaccagttgagccgaaccctttggattggtacccatggaacaccagggcccccgagaagcgtggcgctggcggtgccgacctgctgctggcactgccgggccggggcgccgcagtggggcgggtggcctgtggggaggagcgcaatgaggcctgggggtggccgtgtgttgccatcctggcctctgccacttgagggtgaggaggaaggaggcagtgggctttgctggaaaaccgtaacagaaactgcctggccctcctgcggctaactgcatgcaagatgggtgtggccctgcagaaggcagatgacttcttgaagcgttccgagggagaatgaatctcagtagtaagattcatttctcactcaaaacagtgcttcattataaattactgtccttttctatgccagtgacagattgcatgctgattgagacactggataaattgcaaacaaaaatggacctttgtcacaggccactaggaagtggagaatggaggttagcataacatgggatccctttttgggaaggaagctttccaagcccttaaggggatgggttggggattttatggagggggggctttc

SEQ ID NO: 351162 - DNA, 1817 bp, Homo Sapiens
  misc_feature (182)..(191): n is a, c, g, or t
  misc_feature (218)..(230): n is a, c, g, or t
  misc_feature (336)..(336): n is a, c, g, or t
  misc_feature (1715)..(1724): n is a, c, g, or t
atccggtgaaagcgggccacagaaaggggtgaatggttctttccgcccccttcccgtttttgtgtgaataaggctccacagcgccccccggtggttaagtaaggagaccgcgggaaagggtgggcggcctcctttttttaaagaagagtgaaggggtgcataacaaagggagggcgcccccnnnnnnnnnntttcttaggcggcgccgcgccccacannnnnnnnnnnnntaggggagagacgccgaccgtgtgcggccgacggttgtgggaaaaggttggaggactgtgggcccagatggtttggatgaggtggtggtttgagggggggtgtttntccagggtttaccgcacatgtgtagggtattattatagttcaagagaaagaggggaacccgctggtgtctgagaagaaacccgctggtgtctgagaagaaacggtgaaggggtgcactacgaagggaatataaactaatcaaacattcttgaatggcaatgacagtcactaaagttgacacttcctgcagtcttttagtttagaaaccacacttcccgagacgtcccccatcccaacagggataaaatcctctagctcaactcaggtatatccccactattgggccagggagacctgcggatggcgagagcaggttctcttaggagggtgtggattgtgagcttgtgcgctggcgaggagcagaaggtcagggaggcaccgtagttaatgaatcaataaaccaaacagccgatcaatcacttcctgcagtccgagtccggcgagggctaatcgattggtccgggtattttgaaaggaaaaacggcggtggatatgttgtcaaacggaggggtgcaggagaggcggggccaggcctccaggtgacccctctggcttcctgggcctgcagaggcgccgaaacgtgcaggcgccggcgtccatgaggcgtggggcgcgccgggcgagtccctgcttgcaggaggcgcccgagaggccgtcgcgtaccctggcaagaggagctggttagcacctcccgaccccgagaaggcccagggggcgcccggcgggcggggcggggaccgggcgaggcccgcctcccattggccgcatagcgccgcccagcgcgggccgccgttataaagcagccgccggcagccgggtgcactcacagcacgctgccacgccgacgcagacccctctctgcacgccagcccgcccgcacccaccatggccacagttcagcagctggaaggaagatggcgcctggtggacagcaaaggcttcgatgaatacatgaaggagctaggagtgggaatagctttgcgaaaaatgggcgcaatggccaagccagattgtatcatcacttgtgatggtaaaaacctcaccataaaaactgagagcactttgaaaacaacacagttttcttgtaccctgggagagaagtttgaagaaaccacagctgatggcagaaaaactcagactgtctgcaactttacagatggtgcattggttcagcatcaggagtgggatgggaaggaaagcacaataacaagaaaattgaaagatgggaaattagtggtggagtgtgtcatgaacaatgtcacctgtactcggatctatgaaaaagtagaataaaaattccatcatcactttggacaggagttaattaagagaatgaccaagctcagttccatgagcaaatctccatactgtttctttcnnnnnnnnnnccttactgtgttcaattatccttatcataaacattttacatgcagcttatttcaaaggggggttggattaattaggaatcattccctttggtt

SEQ ID NO: 351163 - DNA, 834 bp, Homo Sapiens
  misc_feature (720)..(733): n is a, c, g, or t
  misc_feature (735)..(735): n is a, c, g, or t
  misc_feature (740)..(744): n is a, c, g, or t
atcaggccaaatcggccgagctcgaattcgtcgagagcggacagcacgctgccacgccgacgcagacccctctctgcacgccagcccgcccgcacccaccatggccacagttcagcagctggaaggaagatggcgcctggtggacagcaaaggctttgatgaatacatgaaggagctaggagtgggaatagctttgcgaaaaatgggcgcaatggccaagccagattgtatcatcacttgtgatggtaaaaacctcaccataaaaactgagagcactttgaaaacaacacagttttcttgtaccctgggagagaagtttgaagaaaccacagctgatggcagaaaaactcagactgtctgcaactttacagatggtgcattggttcagcatcaggagtgggatgggaaggaaagcacaataacaagaaaattgaaagatgggaaattagtggtggagtgtgtcatgaacaatgtcacctgtactcggatctatgaaaaagtagaataaaaattccatcatcactttggacaggagttaattaagagaatgaccaagctcagttcaatgagcaaatctccatactgtttctttcttctttctttcattactgtgttcaattatctttatcataaacattttacatgcagctatttcaaagtgtgttggattaattaggatcatccctttggttaataaataaatgtgtttgtgctaataannnnnnnnnnnnnnanaaaannnnncccgtgcgggccggcctccggcccctcgaaaagcttttctaaaaccatttcggtttggcgcgcgccggggccccaataaaggtaaagtgc

SEQ ID NO: 351164 - DNA, 481 bp, Homo Sapiens
cattactgtgttcaattatctttatcataaacattttacatgcagctatttcaaagtgtgttggattaattaggatcatccctttggttaataaataaatgtgtttgtgctaatatatcttgtatgcattctttaaaccttacaggaaattagtgatgagttttaataattattaattgagtaaaggttggggcagtcttgagggtacgtatattgagatgacactctagcaatttatatagatagctactcttacaggaaatactgtaccaattatttaagcttgccctatactatttgaactttgtatgaattcaggaatcttgaatttctggcagagaccattctcaataaaaggtgactacaacataaactttattattcaaattagagcaaaggtttaattaaccagcattgactaaaatactttttgtgtgtatttatatacaaatataagtaatactatgtatggaataaccag

SEQ ID NO: 351165 - DNA, 835 bp, Homo Sapiens
attctcattgccagcctcggggggtggctggcacaaagagcccaagattaaacgcggcgcctgggctggcgaggtcggggtcgtgtggtaactctccaggtgctcctcgctggatcccggggtcccagccccgccgccgcgccccgcccagctctgtccccgcagcctcgcgggctgccgggctttgtggttcgcccgtgccgctgggcccctgctgggggtgtcgttacgagcatgtgcagacagcagcccaagccttcagaataattccttcagcagcaccactgtaacagagtgtgacgaagatccagtctctctacatgaagaccagactgattgctccagtctcagagatgaaaacaataaagagaactaccccgacgcaggggctctggtagaagagcacgcgccgccctcttgggagccgcagcagcagaatgtagaggcgaccgtgctggtggacagcgtattgcgacccagcatgggcaacttcaagtccaggaagcccaagtccatcttcaaagcggagagcgggaggagccacggagaaagtcaggagacagagcatgtggtatccagccagtcagagtgtcaggtgagagcaggaacaccagctcatgagagtccacaaaacaatgccttcaagtgccaagaaacagtgcgacttcaaccaagaatagaccagaggactgccatttcgccaaaggatgcttttgaaactcggcaggacttaaatgagggggtgaactatatagattgacccacattctttcacacagtttctgttatggccaaaattgggagaccagaaaagaccttggggaaacttgaaggc

SEQ ID NO: 351166 - DNA, 1103 bp, Homo Sapiens
ggtccggaattctccggatgtgcagacagcagcccaaggtagagcgagcgtgccgggcgagcccggagacttgccttgcaatgccatgtttgtgtatgtgctctaactcccggagagcaatcagggagacggctccccggccagacttggctgatgttttcttgtttctgtttcagccttcaggataattccttcagcagcaccactgtaacagagtgtgacgaagatccagtctctctacatgaagaccagactgattgctccagtctcagagatgaaaacaataaagagaactaccccgacgcaggggctctggtagaagagcacgcgccgccctcttgggagccgcagcagcagaatgtagaggcgaccgtgctggtggacagcgtattgcgacccagcatgggcaacttcaagtccaggaagcccaagtccatcttcaaagcggagagcgggaggagccacggagaaagtcaggagacagagcatgtggtatccagccagtcagagtgtcaggtgagagcaggaacaccagctcatgagagtccacaaaacaatgccttcaagtgccaagaaacagtgcgacttcaaccaagaatagaccagaggactgccatttcgccaaaggatgcttttgaaactcggcaggacttaaatgaggaagaagctgctcaggtgcatggagtcaaagaaccggcgccagcatcaacccagagcgtgcttgccgatgggacagattctgcagacccctcaccaatccacaaaggatgggcagaattgaggccgacagtggacccagaaaaacctccacttctgtgggggaccaacagggtgggtctatcccatcacctgaagggggaaaacccccctggttgtcgccccccgatgcttccatctttcaggcaaaagccagaaaaattcaactttaaaaccccgaggtcagacccccattctccaccccggaaccttaacaaggtttttgggagggcccccgggagatcttttcccccctttccaccttgtggggcaaaatgggccacgggaatcccccccataaacacatatcccccaaagttttttccaaggggtgacatctcccagag

SEQ ID NO: 351167 - DNA, 640 bp, Homo Sapiens
gggaatacattgttgagtttctgaagaagaaggctgagatgcttgcagactatttctctttggaaattgatgaggaagggaacctgattggattaccccttctgattgacaactatgtgccccctttggagggactgcctatcttcattcttcgactagccactgaggtgaattgggacgaagaaaaggaatgttttgaaagcctcagtaaagaatgcgctatgttctattccatccggaagcagtacatatctgaggagtcgaccctctcaggccagcagagtgaagtgcctggctccattccaaactcctggaagtggactgtggaacacattgtctataaagccttgcgctcacacattctgcctcctaaacatttcacagaagatggaaatatcctgcagcttgctaacctgcctgatctatacaaagtctttgagaggtgttaaatatggttatttatgcactgtgggatgtgttcttctttctctgtattccgatacaaagtgttgtatcaaagtgtgatatacaaagtgtaccaacataagtgttggtagcacttaagacttatacttgccttctgatagtattcctttatacacagtggattgattataaataaatagatgtgtcttaacat

SEQ ID NO: 351168 - DNA, 904 bp, Homo Sapiens
  misc_feature (686)..(686): n is a, c, g, or t
  misc_feature (861)..(861): n is a, c, g, or t
atgtgaaagtctacagcaaagatctcacctgtgtgcatcatagaatcacactggactaaaaccttttgagtgtaaggattgtggaaaatgttttagtcgaagctctcacctttattcacatcaaagaacccacactggagagaaaccatatgagtgtcatgattgtggaaaatctttcagccagagttctgcccttattgtgcatcagaggatacacactggagagaaaccatatgaatgctgtcagtgtgggaaagccttcatccggaagaatgacctcattaagcaccagagaattcatgttggagaagagacctataaatgtaatcaatgtggcattatcttcagccagaactctccatttatagttcatcaaatagctcacactggagagcagttcttaacatgcaatcaatgtgggacagcgcttgttaatacctctaaccttattggataccagacaaatcatattagagaaaatgcttactaataaatatgggaatttttcacaaagagcaatgactttattttgcattggagaactcctggagataagctgtacaaattgaatctatgtggaaatgctttcagtcttgttactatcctattgcacattagagaattggtcctggaagggaaagaaaccacagattttatttcagtacacaaatccatcagattttctntctcttcatgaattcctacagaagtaattggcctgagagcattcttgaccaagtcttaaatgctagaatctgacgaaggaattattaaataggtgagttgttgagcgagaaccccttcatttgaaaagaaatgagtatgctactatagggagagttgttgctgagaattaagaantgatacagttaatgcacaaaagatggaaataatattcagccat

SEQ ID NO: 351169 - DNA, 789 bp, Homo Sapiens
ggggccgtaaagcagctcggccgagcagactgctgcggttcctgggtggcggcggcatggaggcgcgcttcacgcgcgggaagtcggcgctgctggagcgcgcgctggcgcggccgcgcaccgaggtgagcctgagcgccttcgcactgctgttctccgagctggtacagcactgccagagccgcgtcttctccgtggccgagctgcagtcgcgcctggccgcgctgggccgccaggtgggcgcgcgcgtgctggatgcgctggtggcgcgcgaaaagggtgcccggcgtgagaccaaggtgctaggcgcgttgctcttcgtcaagggcgccgtgtggaaggcgctcttcggcaaggaggcggacaagctggagcaggccaacgatgacgcgcgcaccttctacatcatcgagcgcgagccgctcatcaacacctacatctccgtgcccaaggagaacagcacgctcaactgcgccagcttcacggcgggcatcgtggaggcggtgctcacacacagcggcttccctgccaaggtcacggcgcactggcacaagggcaccacgctcatgatcaagttcgaggaggcagtcatcgctcgagaccgggccctggagggccgctgacctgccggagataaaggatacagagagccccccttccaaaaggaaataaacagaaataaaacccttgtcgggccgccctccggcccctccaaaagcttttctaaaaccatttcgctttggcggcccgggggccccgcaaggggaaaggggaaacctgcgtcctaag

SEQ ID NO: 351170 - DNA, 575 bp, Homo Sapiens
tgtgagacagttgtcaaattgttgctagcttgaaatctgcggcaattggagtatttacaccatagaaatgctataagtgaagacctacctttcccttaagagctagttgttaaacctttaccagcataccactggaccttgtctaaaatttctttgtgttcccagtgtcttgcccagtagatacaagataaatattgccagaatcagatatcaggaagtagtaagaaaaggagttaatatgccaaaccaaatcactcgctcaattgaataattgagatcttctgttcatttgttccttggaccttaatcatttgcattttggagaaaattttttcctgctttaaaagtctgtaatttcagtttttgtgtcggggagagggaaaaactatttgtctgtagttgctttttgtgacaaagtgaatacccactgggctaagtttcatatctaaagcttgtcactaagaattttcatttttaggggtcaaaaacctattttgaaaatagtgttgtgtgaatgctgtaagtgttgtacatgtctctggtttcagaattaaaagaattcagagttaaaaaaa

SEQ ID NO: 351171 - DNA, 632 bp, Homo Sapiens
  misc_feature (143)..(151): n is a, c, g, or t
gggacaaaaagtatactacagagagatgcattttttctcattttcagcaagactcctctaaccatttactcatttactgtattcctgctctgaagatgtggatacagaattagtcactcttgtcactttatttatttattggnnnnnnnnnaaccatctgtgtacattcctttcatagggtagagttctagttctagaagttcttattttgtttttgttgtaatgtttgaatactatttaatatccggttttaatattgctggatttgctacctttggttacttgtgcagtgttaaaagtaatccactttcttgtttaatataccagatacatagcaaaagcagcttggaataattatagctgtttatttggctgtgctcagttactatattaagatcttgtactgtgtaacagtaactcttttttgcttttcagtaatttaatatgttcacttaacaaaatacgaactttgagatgcactaaagttttgtttcagcagtggctcaaaaaatttcagaaattacttttgtaattatttgcaattaattgttcttttatcttacaattgtttaagcctgtgatctttcttctcccagctaagagttcttcaataaatttaagaaatacctggt

SEQ ID NO: 351172 - DNA, 481 bp, Homo Sapiens
  misc_feature (188)..(188): n is a, c, g, or t
aggtcatccccagcaggtgagcgtggcccaccctacacactcaggtttctcagggtgccactccgtgcctggcgctcagcacgacatggtggattcacacccaagccccaggtgccaggacaagaatgccagcgctgggcatactgccggcccattccccccggcccgagaccctggacacccgcccnccccccggccagctcaggcttctaggtggaatgtggagacgggtttcagccacactcccaaccttagctgttgagactcaactccaaagacggaaagttagaaaccccagggcagagtccaggagccgacctgggtctcacacaggtgtcccagaccagcgtggggatgcccaggtggccaggcccagcctgcggccgctgaagttacacctgccgggtgagtagggctgccgggaccccaccttgagtgggagacccccagtgtatcccagaagtggttaacaagcaaactg

SEQ ID NO: 351173 - DNA, 518 bp, Homo Sapiens
  misc_feature (454)..(454): n is a, c, g, or t
ttgttggggcccaggacaaggggacaggcatttgtgggcctaacctccccaggcagataggaggaggaagccatgtcccagcaggctagggcagagggacccccagtgccaacagtgctttatcagcgggcgccaggcagggccatccccagggtgaggacaacatctccctgggccctgttatcagtcacagaatccacaggacgctccttgggttaacgtgtaaccatgagccctcccctccaccccctgaagccactcgctcccagattaggtcgctctggggctatcaggccagcatggacgctggcaaagcggggcagaccctgaagactcactgctcagcccaggtgagagccttctgagctgtgcctggggctggggggacagggccctggaaccccagcagccggcgggtctgggagctgctgtccttgagttggttgggccctgngaagctgggttctggcagcctggtccctgaatgggtccagcctgtacagctggggtcccaggtg

SEQ ID NO: 351174 - DNA, 984 bp, Homo Sapiens
aagtctcgcgatagccagccgcggctgcccttgcgcttcccgagctggcggggtccgtggtgcgggatcgagattgcgggctatggcgccgaaggtttttcgtcagtactgggatatccccgatggcaccgattgccaccgcaaagcctacagcaccaccagtattgccagcgtcgctggcctgaccgccgctgcctacagagtcacactcaatcctccgggcaccttccttgaaggagtggctaaggttggacaatacacgttcactgcagctgctgtcggggccgtgtttggcctcaccacctgcatcagcgcccatgtccgcgagaagcccgacgaccccctgaactacttcctcggtggctgcgccggaggcctgactctgggagcacgcacgcacaactacgggattggcgccgccgcctgcgtgtactttggcatagcggcctccctggtcaagatgggccggctggagggctgggaggtgtttgcaaaacccaaggtgtgagccctgtgcctgccgggacctccagcctgcagaatgcgtccagaaataaattctgtgtctgtgtgaacacagaaccaagatgcccaccagagcttcaacccaaagcgcatgaatggaagcttcttcaagcaagacaacatttgagccaagcaacgataggcccgaccgctcgatcacattatatccaacgtggctgcgcctcccattggaatgtgggctccctggcatgtgctcccttagactaccaatgccatggccggatagactaggccgttgcggcccccattagttcgcccactatgtaaccaactgtcccggaagaacctggtccacaacaacacggggccgaccggggtctcgactggagacacccgtggcctacttaagtgaaacttcttgtttccaggaaaacaccccacgtgtatccgttggtgtagtttcccacaatacatttgtctgtggattacccattccag

SEQ ID NO: 351175 - DNA, 598 bp, Homo Sapiens
gtcagtactgggatatccccgatggcaccgattgccaccgcaaaagcctacagcaccaccagtattgccagcgtcgctgtaagggactgaaggttggagaagcatattaactgctccagggtcatttgaagctgggctgcaagtccaggtcggctgacctgctcctaggggtctctgaagcaaggaatgttcccatcaggcctgaccgccgctgcctacagagtcacactcaatcctccgggcaccttccttgaaggagtggctaaggttggacaatacacgttcactgcagctgctgtcggggccgtgtttggcctcaccacctgcatcagcgcccatgtccgcgagaagcccgacgaccccctgaactacttccttcggtggctgcgccggaggcctgactctgggagcacgcacgcacaactacgggatttgcgccgccgcctgcgtgtactttggcatagcggcctccctggtcaagatgggccggctggagggctgggaggtgtttgcaaaacccaaggtgtgagccctgtgctgccgggacctccagcctgcagaatgcgtccagaaataaattctgtgtctgtgaaaaaaa

SEQ ID NO: 351176 - DNA, 830 bp, Homo Sapiens
aaggaggcctcagaggtttctccacagtcctcttctgggcaaattcttgtttcttcacatgccggactagcttaagaccaatgcagtagcttatttccaagccttgcaaagtatataatatctaagaggaaaggttttgtcatcccagcgttgtccactttgtggggctttgtaggtagacggagccacactacaggcagggtatgagcagagggatgtatggagtgtgggtgactctgagcctcactgctgctgcaaggtggggaaactgtaagtgaacccctgtgggtgcgggggagggtatccggtgcacagggaggtggccagcgcccccgggcactgctgctcataggtacctttccgctgcctcctccctgctctcctgtgcaggaatgtctctgagctgttcacgttgatgcttcttggttggcaagacttgggtgtagacatgaaaccatcttactaaaagcgtcttaaaatgaccaattccagaatcaagcgtattccgttttcttcctgcatgatccctgggccctcccgcaggctgagcaagtctgtaaactgattctgggagaaaccaagctgctggccatagggtgtccttgggtacatccaggagtcttcattgcttctgttattaccccgtctcctctgccattttctacagcttgctgagttgtcattcctttgcaacattaaaatacatgctgaactcatatttttccttccttcactgttgtagtaaagagacatatttcatgaatggcattgatgctaataaatcctttgcacaaaaatttgaataaacttccagtggtttcgataatgta

SEQ ID NO: 351177 - DNA, 1174 bp, Homo Sapiens
  misc_feature (1159)..(1159): n is a, c, g, or t
agtctccgccagatccggggcgggtccgcggccgcggcgggaacatggaggagctgctgaggcgcgagctgggctgcagctctgtcagggccacgggccactcggggggcgggtgcatcagccagggccggagctacgacacggatcaaggacgagtgttcgtgaaagtgaaccccaaggcggaggccagaagaatgtttgaaggtgagatggcaagtttaactgccatcctgaaaacaaacacggtgaaagtgcccaagcccatcaaggttctggatgccccaggcggcgggagcgtgctggtgatggagcacatggacatgaggcatctgagcagtcatgctgcaaagcttggagcccagctggccgatttacaccttgataacaagaagcttggagagatgcgcctgaaggaggcgggcacagtggggagaggaggtgggcaggaggaacggccctttgtggcccggtttggatttgacgtggtgacgtgctgtggatacctcccccaggtgaatgactggcaggaggactgggtcgtgttctatgcccggcagcgcattcagccccagatggacatggtggagaaggagtctggggacagggaggccctccagctttggtctgctctgcagttaaagatccctgacctgttccgtgacctggagatcatcccagccttactccacggggacctctggggtggaaacgtagcagaggattcctctgggccggtgatttttgacccagcttctttctacggccactcggaatatgagctggcaatagctggcatgtttgggggctttagcaagctccttttactccgcctaccacggcaaaatccccaaggccccaggattcgagaagcgccttcagttgtatcagctctttcactacttgaaccactggaatcattttggatcggggtacagaggatcctccctgaacatcatgaggaatctggtcaagtgagcgggccttactctggaaggaggcctcagaggtttctccacagtcctcttctgggcaaattcttgtttcttcacatgccggactaagcttaaagaccaattgcaagtagcttaatttccaagccttgcaaagtattattaatatctaagagggaaaggtttttttcatcccagcgttgttccantttttgggggggctt

SEQ ID NO: 351178 - DNA, 929 bp, Homo Sapiens
  misc_feature (82)..(82): n is a, c, g, or t
  misc_feature (355)..(355): n is a, c, g, or t
cactgagtgcaggtcggctgaagcccaatgcattcatcagcccatgtctctgctgtcctccatgtgctctgcctggtccagncgctcgctgctcctgctgttggaatggacagtgaagaccgtctcgttcagctggtcccagtagtactcaacaccagagtttaaggcctctggtcggcagatcaccaggtctcctttgttagtaccataggccaagccaagccctggctcaggcagccaacgggcagagttgatactgacatgtctccgctggtcggcaggcatgggataaaggacgttgaaaactctcctcatggaggtctctccaccatgggcccgttgcagcctgaagacntgggccaccatgtgctctgtggaggggtgcagcaggatccttcgtgaggccaagcccaccattacatatctgcccattggggacaggctcaccgaaatggcattggagaccaaactcgcttggtgtatgagcatttcgcccaggttatggggggaccagggagtacactgccaggatgccttcatcaggaaagcccctctggctgctggggatgaaagctgccaggagctggccatctgcagaaatgtcacagctggcatcagtgtaaatcttgcagttctgcaccagcacattcacggaagcattactgatttcagggaggtcaaacttagtgaagtcccaccactggagccggtaggtagtattggcaatgttactggccacagcagactgtccatcaccgatcactgcccctgccaggaccctgttaacagaagagtgagtagccaagccaggctgtccacgttcatgaaaaatcccagcataaggcaagtactcaggcagcaagaaacgccttgggacaaagcgtccaagcgaaggtgcagacatccgggcattgcgtggagctcggtgg

SEQ ID NO: 351179 - DNA, 677 bp, Homo Sapiens
tacgcccagaggatgaccagtatctctcacggagagacagtattcgccagcgctccatgcgctaccaacagaaccgtctccgttcttccacggtcctcctctgtcctcagacaaccagggtccatcagtagagggaaccgacttggaatttgaggactttgaggacaatggtgacagatccaggcaccgagctccacgcaatgcccggatgtctgcaccttcgcttggacgctttgtcccaaggcgtttcttgctgcctggagtacttgccttatgctgggatttttcatgaacgtggacagcctggctgggctactcactcttctgttaacagggtcctggcaggggcagtgatcggtgatggacagtctgctgtggccagtaacattgccaatactacctaccggctccagtggtgggacttcactaagtttgacctccctgaaatcagtaatgcttccgtgaatgtgctggtgcagaactgcaagatctacaatgatgccagctgtgacatttctgcagatggccagctcctggcagctttcatccccagcagccagaggggctttcctgatgaaggcatcctggcagtgtactccctggcccaggttatggggggccaggcctcgtgccgaattcacacacccaggcctcgctacctagtcagtaagtttgcc

SEQ ID NO: 351180 - DNA, 1491 bp, Homo Sapiens
  misc_feature (1400)..(1400): n is a, c, g, or t
cggggaagatggagtatcccgcgccggccacggtgcaggccgcggacggcggagcggccgggccttacagcagctcggagttgctggagggccaggagccggacggggtgcgctttgaccgcgagagggcgcgccgcctgtgggaagccgtgtccggtgcccagccggtgggtagagaggaagctggaaagggctacccctgcaaaacatgtaagatagtgctgaactccatagaacagtaccaagctcatgtcagcggcttcaaacacaagaaccagtcaccaaaaacagtggcatcatccctgggccagattccaatgcaaaggcaacccattcagaaagactcaaccaccttggaagactagaggtgattctgcccagcatcccatattgggccagccatgagccagcttcccgtgactgctcagcccttggctccctcttgctcgttgttctcaccaggaaagtacacgggcctgaggcaggattgggccacagacagcctctcattggtccgggctaattcactcctgctgctcccctttggcaggggtcctgtaggtcatgacaggggaggcaagggtattgagagactcggggtctcgcggggtggtagtttggagggtggctttccccatttcccaacccctctgggccttaggtgctgaggcccctgccacctgtctttcctctaaaggtcagttttgggccagttcttgcaactaaagagcagagatctctctgggccctagacatttccagcaaaacctggaactttcatgccaaacctggggcagggcaggaaacagaggaaaatggctgcaacatgggagcttggagctaatacgacactctgccttcccccagaaggtgcaggctttcctgagtcttagaccagatatggccagttgcgcaggtttctgccaactgtgaagtatcctcctggagcagtgacacaatcttggcggagcattgctacccccgctgccccctccacagttcctgaatggtgctaaggatctgcagcagttggcaacgagctggggctgggggcggcctccatgtccactgagatcataggacactccaatggggatgggacctttcccctcctccatcagaggtgctctgaccctaggttacacgggaaagtgccccacatgcaagtctccctgagggttctgcccctaaaggcagactgcctcatgcccgctagctgtgaggttcattgctaccctcggccctactagccctctcttcccccttgtgcagcggaccacttgcccagtttgctgtggtgctagccttccccatcatccaccgggtgatttctgggtcccagggaaagaaagagagagctgatgcaggtttctacagtgaggaacaggcgtttcccaggncccacacccagatttctctatctttgcttgtgttttatggcctggggactgagtccacacgggatagatttttccttgtaaccttgagacg

SEQ ID NO: 351181 - DNA, 908 bp, Homo Sapiens
gacagcttccggcaactgatgcctccactggccactcctccctccgtccacctgtcacttcgggtagctgggaggccaggtgaggggcgcgcacgggggaggggcgtgcatagttgagacagaaacccggaagacccaactgtggcgcggcactgcttgaccgaggggctccggagcccagctgcaccggctgcggtttgagcgcccagggccggggtgcggggtggaccgcggcggcccttcgaccaaaggtgcttgaagctcgagcccattactttctgtggactctgactcgagctgcaaaagcttttctgcactgtttttctcatctatgttatgaagataataattccggccctaaccgtagtatgcttgcgagaatccaacaatatgatgtttctgaaagcgccggctgaactaagagcgcgtgaaatagaatgacagacagctctgcaagaacggaggccctgtctattttgtacccagctgtacgttaaaaaaaatggaacctttttcctgtgacactttcgtggcattacctccagcaacagtcgataacaggattatttttggaaaaaattcagatagactctatgatgaagtacaagaggtggtttattttcctgctgtagttcatgataacctgggagaacgtcttaagtgtacatatatagaaattgatcaagttcctgaaacatatgctgttgtcctgagtcgcccagcgtggttgtggggggcagaaatggggagccaatgagcatggagtttgcattgggaaatgaagctgtatgggggaagaggaagaagtttggtgatgaagaagcactattaggaatggaccttgtcagacttggctttgaagagctgatcaggtgaaaaagcctcatgtcattgttgagttattgaaa

SEQ ID NO: 351182 - DNA, 1733 bp, Homo Sapiens
  misc_feature (366)..(366): n is a, c, g, or t
gcttccggcaactgatgcctccactggccactcctccctccgtccacctgtcacttcgggtagctgggaggccagtgtacatatatagaaattgatcaagttcctgaaacatatgctgttgtcctgagtcgcccagcgtggttgtggggggcagaaatgggagccaatgagcatggagtttgcattgggaatgaagctgtatggggaagagaagaagtttgtgatgaagaagcactattaggaatggaccttgtcagacttggccttgaaagagctgatacagctgaaaaagccctcaatgtcattgttgacttactagaaaaatatggccagggtggaaattgcacagagggtagaatggtattnagctatcacaacagtttcctgatagctgataggaatgaagcctggattctggagactgcagggaagtactgggcagcagaaaaagtacaagagggagttcgtaatatttctaatcaactttccataacaaccaagattgcccgggaacacccagacatgagaaactatgctaagcggaaaggttggtgggatggtaaaaaggagtttgattttgctgcagcatattcctatcttgacacagccaagatgatgacttcatcaggcagatactgtgagggctacaagcttctaaataagcacaaaggaaatataacttttgaaacaatgatggaaattcttcgagataaaccaagtggcattaatatggagggagaattcctgaccactgcaagcatggtttctattttacctcaagactccagccttccttgcattcacttctttacagggactcctgattcctgagagatctgtttttaagcctttcatatttgtgccacatatttcacaactattggataccagttcaccaacatttgaacttgaagatctagttaaaaagaaatcacattttaagcctgacagaagacacccactctaccaaaaacatcaacaggcattggaagtagtaaataataatgaggaaaaagccaaaataatgttggacaacatgaggaaactggagaaagaactattcagagagatggaatcaatccttcaaaacaagcatcttgatgtggagaaaattgttaatctctttcctcagtgtacaaaagatgaaattcaaatttatcagtcaaatttatcagtcaaagttagttcttagtgatcatatggtcagctaatattagttcttagtgatcagtggtcagtaatcttcaaagtcagaatctatcaccttggtaaattatataaacctaacttgagcagatctgattattcttggatagtattcaagtggtatcttgactattaaactacgtatagtgttgctgaaatagaaagaaaacagcattggaattggattcatgtatcgtgggatacaggtgttatttcaggtgatgtacttgcattattttctttagccatagtaactttttgtcacaataactaagtattcaattatatataaagagtgaaacattaaaatgacgcatggagtggatattgattataaatagggggggccctgaaatcgttttggtagtgacatgaagaaagccgattttggttttgcgattgaaaatattttagtgggttagttgtttggcttgtaggtaaccttgaaccatgtgtaaaaggaaaaaggtttggaatgtacccattggtgcatacggtttttgtgtgtgtggtgaatgcccttttgt

SEQ ID NO: 351183 - DNA, 1335 bp, Homo Sapiens
gtagcgaggcctgggtggcgaatttggcacgaggggagtgtcagaggcgccctgccagctgtgtcatctcccccagctccagtttcaccctcatcacccaccacacataatggggagctggagccgtcattctcccccaacacggagtcccagattgggcctgaggaagccatggagaggctgcaggagacagagaagattatagctgagctgaacgagacatgggaggagaagctacgcaagacagaagccctgaggatggagagagaagcattgctggctgagatgggggtggccgtccgggaggatgggggaactgtgggcgtcttctctccaaagaagactccccacctggtgaacctgaacgaagaccctctgatgtctgagtgtctgctctaccacatcaaagatggcgtcaccagggtcggccaagtagatatggacatcaagctgaccggacagttcattcgggagcaacactgtctgttccggagcatcccccagccagatggagaagtggtggtcactctggagccttgtgaaggagctgagacatatgtgaatgggaagcttgtgacggagccgctggtgctgaagtcagggaataggattgtgatgggcaagaaccacgttttccgcttcaaccacccggagcaggcaaggctggaacgggaacgaggggtccccccacccccaggaccgccctctgagccagtcgactggaactttgcccagaaggaactgctggagcagcaaggcatcgacataaagctggaaatggagaagaggctgcaggatctggagaatcagtaccggaaagaaaaggaacgaagccgatcttctgctggagcagcagcgactgtatgcagactcggacagcggggatgactctgacaagcgctcttgtgaagagagctggaggctcatctccctccttgcgggagcagctgccgcccaccacggtccagaccattgtcaaacgctgtggtctgcccagcagtggcaagcgcaggccccctcgcagggtttatcagatcccccagcgacgcaggctgcagggcaaagacccccgctgggccaccatggctgacctgaagatgcaggcggtggaaggagatctgctaccaggtgggcactggctgacttccaccacgggcggggctgaaattgaggcccctggccgcccttcaaaaatgcgggagcttgtgttcgccaccttatggcaagcccagaacgggcccccggaaaaacaccctggaaagggccttgtggccccccggggatttttctggggaacacctggttaaggcccaggggagggaaaaggaaggttgg

SEQ ID NO: 351184 - DNA, 2395 bp, Homo Sapiens
agcggggttcttctgggcgctaagggagctgacggagagggccaccgcccagcaatagacggtgcctcagcctgccgagccgcagtttccgtggtgtgagtgagtccgggcccgtgtcccctctcccgccgccgccatgggctgcacgttgagcgccgaagacaaggcggcagtggagcgaagcaagatgatcgaccgcaacttacgggaggacggggaaaaagcggccaaagaagtgaagctgctgctactcggtgctggagaatctggtaaaagcaccattgtgaaacagatgaaaatcattcatgaggatggctattcagaggatgaatgtaaacaatataaagtagttgtctacagcaatactatacagtccatcattgcaatcataagagccatgggacggctaaagattgactttggggaagctgccagggcagatgatgcccggcaattatttgttttagctggcagtgctgaagaaggagtcatgactccagaactagcaggagtgattaaacggttatggcgagatggtggggtacaagcttgcttcagcagatccagggaatatcagctcaatgattctgcttcatattatctaaatgatctggatagaatatcccagtctaactacattccaactcagcaagatgttcttcggacgagagtgaagaccacaggcattgtagaaacacatttcaccttcaaagacctatacttcaagatgtttgatgtaggtggccaaagatcagaacgaaaaaagtggattcactgttttgagggagtgacagcaattatcttctgtgtggccctcagtgattatgaccttgttctggctgaggacgaggagatgaaccgaatgcatgaaagcatgaaactgtttgacagcatttgtaataacaaatggtttacagaaacttcaatcattctcttccttaacaagaaagacctttttgaggaaaaaataaagaggagtccgttaactatctgttatccagaatacacaggttccaatacatatgaagaggcagctgcctatattcaatgccagtttgaagatctgaacagaagaaaagataccaaggagatctatactcacttcacctgtgccacagacacgaagaatgtgcagtttgtttttgatgctgttacagatgtcatcattaaaaacaacttaaaggaatgtggactttattgagaagcatggatgttagtgaaagttactacagtgtggagtgttgagaccagacaccttttgctgtctcatggggcagctacaagcatgaacgggaccagggaatggcagcagcatgcagaatcttagcactctttagcacaatattttgtattagggaacttttaattgacatgagatgctaaagtcagacattggaattggaagaactataaagtgtgattcgatcgtcaagacatcacttggatttcttaatcttaaatgcttatggaagatgtgaagttgaggtgctgcattctagaacttcaatatgtagcttactctttttttccccccttcttaaaccaccagtggttcatttttaaggttttttcatcaagagaagaataactttactaaattttatttctttatttgcaaaagaatctttattaaaacaaacaatcttaactatgcacatgatgtgaccagatcatcttgaaaatattcctctttagtaggaactctttgtttttaactcttggtatggtcagaatataatacttccataattacttataattctttccggttactggggctataaatacaactttttaaatgaaatttatgttattatcctgctcaaagtaccattatggtttccatatggtaattacattggaaagttctgcaataagattctagttctctcttttctttaagcttatggttgaaggttaaccttgtttgtgcagattaccaaattactgctgatgtagtatgataaagtcagcttcttggatacagacacacccagggcagctgccaatcagaaatgcaaattgctaaattccaaacagaaccagtgactttgctgctacatatttactaaattgaccactttgattcttgcttgtttgtctcagttatagggagttttgtacatggtgcctcttgttttccatcttcatggccttttctgttgagaaacatctaaagtgtattaacagtgcatgcttttactttgtaaatgtggtgccaaatccctgtttgccatcgtttttactgtaccgatgttaactgtagtaatccttagccagtatgttcttttgctgaaactgttgcattttgggacttttttccactttgtcatgtgtacatttttaatctgttatagttggcggcagtattaaaatggtgagtaaagaaaaaaaa

SEQ ID NO: 351185 - DNA, 947 bp, Homo Sapiens
agcgggctcaatctccgccagccgcggtcgctgcatcgtcagagagctgcaagagggaggcagcaaggtgcggccgccagcagtgacaccatgtgaccggcacggctcactgacacgcagctttggttaaagagcgggcgcacaggaggggaggagaccgcgcgcgggacggggaggaatggcctgtccgcgttaaaccatcacaagccatggttgcggaagggccacgcgtcccccagtaggagaatgactccgattcgtgaccctcagcgccggtgcatgtcgatatatttattgagtgtctactgtgtgccaggcactatatctatgtgcatagaaaaaccctggaaggccatacaacaatatatatagagtgatcgtctctgcttgctgagctaacaggggtgtcaagcttccattttggtatctacttctaaatacactcagaacaggagaaatttggactaattttcaaactacagacactttctaatcatgatgcatttcaaaagtggactcgaattaactgagttgcaaaacatgacagtgcccgaggatgataacattagcaatgactccaatgatttcaccgaagtagaaaatggtcagataaatagcaagtttatttctgatcgtgaaagtagaagaagtctcacaaacagccatttggaaaaaaagaagtgtgatgagtatattccaggtacaacctccttaggcatgtctgtttttaaccctaagcaacgccattatggggcagtggggattttggggactcgccctttgccctggcaaacacctgggatccctacttttttcttggtaccttttgaccttccagtggacattggctggcctataatattccaataaacccttcttattgaatctgggtccaaaaagaacaccaggccttggcctggctggcaatgaaaaaagcctgggcgggt

SEQ ID NO: 351186 - DNA, 1189 bp, Homo Sapiens
  misc_feature (28)..(28): n is a, c, g, or t
  misc_feature (31)..(31): n is a, c, g, or t
ggtaaaatgaaccccggtttgatttatnggncattaataaagcttgttaacaccttgcagtctgtcacctgctttgaaggcacagccccgggcaacggggagaggaaactgtgactgacattcattgctactccatgaaattatcaatgcctcggtatttctagcacttctccctttatgacaaattaatgcaaagtaatttcattagggaactcgaggtaaataatttggggggaccctaagaggaagcacctgctattaaggcaataggtggaaagaagtttaaagagattagaaaaaagatcagtcacacaccgaaagtctgaaggctttgaatgttttcaaaattatttttcctatttcctgaaattgccctgcaatttcttaggcattcaggtagatgtcaggttagtagctctcaaatccttcacctcttccccatgatttcatgacccctcccgccaccctgccattcatctagaagaggtttgggtttatgctgcccccctcagactgaaaacacctccagtcatacagctctcaagggaggcatttctagtaattgctttataaaatcctttcaaacgtacacattctcatggcacaaacaattacggaacttcaaattagcactgctatatttatggatttcaattaatcacccagaccagaaactgcctgcgctgctctctctttgtaatttaaaacacgctcatcattcttccctcttggccggtctggggaagctaggtttgcagcatcttgatcagctcttcggcagagctgctgaaaggcagtgggaggagactttatcatcagtgagccaaagccaggcctttcttcccgctttgggattgggcacaagctgcctgttaaccatgtaccggtattcaaggcttcaaaacaaactcacacaattctgggaaaagaaaaacatttctaatctatttttcaagtgataaaaacggcatttctagtacttaactgtacctgtcctgttttttaaatgggtctcagtttttaaccacataggtattattttttcctataaagggggaaactagaaaaactgacaactaaaaaaatagtaatccaagatatgcttattgaatagctaatatctgacagaatactgacaaaaatgagactactgattgcattctcaatttttcttttccaaaattttaaa

SEQ ID NO: 351187 - DNA, 1134 bp, Homo Sapiens
  misc_feature (278)..(322): n is a, c, g, or t
accctgtgggatggtttcaagtttagccccccacccttcaaggtgggggtcccgggggaagcccaaggtggcaaaagccatggccggggattggggacaaatacatattttttacttgccatggaacatatcctaaaagggccagcagcttttttctgctggagccacttctcagaaagaagagcaagggggaggctgccttggagcatccacaacctcctgtaaagtcactgtgatcatagtttgttcatattgtctaccctccccacaaagacagnnnnnnnnnnnnnnnnnnnnnnnnnnnnnnnnnnnnnnnnnnnnncccccttccaccatggaggaaatctctgcaacaagaggcacttgaataatatttggagagttcccatgaaaaggccttcccctcacagtgaagtgggatcaacagaacagaaaccaggtgctcaggactccatctcttcttggtcaaggggtggtggcacaaagctgatgacttcatcataggtcaggcttttccactcatctataaggaggtccctgctttcaaaggactgatcataaggatcggccactggttcatcatcaggatcgtggtactgagcaaagtaggcatgtgcaagggcttgggccgctgtaattctcttatctgagtccaatacaagcatcttctccagcaagtcgacagccaggggattggcaccaataaatacattcgcaaagttcatcttcggcatctgagtcaaagactgaatatagtttcttgcagactctgaggagattttcttcaaaagctcagcccctggggttccaacgagtcttaaaatgagcttcaactgatcaatatggtctgtaccaggaaacaatgttcttccagtcaacagctcggccattatgcatcccactgaccaaatatcaactgtctggttgtaatgcatccagttcagcatgatctcaggagcccggtaccacctagtggccacgtagcctgtcatttcatcatctgtgtgccgagccagtccaaaatccagaatcttcagctcacagtcttcattcacagctagattactaggttttaggtccctgtgaattatgtcagctgaatgtatatactttagacctcggagaatttggtag

SEQ ID NO: 351188 - DNA, 681 bp, Homo Sapiens
  misc_feature (50)..(139): n is a, c, g, or t
  misc_feature (166)..(166): n is a, c, g, or t
ccattttaaaaattattttgtggttataatgatgatgtcaatttttaaannnnnnnnnnnnnnnnnnnnnnnnnnnnnnnnnnnnnnnnnnnnnnnnnnnnnnnnnnnnnnnnnnnnnnnnnnnnnnnnnnnnnnnnnngatttacatggtaatacctaatttaanccccttccataactctgtgaagtgggtcagtattgacgggtccagcttaaactaaacagatattaggaatgaagacccaaaacaaccagcccatggtcgcacagcttgtggaaccccaggttctttgacactccagcccagtgttcccacctgcaatggcaacctaagtgaggagggggcctcagagatgaggtggtcgacccttacaatgttgatattctccatgctttctcagagcaagtggctgaatctctttcgtgacagagaactcaccacctaccaaggcagcccattttattaagtctaacttttaaaaaagatacttatgatgagcacaattctgtctctctcatactctatggaaacgaccaatttctgacctctatgtcacaaagagtaagtttagttcttcacataatagccctccaaatatttgaaatctctagtcatagccagatatattgcatcaaaataaatggctattttctgcaggagggttggtccaaatgtcctag

SEQ ID NO: 351189 - DNA, 1057 bp, Homo Sapiens
gagagaattatttggggttcaatttgtgagcctggttcatccaattaggattccagaattgtcttttacagggtcaagtgaataaataagggttgaaaagtgtaaaagttcctgaacaggagtcatgatggattaaaatatcatacaactggataaaagactgttaagaagctgtgaaatagttccctgtgcctcaaaatgtaacagaaattaagtcctagagcgttgattataagctatcctaattactgcaaataaatatgttgttcttatagttttaaatcgaaaagaaaagtcttgttatacaaccttaagctcgaaatcatattaataagagatattgtacatagtggaaaattttcagtagctaatttaagaagtttcagaaaatgctgattagaagaattttgattcaagtatttaaactgtttagttatgcatgcttcttattaaccgaaaatgataataccatttagtttagtgatcagtatgagaagcaatacctaatcctatgttgctattgtattttttcctagttggtgtgcctgctcagaaaaacatatactgtatgtgtatacatacctgtgtatatataaaaggtcaatttatatatttttctataggaaaatggagtaacaagttccctatctcccatatttatttgtccatagtaaaatggccacattgatgataatttctagaactagtttctgagattgtcagccctttgtctaaaataatggcagtattaatgattgacttctgtcactgccatagttacctggattgtcagccttggtagcctttgtctaaagtcctaaagagttccaaaaaaaatgtgttgaaatttaattgctaaatagtggttggtgattctttacagtaggaattgtaataattttcttgcaaataagttatttactgctattgatattgaataatttgtcttttattcagatatatttcaaaaagcatgaatatatgattattcataaattgtatactttaccagtaagttttcagaggaaataaagacttttaaatccttttcaaaaaa

SEQ ID NO: 351190 - DNA, 1534 bp, Homo Sapiens
  misc_feature (40)..(40): n is a, c, g, or t
  misc_feature (422)..(473): n is a, c, g, or t
  misc_feature (1453)..(1461): n is a, c, g, or t
  misc_feature (1485)..(1493): n is a, c, g, or t
attctggaaagtaaatctctggatgataaggtgctgcacnagggggagtggttcgtaagctaaaagctgaaaaatcccctaaggctaaaataaatgaagctgtagaatgcttactgtccctgaaggctcagtataaagaaaaaactgggaaggagtacatacctggtcagcccccattatctcaaagttcggattcaagcccaaccagaaattctgaacctgctggtttagaaacaccagaagcgaaagtactttttgacaaagtagcttctcaaggggaagtagttcggaaacttaaaactgaaaaagcccctaaggatcaagtagatatagctgttcaagaactccttcagctaaaggcacagtacaagtctttgataggagtagagtataagcctgtgtcggccactggagctgaggannnnnnnnnnnnnnnnnnnnnnnnnnnnnnnnnnnnnnnnnnnnnnnnnnnncctcagaaacaaaatgatggccaaaggaaagacccttctaaaaaccaaggaggtgggctctcatcaagtggagcaggagaagggcaggggcctaagaaacagaccaggttgggtcttgaggcaaaaaaagaagaaaatcttgctgattggtattctcaggtcatcacaaaatcagaaatgattgaataccatgacataagtggctgttatattcttcgtccctgggcctatgccatttgggaagccatcaaggacttttttgatgctgagatcaagaaacttggtgttgaaaactgctacttccccatgtttgtgtctcacaagtgcattagagacaagagaagactcactgttgctgactttgccccagaggttgcttgggttacaagatctggcaaaaccgagctggcagaaccaattgccattcgtcctactagtgaaacagtaatgtatcctgcatatgcaaaatgggtacagtcacacagagacctgcccatcaagctcaatcagtggtgcaatgtggtgcgttgggaattcaagcatcctcagcctttcctacgtactcgtgaatttctttggcaggaagggcacagtgcttttgctaccatggaagaggcagcggaagaggtcttgcagatacttgacttatatgctcaggtatatgaagaactcctggcaattcctgttgttaaaggaagaaagacggaaaaggaaaaatttgcaggaggagactatacaactacaatagaagcatttatatctgctagtggaagagctatccaggggagcaacatcacatcatttaggggcaggaatttttccaaaatgttttgaaatcgttttttgaagatccaaaaatcccaggaagagaaccaatttggcctatcaaaactccctgggggcctgaccaactccaaactagttggtggttatgaaccatgggtttcctgggggaacaaacagggggttttaataattannnnnnnnngttgttaagcatggggtttccacnnnnnnnnnaaattaattccccttgggggggcatttacccaagtgccccc
